United States Patent Application Publication US 2014/0057251 A1 - sequence listing, part 33

SEQ ID NO: 36130 - DNA, 2568 bp, Cannabis sativa
caatttattttaagaaaaaatattggccaactttgacatgtttgtaatgtccttcaaaatgtttactagctattgagattgtaaaattttaagatatttttctagttttagtaaaaaaggtctaacatggatgaaagttcacgagccatgatttaataaatttcaaagttcgatggatataatttggtagatatcaaagtttgagagcatggtttaatatataaataattactgaaatagtaaaattgaataaaattagataaaactctttaaagccaagaatctcaatagtttaagagcatttttaacgaccttaaaagtttaaagaatatgatttagtccacgtcaaaattcaggaacaaaaataataattagccaaaaatatttttatgaaaaaaccaaactcacctcacctcacctacttggcaatgtgagcttaactatatgtattcatttcattgtgtaaggaaagactcagactcagtggggctcatgtcatatttggttctttccttttctttctttgatagaaaagggaaagggaaagagaaatactcgtaaagttttgttagttggataacaactgttgaggtactattcagttacaatggtttgtatttaattatttgtattttttttaatactaaatcgtatatattttttcctttgtttggccgttatgtgataattaattagttatataatatgataaaattaataatacaagtggatggaacgtcttttaaaatgtctaattaaagaaaagccaaaacagacaatctaaggctgaaaatgatatcttctgtttgggaatataattgccttgttgccatgtgaatagtcgttctcctataattatattttcttaaactaaagctttaagtttggttaattacttgtttattcagttgttagcacttaatttatagctgtaatgaaatttgtagcatatggccatatatactaatacaccgccttttttaacatatacagtgaccaaaacatatattgtcccaaatttgtaccctctagattcctagggtaaggagaataattgtctatattattattcccatatttgtgtattatataactagaaatatataacagccttcctaaactaaagaaaccagaaagtttcctctaaaataataaataattaaaattgattcaatctctacgatcgtggcatgggattaattaagagcaaatgagtgtttatttaaggaaattttatatttctcattataattatttttaatattttcaaattaatattgggaaaaaattgtaattaaaggtacagaatcaaatcaattaaattttaaataatcaaataattagcaatgataagattattaaatcatgaataataatcggaggaaaaggaaaccaagaaaacaattaaggcaggaaaatatagaaatcaatatatgatctatggttcaagtctgatagatttatatgatctatgactatacttcaattcttgagcaccactaaattctctttattgattgagcaataataggtacaatacagtcgagatcgattatctgatttgttctcttaaattatttcaactctcacactcttttccaagaatcttcttcatctatagaagattctgtggaattaaatccaactagaacattcctaaccataagtcggttacatagaagacaacttgcacaactaaattacctagaatacacttacaaatcaagatcttaactgagattaacagaaaataatagaccaacttgaaagatatacttgccagctcatcgatccttgtcaagcatactcaactgttttccactcctataaattgcagctcctaaattcaattctggttagatctgaagactagagagagagtgcaatcctgtaattgctctgaactcaaaacataagaactcagagttgagaaaaagagagaagagtgagaatctgagagaaaagaaagagtgttcttgagagagaaagaagtagaatctgagaagctgatggagaacttgaaatggagagttcaaagcctatcatgattttgcccaaaaattgaaatgtaaagatagagaatagttttatgatttgtaatagtgtaaatacaaagtatgtatagatgtattaattgaggcttctaattgtgaagtgctcctaggatgtaaatggttttgtgcaatataattctctaattcataaaaaaaaaaatttgtagtacatttaaaagaataaaataaaaaagaagaaaatgccatttttataaataaaataaaaaaattaggcaaaaatctacaataacaacataaaataaatttaaaagcaactaaataaatacttaaaataatatgacaaaaaattatgacagaagatattagagagatatattgaacatctgtaatatgtaatattatattagaagtgtaattatatatatattttgatatttatataaatatatattataggaaaaaatattagttatttaattatatgtagagtaaaaaataggtaaatatttattaattttaaaaaataattaataagataaaaagataaaaaaaa

SEQ ID NO: 36131 - DNA, 1142 bp, Cannabis sativa
tctcggtatatacgagtcttaaattgatctttggtatttctctgtgcgaactatacgaatgtgactagactctatcaaggtcacatcatcccgctgagtctggttcaggcgaggtttatactcaagaggtctcttattgacatctcagctctcctcgaggaaagtgagtccacatgtcatttttataagagtctggtctcgagtttttaagtgagaaattctcactataacaaactgaataaaagattgaggtgaatcaagggtgtgattgaactaaaattctagattattataggtgaaatttttgttcataaccatgttatttttcttacttgaaaattcctcatgtttttgttgattgacttgtttcatttaagttgtgttgtttttagttgttagttagtcttactcgaggaccagtaagtaagtaaagatttagtttgggggaatttgttaggatttatttagcctattatttgtgtcatttttagagttaattttcttcttcattatcactttttggaatagaattgtgcttattttctttaattttaggttttgacacttgaaatgtataaattggtcaaatctcaaaaaaaaagatgatctacaaaatagagaaaattgtgtaaaaaattaaagttgaaacttcaagcctgaattcgattatgatctggtcaaattttggaaaaaatgaaagcataaaagttctagatctctcttttatctttttggaacatcttgaattgtccaattccaagcaatatcgaatggccaaaatactatcagttatagaaaatttctgaaaaaaaaaagataaaaaggtagcgaaaacaaagctagcttttcaagtagagttgcgatttttttaagtttaaattttaaatgtttttagtatctttttaggtaactttgttagcctatataaacacattattattagtatttttagtacattttcagagctaagaaaacccagaaactcttaattagcaagcaattcaagattacgaaaattagagagcaaaatcaatcgcgaaagtttttgtcaacggggttttcaacattcttttcttttttattttcttcttctattctaaattaatatatgtgaatttgctacaatgaacatgagtagctaa

SEQ ID NO: 36132 - DNA, 1056 bp, Cannabis sativa
ggtaaaataaattccaacaatcaccactggtcaaccgatcccgatagcaaaaaaatgcatgtcatcctaaaaaaatactcaaggccaatataagtagctgtatttttttatacttgagcatcatacacaatcatgaaccccaacatcttatccctagaactttagaagaaaaggaagtagtatttccaagtcgcaaataaccaagtactccacaccgaattaatcagcaagccaataaagctacgattcttccctggatgttccgttgttcacagagtcattggatcaaaacttctaggaaaggacctcatagtgggattcgaactttacacaaaaaataaagggcttagaatactgccacaagggttgggctataagaatttcttcacccaatgagagcaaattctgaattactttcacatggtgcaagacttattttcactaatcaaagaaaagctaattcaaaggtcatgtacaaattctcatttagaattctcaacgaattgcaatctctcattatggaaaaataaagaattctacatctctctaccattcaaaccaaatgaggatgttaatccaaccaaagcaagcaaccccataatgaatctggaatatcaacgaatgtcgagcgaagaacaatcagaagggctaattgaagacactaaatcgccatgggcgtgtcacaccttttatgtcaacaacaggacagggaaaactagaggaaaacaaaggtaggtaaatcaattatcaaccacgaaaccattttttggcagacgataaatttcctctaccaaacaggaattctcttatctctagcatctctaaagtaaagatatttttaaagtttgatctaaaagtgggtttttggcaaatgggcatctaaaaagaagacagactcagtacgacattttgcatctgaaatcatcattttcaatggacagtaatgccctttggactcaaaattatgccatccctgttcaagagagtaaaatttatagttcaatactaaaccaagccctaaaatacatcaacgatatactgttgttctcacccaat

SEQ ID NO: 36133 - DNA, 1537 bp, Cannabis sativa
aaatttattttatgtacttgtgtgaaatatattattttaaaacttaaggtactttaacttatttaatttttttaaaaaaatagtaaaacaaaaattgaattataatctatgcacacccaaaaaaacaactaaggcaatcctaactatggggaaaaaaagttcatcccctataggaagaaaatacaatagaagaggtttcacttttttcagcctctattggtcggggcatttcaatttcttgcattcgaaaaatatataatgtgatttcttaatataacggtcaacaatgtagttatagtcactaattttttctaaaaaattaaataatttaagacacaaaaaacaatgcatattaaaaaaaaaaaatactcgtgtaatactgaattttttaactatattttcaatgttgtaaatttttcaaaatttttaagaggagaaaatagagacgctcctaatgataagataaaaatagtgattttactataatttatatatatggttggtgactcaacatgatcacattcaaataaaacatttgtttttttcaatagattacaaaggcaaaaatacaaaaatattcaacaataatatgaattatagttagaattttgttttcaaaacccactcatcttgattttttcgatccagcctgttgattcattctcaactcatcgatctcatgatgtaataataatatgcctaaggtttttctctgtcgaattattgataaatatattattgtcacttttagttttcgtttgtttattcgatagatagatcaacaaacagttataaatttgcaaacctgtttaatcgacaaatattcaaaatctagcaaaactctgtcctaaatcctaatatatatataattatatatatatttgattgatcagagattaagaaaaaaaatgatatatatttaatattttgctgatattattgcaacattgtactgcagcagaaatattctaactttggagaatatttcgagtacatgtgcatgcattgtagttaagttacaattaatatatatataaatatttaagagtgattaattaaaatactttacgtgtccgagtgagagaacctttccaaagagctgtttagaatatagctaaatgttaaagtgataaaaaactcttcatgtagtggttagattaaaaagtgatgctcaacgtcaatgtgtcatatgattaagtagggaaatttgatttttcatggttagttactattggttaaaattaataatttagggttcgtttcgttacgctggtataagggttataaaaaataaatactatgtttggataaaacaatgtatattgtattatttaatacataacaaatagtccgtattagcttgtattataatatttataaaggattcggcaacaccaatctccgacccgaaccccaactcgggacactgacccgaacccgaacctgggactcggacctggacccagactcaggcgcagacccagacccggacccggcacccgggacccgagacctggaacgcgagacctgggacccg

SEQ ID NO: 36134 - DNA, 1312 bp, Cannabis sativa
gtgtcatttatttttcacagtaaagtaccaacatgaattgcacttttgtacacgtagcatatttatatttgtataattaatattattatttaaaaattataaaaaaaatcaaaatttataatactttttatttttataattttaaattttaaaatgaattttgaaataataggaatgccaatataaatgtactacgcgtacaagagtgtacacataagcagttcatagtggcaattaaccgaatgacacctaaaatttgttaacaattcagtacgtagcttgaaaggttttaccgccgaaatttgaacttagaaagctaagtgcaagtgaaactacattgaggagggtttagccgccaaatttttttttcttttttaatgtatcaagttatttatgtaaataaaatgttgtcggtgatttttggaattaaaatgcaaaaatctaatttaatataaattgctctactatatacatgaaacatgggaaagggtttataaaaaaaatgtaatgaaagatattcagtagtcattgtcacattctttatctcagcttatagccaaataaaattttgaattattagaattgaaagaataacaataaattaatttagcaacttgcaagagtatatattactataattatgggattgttattttaagacggaaaaagatccctccaattctttttcaaaatgaataactataatagttaaagggggaaaaattgcataagaaaatataaaaaggaaatactcatttttgtattaaaatagctaaaataattatttttgtttaactgtacttttttttaatttaactaatattaattggtgtaatataaataattttgagcattaaaaagattatactttttactagtgatcacagagggagtggttggaaggagtgtatccaagttcttaatagcaccatccaatttccaaaccagctttaattttcattggccaccgacagttcattttctagtgccttttgtagtttagtgtgtttaagggaaaaacattgaaaggtggggccttagactagaatggaggggggtcactcacaagacacccatgacattgtcactttctttaatcttatgttctaatcttaaccatggttatggtttggagtttgctaagctaaggattctttcttgggattaagaatcatgaagaaaaaccttcccttgattgcaacttttattaaatcaaaaagtaagggtattgttagaacttaaaaaaaaagagtagtagtaattactaatcaatggtttgtagtattaagatacttcttcttctgactataat

SEQ ID NO: 36135 - DNA, 1791 bp, Cannabis sativa
cgatgtgagattgcacaacttacccgatatttctccttacgaatcatgagattattgtctgtcataattaaataaaataaacttataataaataaacttaaagttatacaattctgagatctcattttttattttacaactatttttaaaatgatacatatatcagtgtcgaccaacgactatcagaatatgagcccgtctgtcctgaagatctaaacactttaagtctaattgtttcgatatgtacaattttcattcaactctagactcactgctgcccaacttttgctttacccttacctacacatataaacatatatctataagtcgatagactcagtaagaaaagataaaataaacatataaccagatcgtaactagacgctcatacacctaatcacgatcctatcccgcgtctaacgtgtataagtctagaacgttcgtatgaaaatatgattgaccataatatcagtctatactcggtactctagccgatgtgatagcgtcaatctatacttaactatgttgccaaacatatatttgtgagtattcagtgcaactctatgtacactaataccgcccttacttatatgttatctactaggcaactataaaaacatgtaagctaaacatgtatgcatatatatctttataccaatcttattttgattttgaattcaggtgtgccagtcaacctgagtggaaactactgctcgacgattaaaggccctcaatcaaaatttatgtaaaactagtaagtgactcgctaattcacttttgaggacttaaaatatgaaattcataaaaattcacatataacatatataatacacatagaattcaaatatatctccataattgagaaattatattcttaaggtctattttaacagtaagccctaatttctactaagaagcatatcattttaaaataataatcaaatccttaattatatgctaattttcacaataaaattatgcagtcattacatgaactctaaacacataccaaacccgcgaaagctgaccatggctatcaatagtttttaagaagatatttaactatcctaggtagatagcccatgagctaatgaagtttgctattgatatgaatcataatcattgatggtggtctattttctaatttcttttcttataatgttatgatggcttgtgttcatcaataaatgatattcaatctttctattaaattaaaattaaaaaagaaaaaagaaaaaaagaagaacctcgaggctgttggcatggtcctctcttggtccacaactccacatgcagcattaataataaagtctcaaacaggacaaatgcagatgcatgttgccttaagccttaaggttaaggaggccaaaaggataactaatttgtaagagggataggattataggattttctaaaaaaattgaggtctgtttattataaaataatttataaatattattttgaatattgtgatgtgtaatagatattaatcattttgatttataaataaaaatttagactctatattttgaaaaatggaatacattaatactttaagcccaacttcctcatccctgattgtgaattgcatatttggttgatgtaattttgtcaataaaaaccatacaattaagtaaatgaaagtgctcaaactaaacaccttctacgactatacgtggtttgttcatataccaacccacattattagtttggtgctgactcatatgccacatgtcaatattttagtccacatcatcaagccaaaatttagtgtaagcaaacctatagtta

SEQ ID NO: 36136 - DNA, 1142 bp, Cannabis sativa
accccattagaataaacaactgagaaattctcattcactttctttttctctcttcttcttctttcttttcatctactttatattattttataacaagagaaagattctcattctgtttttccattgcttactagtatacatacaaaattattatatcaaattatataatactcatatttaattgactaatagcaatattaacactaggttgtgccatctatcattaaaggttataccttcagtttcgttaactattattatacctgccaaaaaaaactattattattaaaaaaagaatccaaaattaacaccaaaaaaatccggtcaaaatggaaaaaaatcaaccacaattaaaaaaacttccaaacatagtcctgacacaccctatataaattaaaaccatataatcatcccacatctcaaaccaaaaccacccaattcaaggatggagtctacaaaatccgatgtaattttcctccctctctctctttcttcccaaccttttttcatctcctaacctttttatatcatttttattgatcatatattttgtttatacatttgtaaaatgcagattaagaatgaaagatggttgatttttgtactgggagtggtattgttgattttaggggaatgcagtacgtgcatagcagtaggaggtgaaaatgatcacaagaacaaggatggtcaagtggtgtgtagttctcgtaaacacagcgcagttttgactgagttcggtggcgtaggcgatggagttactttaaatactaaggctttcaaggctgccgttgatcatctcagccctctcgcatcggacggtggtgcacagctcattgttcctgctggaaaatggttaactggaagttttaacctcaccagtcatttcactcttttcctccataaagatgccgttattcttggttctcaggtatataatattaattaatttctcttatgcgtttgaaaaataactgcaaattctttttaaccatttgtttttctttctatattttattaaaatgtcagttatcctttttaaggaataaaattaaataaatactattatgacataaaaacgtgagaagtatgaaggcacagctcactacaatttggcatggcttgtattcatttaattattatta

SEQ ID NO: 36137 - DNA, 2756 bp, Cannabis sativa
tgccagaactggtcgaccggttggttctggtgcacaagaaccggtcggtcggttgccctgcaaggggaattcccaggttttcttctgattctattttggctcggggtgttgcgtggtatctgttttaggttgcctatgagttgtttgacctattttggagtttttaggtgtttggttatgttcggtttcagttagagtcttaatcgagaatttcaatttaaggtattcattgagttttcagttgtgatgacataggaccgggattacccagcttgttttccactcaggtcggcccatacgcttgagttttgaattgaggtaagaaatgtggtaagcaccgtatgtggctaaatgttagcggtttaatggttatagccttgattattatcaagattctgattaaaatgtttgttgagcctcagttatgacctagggttgaaaacagttattaccgttacgagtaattactcctgaaatcgtagataggtttcttacttatcgtttgcttcatcgggcaacgatagtgacatattcagctcgtagttaatgagtggtaaaggggtactttataaagtaccaagattgtgtgtttatgatattgtgtaaatgtgtaagcatattgatatgagattgaattgctgaacattattgattattgttttattcatttttcttgctgagtctctatgactcacgggtgctttatggtgcaggtaaaggaaaggcaaaggttgagcagccatgagtttgaggtcgtagcagcaatgtacatatcagtcgcagtggtacggcccaacgaataggatactctattttgaatgtattttggaaatgcaaaatttatgttgtaaaagcactattaaaccagtttgtaaatattttgaaagcaagggagtcccgtagttaatattacttagcttttattataaagaagttttatatggttgtttttaattatcaaaaatttaattacccacacttttggtataattatatagtatataaaataagaattttataaacacacacacacacacacacacacgtggcgtcccaattggacatggcattacagcttccttgcgggaacagcctttacagaataaaaatacacaattttgaagggagtaggacactcccaacccaaaatgtggtataggacctttaagcaggccaagattttataagaactcagaattaattgggaaggagaaattctgagatagttagagaactccttaaaaatattctctcaaggggagtactactccaaccttgatgtactcgaggctccaagcgccaattcctgacgaggcactagtgctggcttcaccacattcttctagaacaccctttctggtggatagcagttaaattcccctagattgatggacctaatgcgacatccttgctcttgcttgataccacaagactttagaatattgctgacgtagtctccaatagaccttactttggattccatgagctctgcctcaaaagtgactgtaggatcttggggttctttgatttacgagcctggtggtcatgatttcaaaatctaggtcacctggtgaaaaagaaacagtgatttgaggtaaaaacaagggtctcgctaaagggatagaagttacaatttgagtttctggccaagctgtatcttgcaaaaaatggcgtttaccctcagaaatttcttgcgaaaatcgcctataacgactggcaatttcaacttgatggttttctattaaatgatccctaattttggcatcatttatctcaattttggatttaggtttgtggattttgggttcaaatggaaaggctaattttttaggacattctgtttctaggaaaactgggattggaatttcaaaactagattgggacatatttgcaaaaaagaataatccccaatttctggaaaaagtaaatttgacctaaaccagaaacctatgaatctaatgaacctaaattttttccttaaaacctaaaaatgtctaacaaaacaaaaattaccaaaaaaataactgaacaacactagataaagaagacaatcaaacataataatcagactgtaagtataaaaaagaaaggtataaaccactcactgttctaaggaagattgtcaggcaaggaagaactttgtgattgagatggagatgaacgaatcaacgtgttctaaaagtttttgaggctaaaaaagtaatttaatgaaacacacaggaagaaagttagtgacaaagagggcatccaaggtgatgagaaattggagatgattttttcgcagaaaggcttgaatatttgaaaggcaaaaatggcaaaatgagtgtttacgttcaaatcttataccttggaagtaatcaccattagatcaaaagaaattagatctaacggatgggaacactacaaaattggaaaagacgagacatttaatattgttgatgtgcctcgaaatcccgaactgccaaaacccaaagcatgcaattttcaaaatttggttaagtcaaaaataaccttataatcatttaaaaagctctttttaataaaaaaaaaaattaaggggcaattgttatacctaaaattcggatacacttcagaatctaacacgtgtcctacaaatagaatatggaccaactttaatgatataataaagtttatatcattaaatgcagaataaaataactcgttattattaaataaaggtttaatagaaaatattaaaaactcgttgactatatagttgtaaagaccgcttagtt

SEQ ID NO: 36138 - DNA, 3013 bp, Cannabis sativa
tttgaaattactaattagcctaaaaaaaaatcaaatttccccacgcagacccgacccgtttgaaaacctattaattgctcatttgtcatcgaccattaccattcttaggacagactccattttcatttctccctcaccaacgccggcttcagccctccctagcgacaatctcccgtccaagggtgacaccaccgcctttgaacatcccctgctgctgagggtctccattcaactggcccttcactgcggatgaaccgtactcagtgccattcatcagatgcttcaacagtgagagttcagaccgaaaattccgacgtctgttgcattgattgaacctttgttttctgaatcgcccccaccttctgttctaacccaggtaactgctcctgccatttattatgctatactgaatcataggcttgattgttgttttattgtttagggatgatataagcaagtgtgctctgtaattaatttggtcaaatatttttgtgcgttaggtaaagaaaatggatgatcatgttggtgaaagtcctgtagtcctcctatagtttaccaaaattctacctttattccaagctcggctatagctacattgcaatttccttttaataatttttgaaaaatgagaatagaaaaaatcaattttgatcttctatttatatcatgcacaaaggtgcacttggccaagcgcctccatgcacttcttgtggtgtctgggaaggttaaagacatgtttgtttcagccagacttgtcaatctttactcttacgttggtgatatatcttttgcccgccgcactttcaatgatataccaaacaaggatatctatacttggaactcaatgatatctgcttatgtacgcacatctcgtttccgtgaagctttagattgtttttgtcatttatctttcacctctggtcttcaaccaaattcctacactttccctcctgtcataaaggcttgtggaagtctaattaatgggaagaagatacattgccaggttttgaagttgggttatcagtgggatgtctatgttgctgcatccttgatccatatgtactcacggtttggctttgttgcaattgctcgtaatttgttcaatgagatgccggttcgagatataggtacttggaatgcaatgatttctggattatgtcaaaatgggaatgctacagaggctttagatgttttgaatgaaatgaggttggagggggtaaatatggaccctctaactgttgcaagtcttctcactgtgtgtgcacaatcaaatgaagtattaagtggaatgtttattcatttacatgtcataaaacacggcttggaattcgacttacttgtatccaatgcgttgattaatatgtacgccaaatttggttacttggtcaatgctttaagggtatttaatcaaatgtctgttacagatttgatttcgtggaattcaattatcaatgcatgtgaacagaatgatgatctgaaaactgcacttgaacttttcaagaagatgcagcagattggctttctacctgatttgttaactctgttaagtttagcttccgttgtagctcagttagctgattgtcaaaaatgtaagtctgttcatgggttcattctgaggagaggctggtttatggaagatgttgccattggaaatgcagttgttgatatgtattcaaaattgggtgctataaattctgctcgtagtgtttttgaggggctccctattaaagatgtgatttcgtggaatactttgatcacgggttatgctcaaaatggtctcgcaagtgaggcaattaaattatacaacacaatggagaaatgcgaagagttaacaccaaatcaaggaactttagtgagcatcttaccagcctattctcatctaggagatgtgcaccaagggatgaaagttcacggttgggtgatcaagaacaatcttcatatggatgtctttgtggcaacatgcctgattgacatgtatggaaaatgtgggagattagatgatgcaatgtccttgttttaccaagtccctagagggacctcagttccttggaatgccatcatttcttgccatggacttcatgggcatggggagaaagctttaaaattgttcgaagatatgctagacaaagaagtgaagccagatggcgttacttttgtatcgttgttatcagcttgtagccattcaggtttggttcatatgggtaaacattatttccacttgatgctggaaaaatatgggatcaagccgagtcgtaagcactacggttgcatggtggatttgcttggtagagctggtcatttagaggaagcatataatcttataaagagtatgccagtagaacctgatgcttctatttggggagctcttcttggttcatgtagaatacatggaaatgttgagttgggtaaatttgcttcagatcgattgtttgaagttgattcggagaatattggttattatgtcttgttatctaatatatacgcaaaacttggaaaatgggaaggtgtagataaagttagatcactagctagagacaagggattgaggaagactcctggctggagctccatagaaatcaacaacaaggttgatgtcttttacactggaaaccaaacacatcagaagtatgaagagatatggacagaattgaaggttatgactgctaagatgaaaagtcttggttacattcctgactacaactttgtgttgcaggatgtggaagaggatgagaaggaagaaattctatcaagtcatagtgagagattagccattgcttttggaattattagtactcctcctagaactcctattaggatcttcaaaaacttgagagtatgtggtgattgccacacagcaactaaatacatgtccaaaataactgaaagggagattattgtgagggattccaaccgtttccatcacttcaaggatggaacttgctcttgtggggattattggtgacgatgctcttcaatgtaccaatgaattcgtttgtcttttcattcttttttt

SEQ ID NO: 36139 - DNA, 2151 bp, Cannabis sativa
  modified_base (427)..(429): a, c, t, g, unknown or other
tttgtgagtgatatttttaatttttaatcatatattatctaataattatacaacaaataaatataaataatcattgttatacagcaatatgcatacattatagtttttctataaatattataattaacaacaaaaaattgttaaaatattctaatcccttatataagcataataatatattgttttaattactctctatgaataattatatattatataataattacataacaaattattttaatacttatatttgtattgatggatagaaactatttacaagcatatattataatttaagtataaatttgatcaacaattaaaaaaaatagtagaataatttaatttctttgtattaattatcataataatataattatttatcatatataatttaatatataatataattatttataatatatannntaaaaatattattttcatatatatttttttaattttgtaagtataatttacgtgcggagcacgtattattttactagtatgataataatacaaggactaaaaggactaaaagattaattaaatagatgttacaattctttttttttaaaaaaatagatgttacaacatacacttcgtatatatttatatttatataagaaaggtagaagataaaattacaacacaagagatgaagataattttcactcataatcttgagtgtagaataataaggatcactatgacttgaataaggtgtaacatatttatccaaaaacttattttttttatatctttaagcactaagagaactctagaaaatagtttggagtactatcaagccttaaaattttttctagtaaaatgttctttttgatagaaaagattacacaaatgaacacattagacctctttttatagtgttttatacacaaatgagcatataattaataagtgtaaaacggattaataatgaaaatttggtgtttacatacaatagatagaactgttccccaatattcaaagaacgtttctgaatttttcaccttcaggcgacatgttgcctgactctaggcgacatatgtcgcttgtacatatttctatacttaaaatttgtgttttataactcccttggagccaaatcatcccacaatcccaaacgttttccatctcatttttatcaaataaatgagtattaatccaattttcaaccgttatattatcatagctttgaatctcataatcaattttgtgtaatgtcttttttattatactaaaatgtaatcaactaaaaatattacaaaagtaattaacttataactattctccacattacaattacaaagtgtagactacaatttataagttaaataaattatatattacataatttatttactaaatatatcatattatttacataataatatatatattcagggccggcctaagcattggacagcttaggccattgcacaatgcacccatttttttaagactcaatttttttttttttttaagcaaaggtttttttttttcttaatatatatacataaataaaaacattaaaattaaaaatttatgaacgaatcttaaaaaaaaaaaaaactagtgatagaattgtagttttaatgtacacggtttttttttaaagagcacaactttaaaattttgtacaaggcctccaaaatacttgagccgaccctgtatatattatcacatttaaatttatatttttattattaaataatataataatttcctattaaattaatatatgtgacacttttataatacatttgtaatatttatttaatcaattatatcaaaatattttcacgaaactaatttttttttggtgtcactttgtttttttttttttgggtgggttaattcaataaattgctcacctcaaggtttatgatttattattattttttaaagcctcaattaaaaattatgttaaatatatcacattgcattaatttttatgctaaatattaatacaatatttacacatatattcaattaattagaaatgtgttagatgtgaggatgtaatatattatgaatgtagcatgtgctattattgggtgactattcaatagttacatttttattgtaaccatatggttatatttttctttgacctataataggaggttactaataggtagactttcc

SEQ ID NO: 36140 - DNA, 3077 bp, Cannabis sativa
gaggataaaatccttttaaagggggggtaattgtaataactacttattttatctctaaaaattagtagataattagggtctaattttaaaagtagacttttaattattatttttatgattatggagatatatttgaattctagatgtgctaattatgttgtatgtaaaattttatattatttttcatattttatgtccggtaacagtggaatgcgacatatcgcctataaagtcactatgttgtggttagtattctaaaaatagtagggcatcttagataaacatttagtatgtcaagattgtttggggtgatgaatttggaccataatacccctaggtttcaaggttacttcttagtgaagtaaagattatttaggtcatttttgttttaatttgtattttttgaattagttggattttagtaagtaatccctattttgtcttttttgagttagtattatgttgaacattagttaattgattaaggataaattaaagaaaatcaacaaaataaaaaattatcttcctctctctcctttgagtcgaacaccaagaacccaaggaagaaccaactttttgccttcaatttagatcaatttttggattttgttagctaatgtagttcttatgggagttgaggtaagatcttccctccatttcttctaaatttgttcaagaaaaattaagttttcaagcttgaattttgagatagggttgatgttcgaattggttagctagaattttttttttttctgtggtgcttgtttgttagtttaagtgattttaagttgtggttgtagctttttatggagcttgagcaaggtttgagctttcaagcttaaacttttccctttcatggtgatctctgttttggagggttgtacttatgtttattgcttgaattaatattattatggcttgtataggtgttctagaaggtttgaaacgttttggggtagaattgatttgttggtgaagtttttagggtttctacaaagaacaggttgactctttcaagcttaccctgtagaaacggttaactgattccccagacagaaccctaagaaccagttttccattttgggaattctgtttaccggttctagcagttttggaatactagttttttatgttttagcgatacttaggttatttccatattatccatcgatatggaaacttttagttatgattttaagttctcaaaaagtgatttaacgtgtcacttatcaactttatgaatgttgtgacttaggggcctataaaccttcgagcagtagttctactcaagttgaccagcacacctgaatttgggatcgagataagattagtataatgatatgcatatatgattgcatatttagtgtgtttatgaatgcctattagattatattgaaatagcagtatcagtatacatagagttacattggataccgatgaatgtatatttggcttaagtactgattaatggtatcacatcggtatgacttgagtaccaagtataggctggtataatggtcaatagtgttatcgtacaaacattcgagactcagtacgcgtgggacgcgagatatggttatgaatgggtgtatgggtgcctagttttaattcattttaagtttatgcttgatttatgcttttcttaatgagtttgccgactcacagttactgtttacatgtgtagataagtgcaaagctaagactgagcagaagtgagtgcgagtaaaggatgattatacatatcaaagcggttagacctgaagtgtttgatcttcacaacagtaggctgtattttgattagtcgctaggtgaaaatttttataattaatactttgtattttagttgtaacttttaaataacgggatcccaatttatataaaggttatttatttttaattaaaagtaaagttttaattaaactcattttccaacaaacccgttcaatagcaacagatattgcacagctagtatgaaatcacaacaacacgcctaatctagtatgatgtaacatagtctatatatattatgttgagatctttgagcttatggttcatattagataaaatctatttttattaaatctcgcttccgcttttataacactgatatggaccacaaaaataaatagcaagtttaagaacaaataaaataccaaaataaggtactatagggtttaccttattcgagtatgtcatgaagtttaaaggtgttcaatttgaacacggtactaggtaataccttgttcgtgtactcttaaatatttgaaaagagggaatctcgaacaaggcatttggtttaaccttgttcgagtgataaaatgaaaatccctaaagggtgaaagtgagatacgtgaacaaggtaccaaggatcaccttgttcatgcaaacatgaagccaaagagaagaaccgcatgaacatggaaaaccttgtttgtgtaacatgaagataaatatagagaatcatagccataatgaattcccttgtttctgcatggcaactagggttaggatttctcgggtgatttagaagcccatggaacttgtaccaaatcctaagactcagatcgaagtatcatcaagacccatggtagggaataatccatgaataatttaacagggtaaaacttattcccttatcgtgtatgattgataaagtaagaagtttgaaaagttcaagacaacttcccaagaggcaataaggtgatatactcaaacttggtaaaaccctacccttattcgagtatgtagagatcttttaggattttgagcctcctcaagatagatgcaacacattttttaagaaacagaaccttctagaaggatttaaaatgatagctgactttgcatctcaagcaatacttgtaattttatgcattatttttaattgattaaatgtaaagtaagtgatatcttggtgaattttaatattaaattcaaatgtaatatcatcctaaatggcaggataatactgcgtcaggttgtattgctataaaatgccttgatctagacgtgtaaaaaggattctaattcatttaactctctcacatacttagaaacccagagagagagagagagag

SEQ ID NO: 36141 - DNA, 2226 bp, Cannabis sativa
ttctggttacaattgatataagtggaaagattgcatagtaaatacaagatacactaatcgtgggattcggacaacttgccatatcgttgtgatctaatcccaaagttataggaatttctttggtgactcacgatgcaaaagctgaatttgctaagtgttggcatgctgcgctgattgctcactgcccgactaagaggacttcgtccgagcgaatgtatgtggtgtcctgtttggcacatttcttgtgagtaggtacatagagttaattccacgtgtcaccatcgtgtgatgccacgtcaaagtgaaaaaattgggataacaaagacctttgattcactcgttaaagtttctcaaagaagataattcttacaacttctgtttggggagcttaataacatgagtgactatgagcatgttaaacaatattagaacccaagctttctaggaggatggaatattaattctcttatagtgttaattttgggagtgcaaaaagttagatccaaatctatagttggattatagattaattattcacattgaattaatgatacataaggaatcaagatataattagaagagtaaaatggtaattttgaccaattctaattatgaactaataattagagggcgaactacttatattaattatatttatatcaataactacaagtaagaattttataaatataattgtatattgtcaaagagtgcaatctattatttatagtggagtaataatggaattaataaactagattattctattgaagagttcaataataatcaagtgtttactggagctttgaaatatacttccatggtcctcagatctcctctatacaacctctacagggaaagtttaatttgatgaataaatttatgaaagagttaatttctatgagaaataattcttaagaacaaaatagtaattttgttgaaactattattttgaaggggagttatatttacaccccataaaataataactatacccccaaaatataattacttaattgaccttttataaaatgaccaaaatagatatctttaattttttttattcatttttttaataagcaaacccttagacccaccactcaaatacttattttttaaaatctttcaaaaaaaaaaaaagaaaataaaacattttcgttagtcataccgtttgctccaaagaatactgtatggcagatatgcctaattccattgtatggttttcttgattaataaattctactttaaaaaaaatcacaagaataatatactattacggcagtggttcttcgaaggttatggtgaagcgggagtggtggaccagtgatttgttgcgaagtttggtgggatttggtgaaccattaaccaagtgcaaagtgttcttgtacataacaatgacagaagtattctttgaagtttttttttcttttatgaaaaatctaaaaaggagttttagggtttacagaataaataccattttggtaaatggggtggggtgtagttataaaaaataatatttaatggggtaaatttagtaatgaggtgtagtcataatatttaggggtgtaaatataatctctctattttgaataattatatcaattatgaattgtataattaaagtggtatttaactatttagttttatttgataaaaatgtattaattagttaaatacaatattattcttaaataatattaaaaagataaatatattattttagtgaagataatatttattttaatcctaatgaaaaaagagattaatgagaattaatcaatattatttgttaggaaaataaataataaatcttatttgtggcaaaattaaaaaattaattttggactttaaagcatgatccacacgtgtagggtgacatgtaaaagcccatgtatattttgtttgattatttaaaccaaattaaattgataattatcttttaattattatattaaacatattataagataatgtatttaaaataaaaaataatataaaataaaagaatataaatgatttctgttatttaattatatcatatttatttttgaatttgaattaaactaaatattatcttattgaactctctctctctctctctacgacacacacatacatacactgttgaaatatattttactaggatctagatttactaacaagtatgtttttaatatcctaaacatgaacttctaaaacgatataaaataaacatataaaaggtat

SEQ ID NO: 36142 - DNA, 1810 bp, Cannabis sativa
ataaattttaaattttattcaatttcattcatattcatattctcattctcattcttattcttatattttcattcctctcaaccaaacgtcaccttagtgattaactatctagttgtaaaaaaaatagtagataagtagagctcgaattcgaaccgtataagataatgaactgacttaattataaaaaaataggtcagttcaggtaaagtattgcacgagtccgagcacaacacaaaaatataagtataaatcagacctgacacgtatttacaattatgatttaaatttagaattttgttcttctatgctaaatattattatattttttagttattttaagtgcattgactcaattataaaaaattatgctaattttaactttggtgcatattttgaactaaatttagcacaaattatcttgaaaatggtctaatattatccgcattgagtcatgactgggcgccgatgaaaacaccagtaggacatggaataggtgtcctataataagaaacaatttatggtgggaaggtaaaatgacgcctaatccccattttattccagcaaaaaaataagtaaaatagataaatgaaattgaactcagcaaaagagatccctaaactatgtttaacatagaagtttatatataacctccaaagttgaaaataaaaaagaaaaagactaaaaacgaacaaacaaaattctcaacaaaactttgaaatatatgaaagaaagcagagcaaaaatctaaacctaacccctaaaaagtaagggactacccgcaaatgctgttaccatctaagatatatatacatagtggcgttttgcattgcctctcttgattttggctcaatgtttaggtatgtacagaaacctatcttgctcgattttgtcttcctcctctccctatcgttgtccctaactccgagtcatctttattggttccacgatctcaagtatggttttcccattggatcttgtaaactcgagctctgatgtggtggtggcaagccaatccatcccatatcatcggggatcaaggacgaagtggcagcttcacgcccgctcatatagtcgagtgaatgacttgattgcggtgggatattgtttataacaggagttgcccttcccatcatttcgtaggttcttgatgggatgaattggttcgagtggggcattgaatgatgatgatatgggctgcttgaacggatttggttgcactgagataggacgctgaatagactctgatctcctccgctcacactccccatgctctgactgggaacactagaaccacctgacatggtccatccaccacgagctcgatgctcaccaggaaaccagttctgtaaaactccaacatttaaattagtctggataggtggtggcggtatcgggactctattgacagcccaatcatgcatatggaccggtgccaactgctcttgccttgggattaagaatctacctccatcaggaaacatgttggcagataggttccgttgttgttgttcgtaaacatcattctctctcttttgcctctgttccactggcagtgatggatgtgactgctcctgaaaatgtcccgcaaactgatcatcttccacgagcatactgttcggtgactggaaatccaaccccgtcgtttgtttctgttgatgatggtaggataacaccccctgacccttaaaaacagatggaaacaactcattccgatgttggttagagtaagaaccaaaggaaccatcatctgattgtctaaaggatataccctcagcctcaggttgtctattcaccatatcttttcctgtgt

SEQ ID NO: 36143 - DNA, 13964 bp, Cannabis sativa
  modified_base (4342)..(4346): a, c, t, g, unknown or other
  modified_base (12507)..(12513): a, c, t, g, unknown or other
gattgggcggtttgtaattttttcgggttatttcggtttgtaatttttatcgattttttcaatttagcttgggcagtttacgaatttttttgtacaaccctactctttacctcatttctgttagttcaataaacaaattaaaactcaatctaaattcataaaactatttcattattataaattgtttcgatttgtcatacattatttattcatacataaataaaaaatctttgtctaaccttgtgaattaggcaaagacgatagaattttattagagaaagaatcgagaacaaagatcacaatcttcgctatcttttacatttattgtacatcgcgaaataaatttaagattatttttattttaaaagcactccaaaatccaaataacaatcataatgaaaagtacaataaatgaaatagggtcatcacctaagtcattaattatttgttgggttaaaaataaaaatcaaactctttaattataactagaagtgaaccctttaatagaaaggacaagtcaataatattcaacattatagtacaataaagttggcaagttgtttcaaaataaaaattatagaccaaattatttaaaggcccataaatattgtactacacatttatcatattattggtatcatatgatgattgttataaattcttatgtggcatgtcaagttaaaataaaattttgtatgaaaacatataaaattttagtttatccaatttcaaaaataaagaacaataaaaataaattacctcaattggaccatatcatagcaatttgttaaaatggaatgcctaatattgagtaacttttttggaaaaatgccaacttgggggattgattgaaatttaccttcttctttttttcatcttttttttttttttttttttgagaaaaataaaaataaagataaaatctttttgggttttaggagtagtgaagaggaccccactaatcacatgcaaagcgtttcaaaatgaagagtctctcaacaacaattgttcttgatcacgtgccctattcaatgttgtatattaaagttcaatggggccctatctattataatttttcattttaattattttttattttaatgatttttttcttctttaatgtattatgtttcataaccagccataaaattagatcctttttatctatattaaaaaataaataaaagaaaaaaaaaggtattgaagttagataagatgggctcctcatttagtggggtgttatttttaaagtagaatatctagttgtgtggggaataaaaaaaaaccattttagttgtagtgtacaattttgaggcaagtacaatgttactacttgtttaaatttctagggaagagtttttttttctttcttttatttgagttaaaatttataaagagttaattactctagttatgcaataattggcaattttttttagaattgattttagattttagctttgttttgataattattagtaaaataatattttcaaaaaataagactaaatttctaaacttttattttttgatgatttgtctaaaaaaatgtggccatctatctagttagacatggaaataattatcgaaattaagatgaagtgtaaaataatttgttaaacaaaattactttgtaaaaaactctgcaaaatgtgagattttaagactcgtttcttacgttgtatttggtcttataatatagtattgtattatattaaattgagttatatattatatttttatatattattttatatgtttataaaagtcaatatcatatatatatttttatataaaatatgattcaatgtattataatacaatacaataggatataatatgacttaccaaactaagtcatttaaataaacatgatgaaatatttcatgctatccaattaatatccttcattgtaaatagataattaaataaacttggtaagtaaatctatatacaatagccaattagccatttttataaaaaaaaattaaaaataatttggaagacatcttatttaacacactggccctttgtctgaaaaaaagtacttgtaaaaaaatgtgacaataaaattacataattgcacctattattaatggtaatataattaatttctaccgtacaaaataagaaggaagaaaagtagatagtattgtaaatgtgaggtttctttatttccaagaattaataatatctttctctgtattttaagaattcaattttttattattagaacaaatccaaatagggtccttagaatccttccttttatttggtttttgtttgtttccccaaattttgtttttatatttgttcattttgagttgaagtgaagggacttgacttgatataaaaaagacttgatgtaatgaaaaagcttttccaaaaaaaaaaaaaagaaaaatttggataattctctaagtacaatatatgtaagaaataaataaatgttactctaagtcttgtggagttttgtttgtaagatgaatatagcaataaaatataaaagtagaaatatgaatgttgttttgttgaaactaatgataatttactttcatatttcgaaattactaaaattatagttacaatcaatttaaaatagaaagattttttttttttgtgaagaatatttgattatgatgcgataattatttattgccaaaataattaataattatacacaaaaataataattactagtacttaacatttaaagtgaaatttttttagtaattacacatgagaattgtgaagtgtaattgagaatggagaccactcaattatctccaattacacattttaggtaatcaaacaaacacacaagataaaattgtgtaattatctaaaattacaccaaatctaattctcttttagctttccaaacacgcccaaaattttttctttacatcaagagtaattatgatgaacttttaattgcaccgtaaatatgagctgaaaattaaaattaagtacctacttaaaaatacacaagtatttaagtgtaatttttaacacaacgttaaggctatgcttataaattgaatttgagtaaggaaagaaaaaggtaagaaaaataaaatataataaaaattgtatagaaaaacactcatttcaacaaaattcaccgtatcaaacttgaaaaatttatttatttattttttgttctccacactattttttttcctacttttttttttttcttttctcaccaaaatttaacttccaaacatagcctaagtattttggtcaccaaataagctatgtcaacattaaacaacaaaattaacatcagatatacatatgtaaatatattgtatactgaaatagaagaatggagccatataaaactgttgtattgtagctcattatttcggggtttgaaaaaagaagctatgtttcaacctttgtctaagatgccatgaccaatttattatcaaatatcaaaaacctctgtcgcaaaacaagctctataaaataagtgtccatatttacaaaatttcatctaggcgagtcacaatatttgtgattattttatcatcttattatatttattttatttttaatagtatgttgttgtattgaataaggtctggcgtggtaggaagaaatatgtatgaatattattactcttactattttgggttaagtgatgttttgttgtcagacccttggtgaagctgtagaagcaatgaatttgtaactacaaatattgagcttaacgccattaaaccacctgtcaagtgtcaaagcatgtcaacccaacaatcagtcattggtaaagcttctttaaactttgatgcagctataatagagttgttgtgactattacatctttgttttcggtattacaaatttttttattaactttcatttgtttccgaaatttgtaaataaattactatactaaaaacaatattcaaaatagtaaattgtatatgtataaataaaaagttcctgtgtcctagggttagacgtgtacctaaagtccacctaattcaaggacccaaaccttttctcttttaaaaacacatttcttttattaattttgaaaaatactacattctttttttatatataaataagaacccaaaaatatttttctaagtgggccctgaactatatgttttgagtcttgtattcgacactgtaaataattttaaaattttaaaaaactggtagaatgtttgttataactacaatgtatttattataagataattggcagcaaatgttttaatttttatagggtaaatagcgacataagtacccaaaattttaagttcgtaagtaacataaacctaatgtttatttttaacaatataagtacccaatgtttgtaaannnnnaatttttttctaatttcgtcagtacaaattctattattgtcttaaattagacaaatataaaacacagattctagtttattgggtctagaccaaaacatgtagtattagttacttccaaatgttcttttaaggagtttgtactgacgaatctgaagaaaaattacagtttcataaacattgggtacttatgccgccaaaaataaatattgagtttatgccgcttataaacttaaaattttaagtacttatgttgctatttaccaatttttatatacttaatcccttttatatttttttggtggcaaaatttatttaagtttacttttcttcacaaatttgagacgtcagctaaatatcgttgttaaataccaactggatagatacacaaaagtaaaacttcgaagctaatataacaatccagttgttatttaacggtgatttacagttcacacctcaaataaaagaaaagtaaacataaaagaatttgctaaaagaaaaaaaaaaagttaagtgtaaaaaataaaaaacataaagagatttcgcactaataatcctaaaagaattttagttataaattttataggtggtaaaaataaaaacgttcatacctatagggacaaaaatgttactccaagtgtaaaattaccccatagtaataacaatcattattctctagtaacataaaagataaatgaataaaaactactaatgttaatttacctgacagtgacggtgtcatggcgaaatcgaatttgggtagcaatactccggcggcaataggaatggctactaaattgtatgctattgcccatgcaagattttggtatacctttgacattgttgcttgagaaagttccaaagcatttacaacctggcataaagtttccagcgagtaacaagtttataaacggtacgtgcagttgcatccattagtatcgaaaaatgcaactcagttgagaatcctaactgatgataaatgttgcaatgcacatgaactaactaaatggtatccgcaaaagaaagcaattcatgagttggtgtaataacatacttgggatagtttgtttccaaggagtataatggatgcagcgttggaggctgcgttttcttgagcttcgatcctcagagcaataccgacatcagcaagagccaatgatggtgcatcatttatgccgtcaccaaccttcgaaaaacaaaaaattgttaattacagatactttatatgaagattatttcttaaataaattataagagcaacattgttggtcaatttaatgagtttaattgataccatcgcaatgcggtgtcctccagatttaagagtggagataatttctgatttcttttgtggggtcaaggaagaattgatagattcattatctattccaactgccttggctatagttgcaactgcttcttccctgtccccggataagagcaaagttttgatacccttctgccggagccttaatcaacacagcaacacaacgaaaagttgataatcaagttaagacaatataagaaaaagatggattaacagtacccaattcacaagtgaatgaaacttacttgcttaaagtgaatttagcatcatggcgcaaattgtcagatactgcaatagcaccaatgatgccttctccttcacgaccaacataaacaactgttttcgagtaatctgaaaatgttactcctttggatgattgatgtatagaatgctccaaattcataacatgcgatatgtctgttttagtttggaatcggtcacgaacccattctaaactaccgaccgcaaccaaacgtccatctacttcagctaaggttccgaaaccaggctctaccaattggccttttgttaatgggatactcagacccaataattctgcttgattggtgatggccttggcaattggatgtgaagctgtatattctacagcagcagcaatttgaagaatttccgagtcttcgtaggcaaaagaagccacagccgaaacagttggtttaccctctgtaagagttcctgtctgcaagtagaagggtgagttattttcttcaacaattagtctatggaggagagggagcaagaattgcatgtaccttgtccagagcaatatagtctatgccggccaagcgttccaatacatctcctcctctaatcaaaagtccttgtcttgctcctacacatagttattgaacaggaagaggataagagaataattttcaattataaatcttccacatcatcgtagctaaatagaatgtttttcaaccagatacctcatacgttctagtgagttatcttagaatcaataatcattgaccaacaactaactataatttctagggtcgaagttataagcattcaagcaaggaaaagaagtccttcacatagcaaattatttctaggggaagacatgctaatttgaaatagaagatgataattctactgaacattttctgtcatatcaagttagcagcaatctatagttttaacttttcggtgataaagatcctcagctcaacttcattttaatttcttgcaaatttactgtaatttcattcaaacatgactcaaactcataggaaaatgtcgtaaatatttagtaccaagagaggtgccgactaggatagcagttggtgtggcgagacctagcgcacacgggcaggaaaccacctgtattgaaaggaagtaaaaacaagaaaacagaagaaaggaaacttctcactatcacaatatatctttttacacatatttccttaaaaataaagcactctctattaaaatgtgttgtgaggcaaaatgatttagaagtgaaaaagtaccatttctgcaataacaagtcaaaccaaatgtttcctcgaaattcaacatcagcaatgatgtcactcaaggaactaaaattttccataatacaactagatggccaagattgcaaattttacattctaccctagcccattctataaattgaggttgcttcttcaaaaacattagaaatatacctctagaaacccttggagggctatttatgaatacgacaccaacccctaaagagggaacctaactcctgagatctacatttctacaaggttaatacatgctctttggtcttccttgccatcatttaccaaggtccaaaaaatagtcattgttgacgtattagatctaaccctacctcaaatatgtgccactaaaagtcaatataattctcggaatcagactacccttcaacaaaacctacagagtggcttgataaaatgcaactcagatcacacagtgagaaggagaaaagtaacttctacttaccaaaacatccactgcaagtttcatgctcaaaagcaatggatcaccatctggtccagcaatatcgttgagcaaaacatctgggaatgcttgacttccaatatagtacctaagacacagatacaaagctcaacaagaggattggaagaacaaaaggggaaccatagatcatcttcttgtttttttcccttggatatacaaattacattgtaaagttacttcttttccttagcaactaaagcttcagatctcaaagaagaaaatttataccccatgatccatgtctcccattcagaatcaaagagcatattgacattaaaaattataattatttataataattcataagttttgaatggaaactacttttctttctaagatatgaacacgaaactgctagatagaacatggaaaataaaatgaagacctaccaaaatgcaaatgttgcggctgacaaagtcattacactgtatacaaatggcccagctattttatcagccaaccgttgtattggtgcttcatggccttgagcatcttcaacctgaaaattaaaatgctgagcaatgacacacggtacaagcaacagcattgccaaactattcgactcttgcataattaatcattttcataggtgatttgccaatgacacacatgtgcatgctcatggcatccaccaagtccacaagcaaaaaaatcaaacttatttcaaacggcaaggaatagtttgtaaatctatataggatgtatgcggatcaacattcaaaaccaaaagaaccttcccccctcacccccctcccccaaaaaaaaaaaatcacactcatggtgcacttgtgcccacacacatggacatgctcatgccatctaccaggtgcacaagtaatggaaaatcaaacttatttcaaatgataaataatggtttttaaatccatataggatgtatacaaaaccaaaaggaaaacaaaaattgacacccatagtgcaaaggtaaccacacacacgtgggcatgctcatgccatccaccaagtgcacaaacaccatatatgaaactttgaatttttaatgagattttgcacaatgcttagacacacaaaacaaatggtgatataaattttcatgagaaaaatagattaatatttttttttttaatattaatgatgatgaataaccattggttcggttaggacttacattatttatgtaaatatgaacattgattaaaaaaaaaatgtgagatgcttttagtagacaaagggataaaattagcccttaatctgtggaagtcatcgctacggttgtctggccgctgcctgatctcaaatcctctttgtaaatatttacaaaaaggtagaaacaagacatttaatatcagcactgttgattgggtgagaaaacaagaaatttatttcctcgccattcaaaatcaacaagtgcaaaaatataaagatacaaaattaaaaaccaaagagttaagccggtaagggctcatatcaagtgtatagatataggaccatcacagtggtgaaaacccgtcttgaaaaaagaagagtgaagaaaagaggtagaagaattttcccagacgccaaacaagcctgccttttaggtttgaacaaagtaaaactagaaatggggtggcagccatgggtaccttcttcttgttcctccatgcacctcttaaatcgaaagatgggtaatcatgaatcccactcgagcctctctctttttaatcactgccccttaaataaagaaatatgcatcggcgcgaaggcataatgggataaaacggaatatgctaacctcagtttgtgcttgcaagcatcaccaaggcacaataatgggacaaaatctggcatgctaagtgctaacctcagcatgttgtactcgcttagtatgtttaagagtggtatggtaatttagaaaggaaaaaaattgtgaattctttagcaagaaatctctgaattctttagacagaatactcattattagcttgcatagactcagaaaagtcaccaaagatgatcaggaaaatgtagcttcatttttatcatatatgcaattatgcatatacattagacttttatatcattaatgaaagtagatcacttaccatgcgaacaatcttggatatcgttgagttggttccagttgaggttgcttcaattcttaaaggaccatcctggaattcataaacaatttccaaactttaaaaatggcaaaaatttattaatcaatttatggggtaagattaagatacaaaaaaaaaactcttccttgatggaatttgaatgtagactagcctctccaaaaaactagcaaagaaaataacacaccacagtacaattttgagcaatcctactattttagatggctcacaacaaaaccaaaatttgaatgaccatcactgttttcaaattgaagaacttatggactatatcaatttttttttgattaaattaggaagaaagaaaatcagacataaaacaacttgtcaaaattatatttcactctccaggatcaaggcaacataatcatacccagtttatggttccagcagatacagaaagaccttcttccttaaatacaggaagtgattctcctgtaagcatggattcatccacaacacttcttccagcaagcacagttccctgtgcaagaagtaaacagagacagaaagctaatgtcaataatttttcagttccatcagcataccaatagtatggaaaatatatcatcttctaaaccaccaagtatggaccttttacagtgagcctaaagctaaatgtgagcattcaaaccaactttaacaacactttcacaagtattgcttgcttccaagttccaacaacgtatgactcacattattgatagcttaaagtaacaaatgaaaatgttaaaaacaaaaagtagaaagtgcacgacttaaatttcttacatctacaggaatggtttccccaggcaaaaccaataccgagtctccaactcgaacatcatcagttgggacttcaacacaaattgaatcagagcaaagtacatttttggtggaggattcacttcctgaagaagtaattacaagccttgactgggtggatattagtgactgcaaaaatagcagagaacaagcaaacaaatcgttgagtaatctgttactgcaaactatgtttgaatcactgatatggaaaagattgacttactagaagctcgttcatatcacttgatgctttgatcctagctctttcttcaagagaacgtcctaggagaacaaaaccaagaagcatgacctgcatgctaaaaaaaggagcttcatgtaagaaatgcatcattaacccaaaagaccaaagtatcatctactaagttattatcctacaagagtgcagttaccatgattttttttatttgtttgtttagtctttcagaaaacaaatacttattgcattaggaggactaatactttcctttcatcatatcagacaagccaataatagatagggtggataaaaataaagctactcaggcatttttttttcttaagagaaaatggagaaagagaaatcaaaaaaatcaccggctcatcaaagaatgttgcattccactggagctcgggataaagaagggaaacctacaacagcaaagaatttacaaattaacactaaagccaaaatcaaaatagcacacccaaagaaatgaaaacaaaaactaatcatcatattccctaccgcactaatgaaaaatgcggccaacgatccaaatcccacaagagaattcatatttggagatcccttccataatgcccttagaccatcaaaaagcaggtctgaaatgaaatttaaactacttaaatcacaatgcatattaagcttggttttaagatcatctaatcattgtgctggaaagcatttatcaaatagctaaaaataaccatttaaaaatctattcaaataaaatatataaggatacaaatacatttaaacaaagataaagcataacgtatccaaacggattcacaaaccactcaatgatcatattcatatattccattaaaagcatgttactaatcaaatcggcattgaaatctgagtaagaccaacataagaaaaggcatccaactaacctcgtccaggtcccaacaaagcacccaaagccaaaccacccttcagatatgaattgtgaagtagctcaaaaaatgatcctgaaccaccaaagaaaacgtaaaagagattagtaattgaacatatggaaagtagtaaacttctgaatcatttacttgcccccaaattcttctgatgaaatactaaacaaacaaatgggtattcaaatttagtaagcaactataactttaacttgcaaagtatagctatttaccagtcttaacttcaatttgcaaaataacattcactcatggtccttcaacccagaataaatttacattggactgtttagtgtgatgtaatattttcatgggaatggttatctttcacattcccatgtttagtacggggaattttatttgaagtctgagaaaattatcaccgtgataataagattactccataagggaataatcgtaaatcctttcaaaaagatggatttccaagcattagcttcaatcttaatacaaatagattcaatatattaataattttatacatttcccaacaattcaacaattcatcaattcatgtaattcaattaagtaatctaaaaacacagttataagtttccaaacaactatattccaattcatatcatattattttcaactcctcgtaccaaaaccctgagtaatattgggtagctaaatttgagcaaattatcagctaattaaggcaccaaactagtcatattttgaaaaaaaaaatatatannnnnnnacatatatatatacatatatatagcgaaaaggagttaaaaaaccgtgaacaacattaccatgggcgacatgaattccaagagaatgtaatatatgcgaaccatgcgatccacagcacaaagccaccaaagtccaagcaaaagccacacgattccgactccgaacaagcatttcatccttcttcttcaacatctccttccacttcctcacattctccgccactccccttcccgattctctcctcttcgacgagaatccacactccgtcaacctcctcgccaagctctccgccacactcccagtatcatccaccgcaacctccgatttcaacttgatcgccgccgtctcagtcaacatattgaccgcaacagaatcaactcgttcgtcagacgaaagcaacgatctaactcgagaaacacaaccaccgcacatcattcccgatacatctaacagaaccgaagtatcaccagacggttcttgtacggacacggcagtagtagtctgagcttggagcgagctagaggtaacaaatgcaggcttggaagtcgccggaggaaaacaacgccgtcgattgatgctaaactctttgcgtcgccgttgaataccgaagctgaagaatcgatcgacattggcgagtttgttactattactgtgaggaaagctcaaggaaaggtttggcggaggcaaagaatgaagtgtcagcaaattcgaagccatggaaagagagattcggacatggaagtttcaggtagagagagagagttagggatattttagagagagaaaggataaaacggtcaaggaatttttggggagatgaagctaatcggagaagaagaggttaattaattaattaaaaattaaaaagaataaaatatagacacgaaaaacatgtggcaggtagagttagcagttgactgttatttaactatcctcaccgacagttcacgttagagtcaaaatgatagcacaggagtgttcatcaaaccgctggcattgtaccctaccgcataaaaaatacaatttgaaatcttttgtggggtagttatggtttgcattttcgccaaactgtgcattactttgcggtttgcaattttaaatttaataattacagttcaaacaacactatatattataaaattactaattcttacaatatgatttttatttttcagataaagataaagttttttattattgttaaaactttattggatttgtgacaatcaacgcccagtgattcgaaggagaaagatcgagagctgtactcgcgtggagaaggtcatgtgtgatgattatagttgaagagggactaaatggattgattggtactatttatatcaataaaaattacatatgcggtttggtttgaaaaaaattattacaatacgcactatccacaccgcgaatacccctacaacactcttatcaaactccaaaacttcttatttt

SEQ ID NO: 36144 - DNA, 1182 bp, Cannabis sativa
  modified_base (691)..(695): a, c, t, g, unknown or other
  modified_base (889)..(924): a, c, t, g, unknown or other
atacagtttttggcattgtaccaataatgaataaactactagtgttactaccttactaacacagatatagttgccaaaaaactaaagaatccagttagggctgagtatcggtcggtttggtcggtttttttctatataaaatccaaaatttggttttcggtctggattggtgcaatttgaaaaccgaccgaccaatccagaacctatcttaaaaccgaccgttttgaaccttagtttggtcgatttgaaccgcccaaactgaacttttttctaaaaaaataatccaatttattttataaatacattattctacatttcacaactacaaatatataaattaattattcaaaaactaattatcttattcttttaactttaatattaataaaaaaaaaacaatatattatttttatatattattagtaactataatacacgcccaaaaaaaaacttaataaagtaatatatatgtataatggtcagtttcaatttttttggtcggtttattatataaaaaaaatcgaccgttcaatggcagttttaaccgttagcggttttttcagtttttgattttgtcggtttcggttccaacggtgttcggtaggtcggtctgaacggttttttcagtttttttttattttatgctcacccctgaatccaatatcccaagaggagtaaacatatagaaagnnnnntcacaatatcaaggattttgtggtaaaggagatataatggtggagaatatttgtattgaatacaaccagtcagatcctaagagataatactacgtactacacttgatatgaatatcaagttattaagattaattaaaatgcacttttagttttatattagtgtaaatttagagtttgttgggttttgtgctctnnnnnnnnnnnnnnnnnnnnnnnnnnnnnnnnnnnnttaataaaagattagaaatcattttctgttgcatgattcacatgatttatttcatgattatacgtttaatgtataaattctattaaatctagaacatgtagttgttcatgattatagtgttgtcaacacaatataatataaacatgattacatgtttcaaaagtttaagtcacataatttgtcattacactggatttagactgacatgataatcaacgataaagtatacttacaccttgaataagtgttatgtccttt

SEQ ID NO: 36145 - DNA, 5948 bp, Cannabis sativa
atctatagtttcattttcaatttttagagcatcttcaatatagtgttatgtattttttagcccatttcataaaaagaacttcgtataatgtggtttaaatttaatacatgctaaaaaatatgttaaatttgacaaaaatatagtatgagccaaaatttacaccacaataaatatcatttttttatttaattttttaccagttagtaatgtaattaagaactttttatgggttcgtttggtacgctgtattacattgtattgcattgtattgtataatattatattaaattatattttatgcaatatttttatataaaactataaatagtattgacttttataggcacctaaatatataatattttagtataaattaaagtttaatatagtattatataaaaatatgatatataatcaaattcaatataatatagtacgacctaatacaacataccaaacaagccctatatttttatttatatattttatatagtttttatttactttcaataaaaattaaatatttttcttgactttttttctctcatttctattaaaataaagtttattttatccctagtgcattagaccacaactgtacaatttgagcaaaatacaacattgatttattttttgaacccaatttagcacaaatttacactatccattgaaaatggtcttattcaacgactttcttatagcaaaatcgaattgattatttttactttgtggcacgtaatgtaccgtcataataagcaagttcataaaaattatgttatccgctggaattcattggtccttgggcagcagacttcctacagccttactaggttgagaaccgtcgggatcctgctcataatctcaagcatccaactcaacatagggacgatgctacacctcattagagtcctcatgttgttggcttgcttaaagtcaacacggatgcttctgtcgtcgccattggatgctcttgtggcctttgtatgattgttcgggactccaatgatgaggtctttgcttctactacttggaaggtggacggtgttctccaatctgaatgcgcagaagctcttgctattagtaatgctatctctcaatgtattacttttggccttcacaacattcaattcgaattcgattgcaatagcttgattcacaagcttaataattcaatggttttaaatttgtctttaagtttgattctagataatattagagctttatatatacattttaatattgggaattttattttttgttctagaactgttaatgtagtaactaatactcttgctaaagctagtatagtttgatggtctaaacattcaaattgtatcagaaactttattttagcaaatgccatttattaatgaattcttctagctctcaacccccgagtaatcttctcattggtggtgtttattggctattttatcaataataataataacatttttctaattatggtcccaaacacccttatcgttctctatttctctggttttctttctttttaataacaaaaatgcaatgagaaagatttcatagaagcatcagaatacaaccgttaatcaaactaatgaaatagaacattttatgttatagtacatcagccactatgatccacaactatggtatataaaccaccgagtaaatctcgaatagcccttctcctacatttctaataaaaacctctcaacataaaagaatcgattaaataaaaaacttgtcaactatttcctgaacctctacctctttttcttcttttttttttttccctatttccttcttatgatctcattgtaatattttctcctatataaaacattgttaacttgatcaataatcagtgccaagcagaagccgagatcaagtttctatctttccaccccaaaagcatagccccatctttctctgccaatgtataatgctcagaataacacctcagaaggcttcttatgacagagttgacataagagctcaaagggtattgcttaaaacccgccatggtcaaccttgacttccattttcccaacagctcatgtcgttcaactctttccctgccttcacaagccaccacgttcactatgtccctcgccagacaatgctgctcaacactgatcctatactttgagtctcttggaagtgtcacgtctatggactcaaacatcgccaagtaaaagtccatagcctccacgaatctgtggaaaaaaggtgttgtgttggtgttggactcttgctccaccaaagtcacaacttttgggtagagagacttcaccattctcagaagcccgtctctaggattggtaacgtcaacactttcgtccggagtgtggtggagttggagtgggaagttaacagccaaggcctcgccaggccggatatcgagcatttctcgggttacatcaggtgcaaaaacaggcactgcgttgaactcaactgggattttgaagtcttgtgagatagccactagtctttttcccacagcctctagtccatcgcctctggcataatggtttacaggatcatctatgcctgtaattctcacgtgtggagggccatctggtctagccgccagagcttggagcagcgtcaaccattgtgtgccttgagctatctgaaagtcaacaatatgaattctatcttcgtttctacaagcttcagctatggctccattagctgccatgtaaccaaatttcaagtaaggacagatttcatagagaatttgcatataggaaagtaactctttgctttctggctctctgcatctgagtgctctgtatatgttggtccctgatgcctctttcctagccaccattccttcaaccatgtatgctccaaggcgctggattggctccccactaatggagacgatagcacgggcttttccgatttgtttgtcaaatgtttcgatatcattttcagccagagatttggcgcaggcaatcaggaggttcttcagattatccagggatggcaagccctgctgatgcaaagagtcttcctccattaatttgtgacgcttttcagttcgggcaacttcaacaggctgccttggccgagaggcaagaaatgtctggcgctgagttaggcctggctgttgtcctctcggcctctcagctttccatgactgttcagagggaccttccacatgcgaaggtttccgtctagttagccggtgttcatcaacatcatcgtcagggcccattaaagcagtctctagctcaagcaaagcgtgtttgaagttctggctagaatttgcattctgcaatagggacttcccacaaggatagaggcagtaactgttggtgtcaagtggagaattgcaaggaggagtactaactcccgatagattgttctccgtggagctgtactgctcttggctatcgctcaacgtggtgagggagttatctgaatcgaaattagtagaaaagggcgaagaaggcgagtttccaatgtcgaatttcagcgatccgagtagtctgttgggcaatgatggcacagttgtgggatgagaagttgtgtagggaagagccgcaccagttacactgataccaaatagctggtgggagtccatactatgatattggcatcagcagtatcacttgggacttaactttcaatatagtccttggcaagaatctgaaatgttagggaaaaggctcgttagaatatgcatgctttaaggctggctaatttaccaagcatcaaacccatatctcatcaatcaataacgataggaaggaaaattggaattaccattaaagtagtcaaggaaacaatcagcaaaactatggttgtgacctttaagattaaaatagtccagaaagaaaaaatagttttctttttttttttttttacttgaaaggactatacatagataaaatgaaatttttttaataattttatgaagaaacctcggtgcctcggtcaaatataatatgacaaatttgatactacacaggccatgctttcaaatcaagaaaagaagggctttgaaaaccaggaaggttgaaaaatattaaggaattacataagcctgcaagataatcctatctgttctactaacatacacaaatacatgtataaatatattatatatttatgtggaataaattagtataatttagtcaaattatcaacaacccaatatatttttcttgaacctcaaataaacaaaatattaaactatccaaataatttttctccattttcttcagccccaaataaccaaccaaacaatcaaccccccacccctaaaaaaaggaaaaacaaattaaaaactttagccatagaaacactacaaaactataacgaaacgggcaataaaaaacaaatagagatgaaatctttaattagaaagtttcaacaacatcatacccgaaacttctcttttattttgatcttatgggcactagaaaactttctgggcttctcgaggtctctctgttgaagtttttcgagcctatttccctttgactatcgccaatctctagttcaagcctaagactttattcttctatcaaatcctgttgtaccaaattttccagagtttgcttttgaatttctgaccaacctcctttatatacggtaagagggggagagagagaaagagaaaagaaagagagttttgacggtcggtttacgaatgtaacggtaacgacacccgtaacgttagttagaatgttgatgagtttatatgtacgtcgtactcgtagtgcagaattaacggaagttgacgggcgaaaacgttaacgaattccgaccatcttctcaatgccacacgttgtaacgttagtagaacattcttcgttttttccccctttgaacgaagttgttcagtgtccactttccttcacgcgctgctttacttacgtagatgtgacacaccaaactaaccaccaatgcattctcatcctctcacaaatattctcacgtgtctaactttatgccttatttccctttaatattagtgctactgttttcgataatacaaactttaaagtttttcaaaaatttaaagtgataatactcttccaacatatgattttaaatatatatacaaatataataaaaggttgtagttaatactcttcttaacgttaaaataaaataaaaactctaaaccttaatttagaaggatggcaactaaaagaaatggtttacattctctctttaagcactggtggcagtcttggttgaaagagattcttacatctaaactatagtagcagacattgacattacaggttgtacttaagggtgtgtttcgggtgtatttaatagtgattgtgtaattattagaatagtaattatagtaatctttatatacaatgtgcctttggaaatgatatgcatttataattttttatttggtaaaataattagcatttacacaagaaaataatatttttttagtagttactattcataataaaaaacttttagtaattatacaatgtaattacactcagttttaatggggattagagggtacctaaaatccttcaattatctttaattacacaattgcaatataattataaacaattatagtaaatgacctcaaattataagattatattactaaatgtcccaatttcaaaacttgtagcaaaatggtcattttttttagattatttattatttatattgtcttttgccacataagaaaaattaataatttttttcataattttttaaaaaaattagaagcaaattacttaaagattatagtacatctatattatttttgttaatttttttttatttgaaagttatgtcgattttttttaatttttttatgagttgttgtgggttgttggtaaatagattttgttgtacagtatatttctattttgttgttggtatcttattattcttagatgatatttattttttattttactatgtataatagtggtatataattttgttaacataataca

SEQ ID NO: 36146 - DNA, 1642 bp, Cannabis sativa
ttgtttgtgattttagtgttaaagataaaatttgttagatttagggatagatttaggttttagaatctcagatctgtgattttgagcaaggtccgttggggtccgatgtaggtctgatgcggtccaatagggtcgaatgaaactgtgagtttgcgaggtaggagacataggtctgatgggggggttcgatgagtccgatgcggggtctgaagggtccgatgggtccgattgtgttcgatgtggggtccgatgaggggggttcgattgtgtaagtggggtgatgtaaatagggggtattatagggatatcataaaagttgtcatatcttacaaatattacttattatgagtttaggaaaaaaaaaatttaagtatatgtaagcgtaaaaatcaaattttccttatatatacaaaatttataaatttttaaatatttatatgcactgattttttaatattaaaataaaaaaaaattatggtccaagtctagcaatactggacgtgaagcctaatttagttaaaaaaccctaatatcacgtccatgaatagtggactaaaaacgtttttctagtccaacaatactcggctagaaaaacacccttattatgtcccaagatataatgtccaacacaaaatagactagatggacttatcaagtccagctttaatggacttaaaaggggttttttgtagtagtgtttaactcccccttctgcacatctattaacgctctccccgttgctaggaatggtctctccaaaatgataggaatattctcatcttcctccatgtcaagtattaagaaatcagcagagaatatgaacttaccaacatttaccaaaacatctttgattataccccgagaatgagtcaaagaacgatctgccatttgtaaagtcactattatgggcttggcttctcctaatttaatcttttaaacatagataggggcattaagttgatacttgctcctagatcacataaagttttcgtttgtatcgatgcccctatgaagcatgggatattgaaactattgggatcttttagcttgggtggtagtttcttttgcagaactgcactgcactcctcagtaagtgctatcatctcaaattcttcaaacttccttttcttggataggatgtctttcatgaactttaggtaagttgacatctgttccaaagcctctatgaagggaatgttgatgtgcagtttcttgaatattcaaggaatttcgaaaactgcttatccatcttattcttgtgaagtctttgaggataaggaattttgatgtgatggtcaatgttgatggaaggtggtgtttctttttgttgaagacctttagtgtagtcttcttcttctcgtcgacattcaaacgtcgagacccatgaaacctgtcaccgtaaaccaggaaccagaacaaccagcatttgaacgacgaaaacaacaaaccccaccaccatagaccacacacgaagttcgaacaactagatccacaaagaccttcaaacacaatacacctgaaaaaatcagagacagggggagagattttaacccaaaaaaaatatatattaagggagacgaaaggagaccatgggcatttggaggcggagaagtcgtcgatggagtagagggagacgagaggt

SEQ ID NO: 36147 - DNA, 1411 bp, Cannabis sativa
agatcctggtaaaatatttcaaaccttttctgtatctattcgtgttataaattatgtttaagttggttatattaaaaaaataaaactatcaaaaattgagctgagggtcttatgtttactattttgaaaagtatatggtctattttattatttaacaaaatagagggtccaattggtaacttttgcaaaatacaggatcaaaaatagtatttactatttttttctaaaaaaaaattacaattgaatgttaaactcactaaatatatatctattatcatttatttatattaaatgttgatacataacataaaatatattttttaagggtaaatactattttggaccctttgttttgtaaaagttaccaactagaccatttgttttgttaaataacaaaatagactctatattttctaaaatggtaaaaataggaccatgagcttaatttttaacaattttattttttaatataactaattttaagacaatttctaacacgaacagatgcataaaatgtaaccaattttgttataacatctctagatcatgttattattaagttttattttggtaaaaaattatttcagggtcctatttgtataattttggaaaatacaaggtccattttatcatttaacaaaatagaggatctaattggtaacttttataaaacacaaggtctaaaatggtatttactctacttttaattgtaatttaaatataaacctattgcacatatctaaaaaatatctttccattataatttttctaatgcattctgttagacttttatttgagcttacattaatttttattagttttattaaaaattaggtcgattggatagttgtttgttatgctagcccatattgttagtgatcaatagttaatggacttagcatctgtgtgtgtaaaggctagttaaagtagcagtgtgtgcttttctagttaactgaatcttttgatgagcagacccagtccaactaggattatgtagctaagtttcctccttaactttataaatacatattgtctcatcacaattgtatacttttgataatcagataaataaaattgcttttaatttagagacctaaggaagaatacttaattgatagtcttgcactattaaattgcggtaattgcgatagatcaattaggtacacaaaccatatcattataaaattattagatatatattatcactactacaaattacactattcacgtcggtcaacgctactgttcatagcttgaccgacgtgaatagtaccaaaataattagacctatctcttaaaaaatgacactaataatatactatttgtgtcatttattaaaggctaattagtaattttctcccgaactttgatatatactaaatcatgtcccctaaatttttttggccgttaa

SEQ ID NO: 36148 - DNA, 1209 bp, Cannabis sativa
atatatgtaattactaactttcatttttttttttaaaaaaaaaacaagtaactttccttatattgatatcacaaaattattaaaaaaaattgttgcgcttaattttgcctaaaatacgtgaacctgtaaaaagacgacacgtggagctgagaggatcgactcttaaagaaatcaaccaagtcttaggcaacagaggagtgtctctgggaagatgactcccgaggaagatatgagaaggacctttatgctcccggaggccagggccatactaaggcagctccgggaggtaccgaactctattgagcaatcacctcgcatttaatgccgcatggactaaggctcgttaatgccccaaccacgtaaaaattccatgcattaaacttcctacaattttcttatatatattatttaattggttgctgaaaacctcggtcaacaaaaataatataaaaaaattaattaagtattagtattaaatatgagagtggcacataatgaaataaaaatgtctggatgtacagacgttttttgtgattctacctaagcattatcaaataattatttaattaataaagtgtatacatataagttttaaaggtaaccaaaatacatctcaaattatataatataaaaagtaatattttgttatgataaagttacttattagtttcttatcaatatcataattaaataataaaaatgttacttttgaaatacaaaaaaattaaaaaataggaattttgagattagtttgactctaagcatatcagtttagaattaaggtattttttaatgagatgacaagatattattataattgagatttgttaagttatagttataataattttatattttacgtatattttttaaaaaatcccaagaaattaagaatcttgtttaaaaaggaataagttgaaaaatatcttttttttttttttttatatatctataataaaaaaaaaaatactctcgtattatattttattaaaatatatctacttttatgagtgggttgttcaatatacacacattctttatttaagtctaacatataatttatattaatttaatgtatctaatattgacatcatctataaaaataagtatatcttaaaagatataaacatagaaataaaaattaaaacaagtagaataaactgaatataccatctaatttcctcgtttaaaaaggaaaacttacaaaaa

SEQ ID NO: 36149 - DNA, 2011 bp, Cannabis sativa
  modified_base (774)..(783): a, c, t, g, unknown or other
acccgtaccagaactccaactagactcgacatgtggttggtgtttggatttgggaccaagactcggacctgatcttggatcccgatccaagttctgaggccccagttctagtcccagttttggggcccaattccaggttcttggtcccccatctatattcaagtcttaggtcccggtctgggtccaagttcgtgttccggtttaatttcgggtcttaagtcccggtctgagtccaggtctcaatttgggttcgggttcgagttcgagtcccagtcctcgtgtgggtccaagtttcagatcctaagtctaagtcttgttcttaggtccaaggtccgacccttagtttttgggtctggtctgggtctaggtcccggtcttggtttaggtcccatgtcacaggtcctagttagggtccaagtcgaggtataggttctggtttgagtttcggtttacgtttgggtcctgttactgtctcaggtttgtgtttaagtcccaaacgtggtccgattctaattctagattcaggatcgagtttcgatcctggtttgggtctggatacgaatctaggtccatgttattctagttctggcctcgggtctagggcggcatcctatgtttgggttttggtccacgttcggggttgtgtcccagtagtcaggtcttgtgtttcgagtccaaggccttgtctcgtgtctcgagtctagggtcgagttttgggtctcgatccaagtttcagggcctagttttgggtccaagtcccccatctaggtttgnnnnnnnnnnccaagtttgggtccaagttcgggtttggggcccaagtcccccatctaggtctggatcctagttccgggtctaggtccaagtttaggttcaggtttggatcccgagtttcggtctaagtctaggttccagtacaggttcaagtttgagtctgggttcgagtcccggtcttagtccaggtccctattcgagtttaggtcaagatcccgatccgggtctaaatcaaggtctaggtccaagacaaggttctgttttgggtttgggtctgggttcagatcctgagtttgggtctaggtgtgggtctggatctgagtccgggtttgggtcctaggttcgaatctttgtatgggtatgggtctgggcccgtgtctaggttagggtttagggtttagggttttgggtttagtgtttaggaatttagggtttagggttttgggcatagggtttagggggaagtgtaaagacttttggatttagggtttaaggtttaaggtttagggtttagggtccgcttatagttcaaattttagtttcgggtcacagggtgcgatttaaggtttgggtttgggtctcagtctgagtcctggtttgggtctaggtccgtgtttgggttcaggtccgagtattattcccaaatccaaacaccaaccacatgtcgagtctagttcaagttcaggtataggttctggttctagtccgtgtttggatctgggtctaggtccaattccataatttcgacaccgactatgggtcgggtccaagcctcaggtcttgggtcctcggtcccaggtccaaatccagatcttgggccaattctagctcatgtcttgggtcctactacgggtcttaggtctaggtttgggtctaggtttgggtcttgggtcctaagtcatgggtccgggtccccgattcaagttagggtcctacgtcccggtctgggttagggtcccaatctaagtgcaagtcccagtctgtgtttggtactagtccttgtctcgagtcttggcccagtctaggtctgggccacggttcaattttcaagtcctgagtctaagtattgggtctcgggtcgcaggtctcggtccagggtctcggttcgtgtcccaatctgggttctagtcctagtctaggttttggtcctggtccttatttgggtatgggtcccagtcctgatctcggtcctggtccgagtcttagttctggtataagtccgggtctgggtccgagtctg

SEQ ID NO: 36150 - DNA, 1757 bp, Cannabis sativa
  modified_base (1602)..(1603): a, c, t, g, unknown or other
gatcccgagctaacggcggcgagagaagcggcgccgcttggggggtgaggtcgccggcacttgggcttctgatttgtccggtgcgtggggttggtcggaggtcggaggtgggtcgccggagtgtggtggttatggtggtttgtgggttatctttttcgtattttgaagagagagaagaagagaaagatagatagatagacagagagagagacgattaatgggggtgtctgctactgtttcttttgttttgattttttttttaaatacatatatatattatttaattatttattatatatacacactcggtttgactcggtcaaaccgagtcttcacatgtacaattctcatctaactctaaaatcattgttgctcgatctttatcttatctttaccttaattccacaatcaagtgtaatagccaatctgaataaaaactgttgctcaacaattaatggcccttccatcttccttgaaatttatactaccactactataaccaaaaccttgttgaattggtttgaaaactttgaaagatggttggagtttccttgggtttcaagaaccaagagagagtaagagattgttgaggtgagtggttgtttgcttcttcttctttttattgtaattatcttaaattcttgtttttattctaattaaaattcaaatttaaaagacttagcttaatcttctaaaatttctactaagtagataattcaaatttaaggttagaagaccaaaaatactcattttttccttcttaagtaactttaacaatttggaataaaatgttcaaaactcatcaccccacgcaaactagacattctaaatgtccataaaattttgctccaataattctaagataccaaactataaagtgacactaatggccaaatcttcgagtacactattaccgagcacaaaatatgaaaatattaaaaattcatatacgacatgcatggtacacttagaactcaataaaatcgtcttaattaaaaaattatctcactaatacctatttctaacaatatgtcttattttctaccaatgcacttataataataactaataaataaattgttaattgtctcgtatttctcatgactaaattgttggaatatattttatcatgctacaagaaatatcactttttccagcacatttttgtgttggcaaaagtttggtattgcgttggtaaaatggaatttacttctgatgtgttgtcaaaaggagttggcaaatcaacgttggtattacaacttttaccagcagaaaattaaaattgctggcaaaaataacttttctcagcacgtaaatgcgctggtaaaagttagattttagccactgtaaatgtgcgctggtaaaactttgacctttttgccagtgcagtttgcgaaatgcactggtaaaaaacttttactagcgcggtagcgaattatgctggtaaaagtgatatttcttgtagtgtcatgatctaaatttactaacaagtattttgattaacaccccaaatatgtattccctaatataatagaatataacacatataaagttaagaaaccatacattgatgaaagtggaataatatgtctcctcccactnngatctctaacccttgttcctttttctcacagagtattatcaagatgtgagcctaattctccttcaaagtgttggattcttcgcagtcttacacactatgattgagtacttgacttgctatgggtgggcatgtactctttcactataggttcgaa

SEQ ID NO: 36151 - DNA, 1584 bp, Cannabis sativa
attttttttttaaatatacataattttgtaaattttattttttttattgttgcgcaccgcttagatgagattttcttatagtttgttcttttgtattttctcaaactaaataatattcttagtaatttgtaattttttttttgtcatgtttggagttattgttttgttttatttgtaccaattattaatatttttgtcatttttttaaacatcatctttttttcattttcctcaaaaaatgtctgtcatattttttactctattttctcttttaaaatattttttaagtcttttctattattttttaccatcttttttctcttatttttttctttcaattttttttatttcttcttttttaatattttttcatatttatatattagcatatatatataatagtgtagaagactataagaggagcatacatatgatattaattttttttgtgttattatttttatatatataaatttttattaattattattttatttttcttatataactttacttattaatagatgataagagaacaaattatttgagcttatatttaaagaagaccattgatgatttcaacttcaataaataaatttatattaaactatgtgcttgtttaaatatatttttttaatatttatttaaatattattgatgaaagtaaaatatatgattataattcataactaattttaacggaggttatgtgtgcaaccctcgggcactggcacgtagtatacgcctagtttataaatttatgtaaatatataaaatctcactacttgttattattcagaaggattttgttaagcaaaatagtttgagggacaagattgtacaaaaataaatgggaaaagatattatttgtctattgttaaaaaaaaaaaaaaagaaaaaatagatattatttgtctaattacttgtgagaaatgttatcatttttttttttttttggtaacattgaggagaggaagatacaagaaatatattatagggacccaagtgggacctaagtgcaaacaaataataaataaatgattatttgtcatgatgagtgtccgtagtgggcaactagctagctagggcatgaaaaaagtttgtcatgtggtgaccacaacacacacgcaagttgttgggaattcaattcacacctcccacacatatatgtgctggctgtatgagacaataatttattgtcatatcccttactcctctcgtactctattgtggccaaactccaatctaatttaaatatttaaagcttcgattggtacgccgtataaggattgtattgtattaactaataaataacgttatgtttggattaaacaatatactatattaattattacaaccaaattttttaatacaatgtatgttgtattatttaatacataataaattatctgtattagcttgtattataatatttacaaagaatttgtggtcaacaccaatctccgatctggaccccggatcggaccccaaaccccggaccccggatcaaaccccaaaccccagacccgaacccgaaccctagcccagaccccggactcagacccggactcgggatcccgaccc

SEQ ID NO: 36152 - DNA, 1269 bp, Cannabis sativa
  modified_base (162)..(173): a, c, t, g, unknown or other
  modified_base (387)..(407): a, c, t, g, unknown or other
taatgatacattatttaataaaatatagaatgttcgatcgataatttttgtaaaacataaagtccaaaatactattaataaactttaggctaattagagtttttgtcccctgaactttgacatataccaaatgatgtctcctgaacttttaaggtcgttaannnnnnnnnnnnaactattgagattgttagattaaatgacttttgtctaatttcattcaattttactatttcattgattgtttatgtactaaaccatgctccccagactttgataactaccaaattatgtcctcgaactttgacatgtactaaatcatgtctcttgaactttcatcaatgttagattttttttactaaaattaaacaaaagtccttaaatccaacnnnnnnnnnnnnnnnnnnnnnatttttaacaaacttaaaagttcagggagcatgatttgatacatgtcaaagtttagaggcaaaaatcataatcctaaaaatctattattataactttacattcatgcatatattatcaatatataaactaattaaattaaattttcataattaaaacaattaattaatattattattattacacaaaataatacataattgtataaattgttacctgaaaaaaaccccaatctttagaagctaagtgaagcttttggagttctgattccatagtggatttgtcagaagaaaccaatttattgaagtgaataattggtatatttgaagaagaagaagaaaaagtggtattattgtaaataattgaatcttgatttggatgttggtatctcaatggaactactttatttttattattaccaatttctttggctaactcttgaaccaaagggactggaattgagctgccaagcttatttatctctgaatttttttccattatatatataaatattaataaatataaaatagtttttattatatagtacttttgcaaagagagaaagaaaaaaaaaaggaaaattaaggaataattattaagtacttgaagttgaagaaatttatatagatgatgactatatatatagagagaagaaagtatggcaaagagtattcacacaaaattatatgacaacaacatgtcttgaattgtcttttcatacaataatagagaaaacacaatacacgttttaaataatagtaataacattatcccatatttttttttttaaaaaataaaataaaaatgtgacagtcagtagtcccgtgatccgtaagggaaataccgggtaagctgtgcaatccc

SEQ ID NO: 36153 - DNA, 1198 bp, Cannabis sativa
  modified_base (981)..(985): a, c, t, g, unknown or other
acgtaatttacaataaggccttagaacagttcatctccgttctaattaccgagtttaaccaaattatgccttgaacgcataattctttaaatcaatatataaagcatggcataacatttaaaaatcaataatcactagggtaataacctaggccatataaccgctcactttagggtaataaccctactctcgattcttaattaatcacaattataatattcaacaagagcgccaccgcagttaactctacatactaactactgtcttacctgatgtcccgaatacgtggagattccaaatccccaggtgctcctgaccaagtgccggtaatcctagtcacaatttttgagatgcacaaatagggttaatccctaaatccactttcacataatcataaaattggccttcaaatacagataaacatatagagctcggaataagctttccaacgatatgtgtcccaaatcgaaatgtattgaacaaccgaataacacgttcaaaattgctcagaaaacactaggtaggccgcgacactccccaagtggaatgcggtacctaggatgaaaaacccaggatttccaaggggtgggatacggtgcccaatgagtggggcccggggcctgggtttcaaatccaaaaaaccccattccaagcaacacgaatccaagctcaaaaacacaccaaacatacccaaaacttgaagaaactcccaatttatattccacaattaaactatcataacagagagttaaaacacacaaatcacagtctttttagcaccaatatatgcattaaaagtcatagcatcaacaaacacaaataagctccaaacttaagctaaattcaataaaatccccattcaagagcttgaacaccaaaaccaaaactcatgcttgaaaacaaccaaaagcagcagctatggagagaagtattgtgatggatttgagcatgtgacatgactaaaagtatcctcatagtccnnnnnttctctttgggtataaccctttgcgacaagtctaactttaaaagttttgacttctccaccagcacctcttttcttcttgtagacccaattacatctgattggatgataatcatcaagtgcatttacatattcctagagtttatttcttttcatggaatccatttttgaatccatgccggatgaccaatgtttccgttttatacttggtattgc

SEQ ID NO: 36154 - DNA, 1962 bp, Cannabis sativa
  modified_base (1911)..(1915): a, c, t, g, unknown or other
gggcctggttgaggtctgagtcttggtttgagtctaggtccgagtctgggtctaggtttgggtctgggttcgggtcgaggtccgagttttggtcttaggtgtaggtctaggtgtaagtctgggtcagggtctcagtatggatctaggtctcgagtttcgatgccgacctgggtctgggtctgggttcgagtctaggtatgtatccggatccatatctaggtccgagtctgcgtcttggatcgggtcccaggtctagatccaggtccggctctcgctcccaatatgggtacacgactatctttgggctcgagttttggtctcgctttgggtttggggctaggtccgagttcggttctaggtttgggtccgggtcatggtcacagtcctagtcttgttcaagcgtccatgtttggcagttcttgttcaggttctagttctgtctctcgggcctgggtcagggtctgcgtttgggtcctggtccggttcgggttcgggtcctggtttgagtccctaatctggtcccggtcacctgtcccggtctagttccggtttaggtcctgggtcccaagcccgagtttggtttcgggaccgagattggggtgcggttctaggtcccggccccaattttgtgtcctaagtcttgttccatgtttgggtcttagtttggatctaggttcggcactgagtctacgtatgagttgggatctaggtttgggtcccgattcgggtctaggtcttggtttgagtttggcacctggtccggttacagttctgggtctaggtttaagtccggttacggttctaggtctaagtccaagttctggttacggttccagtcccgttctcgggtcccggtctacttccggttttggttcaaatttttggtcacagggtacggattcgggtccaagtttaggtttgggactagttttggtccaggtcttggttcgggtcctggtcttgttctagtttgggtcccgggtcttgggtcgggtcctatgtttaggattgggtccgagttcggggttgtgtcccgatagttaagtccttgtttctgggtccagggttaggtcccgtctctcgagtttggggtcgagttttgggtcttcatcccagttccggtgcctagtttctagtccaagtcctcaatcaagatccggatcttttgtcaaaatttgtgtccatggtcgggtttggggcccaagtcccccatctatgtctagatctttggtcctggtctaggtccaagtttaggtttgggtttgaatctcaagtttgggtccgagtttaggtcccagtacggtttcaggtgttagtttgggtctgggtccagaatgagtccaagtccctatttgggtccaggttgggttcccaaaccggggcccagtcaaggtctaggtcacgaaccaggttttggtctgggttttggtccgggtttaggtcttgagtttgggtcttatgtcaaagtttgggtctaggtttgggtcttgggcctaagtcatgggttcgggtccctgattcaggtcagggtccttggtcccaatctgggttagggtcccagtcctagtgcaggtcccggtctagttttgggtatgggtcagatctgggtatgggttctagttttggtccgggtctaggtccaagtcgatgttgaattccctaatattgacaccgactatgggtcgggtccaagcctcgagtcttgattcctgtcccgggtcaaaatctagatcctagtgtagctctagctcatgtcttgggtcctggttcgggtcttagtgtcttggtccccgattcaagtcaaagtggttgttcccggtctaagttagggtaccagtctgcgtgtaggtcccggtctatgttcagtaatggtcctcatctcgggtcttggcctggtctgggtctaggtcnnnnntcggttctcaggtcccaggtctgagtatcgggtcctaggtcccagtc

SEQ ID NO: 36155 - DNA, 2611 bp, Cannabis sativa
gaatggagttttaagaaaaaatgacatattctactaatattgaatagtttaggtttaggaaaataattttggcctaataaatgcattagtcaaatttgccaataaaatggaatgtacttataatttattggcatgtaaatataatcctcctaaataaaactctatttttatatgaaattactaaattaccctcagaaaatataatcaaaatgataatttttttcatatcaaaatttgatgtaaataagttttcttttcttcttattcacgaaaaaaaaaaaagaaaaaacaagatggaatgaacttattttcttttcattctttcactttcatatttttattttcttttatatttctttcatccttgaaaccgtatactttcctctctttatttttagagcattgctataaggcactagtggtgcctaacaccttttcgacatgtcgtgttgcgattggctaacgatactccctaaaaattattatattaaattatattggacatgatacttaattagaccaatagcgatattgacacatagaagggtgctaggcaccactggtgcccttcaacatttctcttatttttatgtcctatcattaatactctaattgttacttctctataacaaaaattgatatgaaaatggaaatcttaattattatggatatagtcccgattttttgttaggtagaccatctcaaatggatagtgtatattttaggtttaatttagtccaaaatataccataaaattatatttagcccaatttatgtattagtgctccaatgcacaagttgaaattaattgcaaatcagctataaaagttaatattaacattagaccatctccaatggaagatttaaaatttgtgctaaatttggcacaaaaaatgagtttgtgctatatttggtccactatttataattgtgctccaatgcacaatatgtaaaataagaaaaaaataattaattatattgacgatcattttatattttattgagaatatataaaaattattactttttattattttattatttaaataatagtaatgtagtaaatatagaatataaagtttagtaaaagttaataaattataatagatatatatcccccaaattaatgagactaaaattatttttttagtgtctgaagctgttctaaaagaataaattcatgtttagtgtaggttaataattacagtgtctataaattatactatattttaaaatatgatgtggtatgtgctgttcatgaatttctaatattactcactagacccaactcgttagcttcaatgttagggaatgttagggaagcaagggtggagattactcactagacccaactcgttagcttcaaaagttttcaaggctagatattactctaatggatcttttctcactgcccaacttggttccaacccaagtttcgtgtggcgaagtatcctggaagctcaagctttgattcgaaggggtatacggtggagtgttggaaatggtaattcgatttctgtgcttggtgaaccttggttaccggattcagtgaatccttttgttgtttcaagtcacccagcacttgctacagccactgttgcaagtttgatgtcattagacaatggcggatgggataatgaaatcataaaagatctctttgagattagagatcaactcttaattaaaagtatccctttgcaggcgcccacggctatggatcaaatatcctggtctaaggaagtttctggtatatattcggtgaagagtgtttatggtcttctgcagcaggataaggggttctggtatgatgatcagacctcgctgttttggaataaactatggagcttgaaagttcccccgaagttagctaatttgttgtggcgtgcttgtttcgagtgccttccaactttagttcacctccgaactaaaaaggtggtgagttgtgtcttatgtcctttatgccaaactgaagaagagacaaccattcactgccttgtcacctgcaacttggttcaacagtgttggaaccgtgtgggaataggcacggttgttgcaccaggtacgtcgtttctgcagtggtgcaccagtatttttcaggggtcaaatggtgagcaaaaatgcattttggcagcagtatgttgggcaatatggggagcccgaaacaaccttgtatggcagaaaaaagtttttaatcctagtaatatagttgtgtttgcaataaagtaccttgagccatggaagaatgctagaaaattcaatttggattcatcatggtctgaacttcagatgggtgatgggaatgagcattggactcctccaactgaaaatagtctcaaggttaatgtagatgcggctttattcaatggaggaaatacttatggtataggaatggtggctcgtaatcatgatggagtgcttattgaagaccgaactgtgctctctcacggtgcagtcgatccccctcttgccgaagccatatgacttaaggaggcccttagttggatcaaagacatgcaatggcaaaatgtttctttggagtctgattgccttgtggcgatccaggctattcgtagctctttaaaaatgcattctttgtttggtttagttattc

SEQ ID NO: 36156 - DNA, 3892 bp, Cannabis sativa
  modified_base (44)..(45): a, c, t, g, unknown or other
  modified_base (161)..(164): a, c, t, g, unknown or other
  modified_base (364)..(365): a, c, t, g, unknown or other
  modified_base (2627)..(2637): a, c, t, g, unknown or other
atattcttaaaaaatatacttataaaaaaaaattatattttaannattatgacaaaaaattaaaataaaaattatataaaattttcttagaaaacaataaatatatatatacataagttagaaaaaattaggaaaatgaaatcaaaataagtattgaaatnnnnataaaataatgtgaggaaaaaaattttaaaaaaatatttaaagtaaattttaaaaattatttaagtttatattttttttaggcttttttagttttacacttcaaaacagtttttcttttcttttcatttttacggaattctaagcagcgctccaaccagtttaaaaactcaaacagtatatttgaaaaaaaaaattaaannataatatatgaaataattctctaattttttaaattttaataatatgttgtatttttcatacaaatggggtgcaaatagtactctccaaatatatatttgtctatattaattaattcacggacgtaaaagcgcattgaaataaagattaatggagaagttgagatccgatatcaatctctgtctaggtgcttcttttcccttatcggctcacgttctcactttctcgctcccacaggaaattttcccaccaagccaagaaaaagagaaccgaaccaaaatttattttttttatttttatttttattttaattttacaatacacagagagagagaggaaggcgacgaagaagaagaagaagaagaagaaagaagatggtctggtctaagaagataacgatagcaaaccctaggaattagaataacttatggccgcagcggcgcttttcttggtttgatttctgggacgattgttgccgcttaggtttgtcctcgtattctttgtgcttcgtgttttgagattttatttttctggttgtggtttggtttgaaaaccttgaaattccttttaggttggggactttttattgtcattctctgattggcggtggtttcgagctccagattaaggcaccaggaggctgattagggctgtggcagaggtgttggttgttgtttggtgcgagttgagtggtagggtttttggaataggagggggccggggtttcccatgcgattgtgttggttttcatgccgcctgaaccactgccttgggatcggaaggacttcttcagggagaggaagcaggagaggtcggagtccctagggtctgtcgccagatggagggactcttcacatcatggctcgcgagagctcaatcgatggggatcgaccgattttcgcagaccattaggtaagtatggttaaaacgcgatggttctcttgttttattttttattccgtttctcaatttttctcaccttactccagcaacgaaggagggagttaggcaggcccgtgaactagtttttgtgcaattcctccatctgtttataatttgggacatcggtccctgtgtcatcccttcttaagaattatcgtctgtgttcattattttatgggtatttcttagatctggagttttcatttactttgtgtaaagatctgagagaggcgattttgttgcctttggcttccttccaatttcctatggtgatatgtaattaataatttatttctgaatatttgtgaaggtcacggtaagcaaggtggttggcgatttttttctgaggtgcctggccatgggtatgcatctcggtccagtgagaaggttctagaagatgatggcttccggccttctaattctcgcggagaagggaaatatggcagaagtagtcgggaaaatagaggctcctataatcaaagagaatggagaggtcacacctgggaaacaaataatgggtttccaagcacacctggaagagtgcatgacgtgaacaatggatttccaagcacacctggaagagtgcatgacgtgaacaatgggtttccaagcacacctggaagagtgcatgacatgaacaatgaacagaaatcacgagaagatttgccaccatattcaccttattcgaatggtagctttggaaacacatgggatcaggctcagtttaaggaccagcatgagaaggcaggtggttccatggggttgggcacagctcagagatgtgataggaagcattctctgggcataaatgattggaagcctatgaagtggacaagatctggaagcttatcttcaagaggttcaggtttcagccacttgagttgctctaagactactggggctgttgattcaattgacacaaaggttgaatcgcagatgaaaaatgcaactccagttcagtgtccttcagcagatgctaacgcatgtgtggcatcttctgcaccatcagaggagatgacttccaggaagaagccacgccttggttggggtgagggattggccaagtatgagaaaaagaaagttgaagtccctgaagtcacctttaacagagatggagtatttgctgtaagcaatgcagaaccttctcattctctcagttcaagcctgattgataaaagccctagagtgacgagtttttcagattgtgcatctcctgcaaccccatcgtctgttgcttgcagttcttccccaggtatgttgaggatttttataaaatatcttcacaatctattatcttctacctattattattattattattnnnnnnnnnnntattattattattattaattgatttctgtaactaaaacattagttggttgaggatttggattggaattcagaagatctttaagctttagtatcctagaagtatcatttattcctatcttattaagtttagcatttattcttctcttatcctagaagtataatttattcctatatcattaatcttatggtctgaggtagtgttgctttgtgtctataaagttaggtaattccctaattttagaaggatgtcaatctgttatggaattttgtagtttttctcattgtatcagtagctggttgggatcaaaaggttctgaaagactggaaactcatttatataaaaaaaaatattttggtgctgaaataacatgtatcttagagcatcttcattagtgtgccaaatttgggatactttgctacaatgtagtcattctagaaaatacttgctccaagggtgtgtcaacaattttgttaaattttttatatgctaaaagttggaccaaatttggcacacaatatagcttgatacaattttgcatcattataaatgctaaacattttcatttacttttatgatattttattaatttattattgtcttttgctagctattagcattaaatgctatgttttttaccgtaactcttttggaattatttttagctgtcaacaataaaatataaagaaaaattatgatttttttatatctttaataaatattaaatgaacattcatgaaagattgaaatatttattattgcatcagcttttacaattttgcattggagtgtagtgctaaaattgtaccaaatacatcacatattgacttttggtgccaaatatatttacattcccgtagcagatggtcttaatggactcaattaatagtgatttcgcaaaactattttttttttaaaatctgaatgttgagttgtgccagtgtcttgtgatgctcattttgaagtagaagtgcagtgaaaatacttggtatgcgattaggtatattctctcccccaagagaagtagactttttcttgtgtgtagaaatacattcctgttttttatattaggtctgatttcctattgtactctctcaatgtcgctatcaaattaagtcctatgcacttatatttctagagtactcactcatgtggaagaactttaaaatatttttcatgtggaagaactctaaaatatttttcatgtggaagaactctaaaatatttttcatgtggaagaactctaaaatatttttc

SEQ ID NO: 36157 - DNA, 1848 bp, Cannabis sativa
ctagctcttttatactctaatgatgagttactagaactactactgctgagtagcattctataagctagtcactggtagtacatgtgaatgtactctccattttgatatctttgtaggagaactagctccatgttctcgttgtaccttcccagcttgtaggctcccttactagttattttgtaacttgataggggccttcccagttgggtccaaacacttctgctgttggatctttggtgttagggaatactcttcggagcaacaggtctcgtatgaaaaatttcctatccatgacttgtttgttgaagtgacttgcgaccttttgctggtacgcctgcagctttaggttggcttgatctcttctttcttttatttcttcaagggattctaccagatgttgtttgtatcctggtcataagtttgtcctcctataagatggcgacaccagctctacaggaaatattacctcttagccataagctagagcgaatgcagttttcccagtggttgtcttctcggtagtcctgtgcgaccataaaacctctgggagcgattcaggcctatttcctttttcctctacaaggttctttttcaaggtttccttaagggttttgttgatagcttctacctacccatttgcttgatgatgccatgtctattgcagaaatcagtgaacatggcactgtcaaactgctttccattgtctaacacaatcttttgtggaagtccgaatcaacatatgatgttcttgacagcaaagtcaaggacttttttgaaggtgattgttgtcaggggtccagcttctgcctacttggtaaagtagtctacaataactacgaaaaactacaccccttcttttccctttaagagttgaccaatcaggtctatcccccatactgcgaaatgccaaggagactgcatcattgtgagctcattcggaggagctctagggattttcaagaatctttggcacttgtcacctttttgacatagtccattgaatcctcgatcatagttgaccaaaagtacccttgtcagagtattttttttgataggctttgcccctcagcatggttgttgcagaaaccttcatgcacttctatcattagtctctcgacctcagccttggtgacacaccttaagagtgacattgagaagctatgtctgtacactactctatctaggattaaatacctaccaacctttcttcttatcttttttgccttattcttattttcaggcaaggctctagtttggaggtaagttgttataggtgtcatccatgttggactatcatccaacatgtcgacttctttaaggatggtaatgctccgttccttcaggaatcgtattggcaccaggttttccttattggcaatggtgctacccagacaagtaaatgcatatgttgcagcattgttttctctagggatcttccttatagtatatccttagagttgacttagcaagtcttggatcttgcttaagtaggtcattatttttcacctcgagctgtgtattcacttaggatttgattcacgactagttaagagtcactgaatatgtccaggtgttcagcccgtacttcatgtgctagcctgaggctggctattagtgcttcatattcagcctcattgtttgaggctttgaagccaaatttgattgctctatatagttgttgccccaggtgttataagggcaatgcctacactgaataattggttagtgcaacttccatcaataaggagtttccacgttgattcttcaagtttttgttgctgttcttgctctcgcttcttctctggctcttacttttctcttgaatcttgagagattttaagaggtgtg

SEQ ID NO: 36158 - DNA, 2249 bp, Cannabis sativa
ttcctagccgccatgaattgcctttgaaaattgacttgcagagaacattagtattttttcaagcaacttatattgataagatgctcgaaagattctgagtgcggaattccaacagaggacagttaccgtttgacatagaattactccatgtaaggatgaatgtccaaagacttctcaagagatggaagacatgagaaagtaccattatgcatcagtagttgggagcttgttgtagttgtgtacaagggtgacatatactacgagtgtagcaattgttagtcattaccaatctaatccaggtttagaacactggatagctataaagtacattcttagtatcttcgtagaatgagagatctcatgcttttatattcttgtagagacttaaatgatcatatgagatatactaattctaattttcaataagataaagatagtcaaaaattaatatatgggttagtattcactcttggtggtggagttgtagtttagagaagaattaagaaaatcggtattgcagattcaaccatggaggccaaatatatagcagcttacgaaacaactaaggaagtggtttggttgaagaaattttacactattttggaagtagttctagaagtagaaaaccacaggtgcttaactatgacaatagtggagcgttagccaactccaaaaaataagaagccacaagaaaggcaagcatattgagatgaagtaccatctactaagaattgtagtagagagaggtgatatggcggtcttaaagattggatcagaataaaacctggaagaaccattcacaaaaacacttccagagtaatcttttatgggtcatatatataatatgggattaagggagatgcccaattttcttttagggcaagtgggagattactagggtttatgacctgaaaaacctgtaaaaacatatctgattattaataagagttgaatattttgatacatgcatgaatgttaaattattaatatttactattgaaaatgatatatatatatatatatttatagatataggaaaattcctttttcatacgtgaagttgtgacttgtattgtacgaagacataggaggcgccacatgcattgtgtctagacacagtgcatgcactcatatagtgggagtccctacttgtgttaaccttttgggttaattaactaattaattaattcaattagataaatatttaaattttaaaagtaaataaagatatttttagttggttgagatatttctcaaagtagttgagatgtgctctctaatttggttgagatattctctcaagtaattaagatattccctcatcggaaatatcagtaaccgatgcgattatagatatttatttgaataattaaatatgatttaattaattgaataatcactattataaatagaagactgatgtgaaaaatcaagatataattcttcaccactattttcaaaatacaccagagagaagaaaaattatttttctctcaagaatagttcttgctcatgtgttgagaattcaacaaggaaaaattatacactcctagtagcccacactactccttgtgtttggtgaatccatttggaagactaaagtgtgacatatattagatctaattaagttacaacaagtttcgaggatcatcaagaggtatttatttctttcatgcatgtaaatttttctttagatttaatgtgtatacatgtggagattcttgaaactatggtataatgataatcaaataattattatttcactgcgtatgtgatttagtaccgtaaaactaacactacactcgaaggcataataactgaacttgtagcaattgtagcacttgatgtggaatttgtcgctccttgaccatgagtttcctcttctgcgccctcatggtggttgttaattttgacttcgttctccattattgaagttgttgttattacagccaccttttctttctcttcattgtcctcgaccacgtccatgttctcttccttgatcttgccctcttcctttttaatctttactgttattaattttttttttgttttaagttaagttgtagtaattgctccgttttttcatgttgtttcttttccttttttgtttctccttgtaggtttgtaaagaacccacgaattgctcaactgtcatagattctaaatctttattatattcaatgattgtagcaatgtactaagattggactcacggtgaataattttttttataacctttacttcac

SEQ ID NO: 36159 - DNA, 1358 bp, Cannabis sativa
taaggttcattatttttttctaaaacccatctattctaaaccttaacctagagagaacctatatataaaggaaaacttacaaaagtactgaaatttgagttagcttttataaaaatactgttacacggaaatttttttaaaaatacaatgtttttataaaataccagtaaaacacaaagcagaacaactcaaaacaacagtagaatacctacaaaacaccagtagaacaccagtaaaaatttaacataatatactgctgtatgaaacttataaaaaaatacaataaaaaagtaaaaaataccatctgataatatttttataaaaaaataataaaaattagtataccatataaatttctctatataaattgtgataaagctttgattaacaagtctttttgtgtgttgaaaaacactaaaaccctatgtgaatcagaaaagctttctctctcactctctataattcgaactcactgtctctctaatctctctctatagttgattggtaaggacaaatgagattattattagtttttttgtcttttctcatattttcttcccactatcttttctcctcactttttctttaaaattatctttagtcattgcattttgagagagatgactaataatgctgccggctcgatggttgggcagcagaggtccacgcccaagatagctcattcaggtccaaaaatatctttaacaaaaagactttaaatttatttttaagaatatcatatttcatggttttctgattattttttaaaattataactattttcaaaaaaaaaaaatctaatttatttattaagatattatatttaatattttattaagaaaaaattctaattttattttttaaataatatcttaaaaatttttcattgtataaaaagcataaaaatattcatataaaaaactccaattagattttttatttgtttccaattggcttgagtgggttgggtattaattttttatagaccacacattattagaaaggagttttttcatctatatgggaaaatgtaggaaaatttacttttataaagcataaataataatgcagaaaaatatgagattaaaaaataattaaaatttaaaatatagaaaaaaaataataaatgaagatgataaaacctgtaataataagtttcggtgaaaaagtcaacagaaaagtcgtgagtgccagaaaaatcaccaaaaaagttgccaaaaagttaccggaaaagtagtcatcgccgtcgaaaattttgccaaaaaagttgctgaaaaagtcaccgttagaaaagtcaccagaagtatatgtctcagatataactaaaaatagaatggttctataacataatgaataaa

SEQ ID NO: 36160 - DNA, 2110 bp, Cannabis sativa
tatattacagaagaggtgaattgagttctctaaaaaacaattcaagtatagcaaagagcactgttttattaaagtaaggaatatattaagggcaccttattatattattaatggtacattttaatattaaatctcatatatttttatttaataataatataaaaactattaaaccaattatataatgctacattgatatagtgttagacacctttaagtgtcaaataataccactcttaaaataaagatatgagcttagataaaaatattgagctctgataaacataactcagataatagaatgaagagaattttttctactgctcaaagaagaagtttaagaataagttttttagtgctttattaatttaatttttgacatctttttaattaatttggtaaaaatattttattttattctttaatttcactaataaatatataatatttatttttgtttatatttgattaaaataataaaagtaaaatatatgtcaaacttttctatttacaaaaaaatttgactatatattatatatttattattttaatttaaatatatatgcctttaagttttaaattaaattttttgtttatttttttttagtcgagttcttttattcttgttacaatctaacaacttcagttaacatattaataaaataaacaattcacaaaactagaaaaccaaacaatacagagatgaaaaattaaaatgcagaaaagataaataacacaagtaaatttagtggggttcgaactttcctctacaatttgtagagtacctatttgaactccttccaaagaatccccctttcactatgataaatagcaaattacaaagcttgattcaagatagcttgaactgttacaatggtgatcctatctcttgagaaatattcaaatgaagttagaacatttaggaaactcccttgaagtctcatgctaccctttggtttctcatttctgttcttctttctccatctctaaccctcttgctttaagttacaataaaacatcacaatacaaagttctctcagttctttctctatctatttttttgttcttacaatttatgaataaaaggcattattttataacataaggagccaagtacaaagttagttattactaaacagattttaacataacttactaactgaaatgatcaatcctaaagtcttgaacccgaactgttatgaagtgaatgtcatttcatcataatctttaattagttggtttatttaggaatgatatataacaataatttccacctcaatacttaataaaccttgtgaattccttgaaattcatagttctgacctctaacagttttagcctttctaagttacatacagtgttaaaacttactaagtgttagaaccttagttctcatcttgttggatttttcttcacttaacagttaacaccttctctatgttgatttgaccttgtgtaactttctctctaatgaagtgacaccttacattaatgtgctttgttctatcatgaaagacaaaatttctacaaaaatagagtgcactttgattatatgtgaaaacatcatcatttccatcatagagtttcaactcttttaacatgtcttgaatccataattctgctttgagagattcagttgcagcaatgtattcagattttgtggatgaaagagctaccacaagttgtatttgtgatttccaactaacacaattttttctaaaattaaaaatacataggttgtagttgatttccttgaatctctatcaagttagcatcaacatagccttccatgagttccacctgaattgtatcctggttcattttaaactttaattgtgtcatcacctactccgttatatttaaaagtaccataaagctccacaaaaaaattggacagatgagtgtcaggatcttcagaaggcaacccattaaattgaacaaatgattgcaccatttgtaaaatagctgatttgatctcaaagttgttagcctcaatagttggtggacgtatactacagtagaacctctatttaagagtactctattcaagaataacccctaatttgttataaaaaaatcaagtcccaatttggatcagttataaataaga

SEQ ID NO: 36161 - DNA, 1555 bp, Cannabis sativa
gctttgttatcatttatagttatttatgacttaaattaaattcactttcaatataatcagatttattaattaataaaatatcaaaaattatttaatgttgcatagtttacatgattaattactttcataattttatgttatgtttactatataaattctattaaatcccgaacatataattattcatgattatagtgttatttacacaataaaaaataatcatgattatatgcctcaaactacttagtccgacaatttaccattgcactggatttaaactgacatgattatcagcgatgtggcttacttatacttgtataagtagaatgtcctttctaaagcgttagcaaagtagattagtatcagatgtatcaactatacattagactggaccaatattgacagtggaaaagatatcataaacttacagttatttattttttaagtcaatgtcactttgttgatcgtagatcaattgatttcaattatgagatggttaagtgctagcttaattgtactatacgggttttttgactcgttcgttaccagcttactcgtaggactagcccatacttacatcttggaaatttgttagtgcaactgagtgggagcgttaatcataaatatggaatctatagcttctataactagtagaagtgaaacgatggtttacttagaacttagcttaacgcaataaatgatggagtgctcatttcagtaattatattagtttactcaaatatcatttacaagtagcaaagtgttttaagaataaaatacattaaagggtaaaatggtattgattgtttagattgtaacaatgaataattcatagcgtaactatatttagtatatagagcattatatgtaatcaagagtgcaattttaaatctacagtcgagttaggagaaattaataaactaactgagataatatcattttgtagtcttaattgattgatttatttaatcaatttggattctaaataatgagtatgtcttatttgtgaatgtttacccaaattttgacgatggtgatgtggcaagaataacgacacgtggcacgaggataccaggactggattgatgaagaatatgtaaagttatgactattggtatggactattagtcatgaccggttgtcatgaccgctgaaagagaagtctaacggtcacttctccccctagcttgagccaggtggctacctcgagggggacagtggactaacaccctcatagatgggataaacgatcactacacacttacaaggtcaaatcagtctaggggtagatggcgaatatggcacagttcatgacgttaaggttactcacaacgtcgaagatcaagtgaaaagggtcttgggaataaccccccaaaatggtgacattcaccccttcacgatgggtctcgggggtgtcacccttaagtattggctactacccccaaaggaggttaacggtcataccacactcttagaggggacccttatcgttagtgactaattcaaatattcaaatcctacaagaagttgaaagatggttacaaacccacgaaaa

SEQ ID NO: 36162 - DNA, 1511 bp, Cannabis sativa
  modified_base (645)..(648): a, c, t, g, unknown or other
  modified_base (824)..(826): a, c, t, g, unknown or other
cactttcatcattaagataagagtacttactaattacactgtaattattttattgattgtattggttattataaaattatatagagaaacataagttaataaatgttgtattttttaaatataatattatttttgaacatctcaaaaaaaattattattttttaaaagaaatttaataaaaaaaaggggctttttcatttttaaaatattatcttatatatttaaaattaaatagaaaaataaaattttagttagtcataaaactaaataagtaaataaaataaaaattagatttggagttaagtttagaatttttgttacttgaacataataaataaggtttaaaattaattataaataaaaaatattaattaggttgtagtttttaaaagataatttgaaccatttaattaaattaatgactagaaatgattatatctatttatgggtaaaatactcaattcttattttactagtcctctgtatatttatatgtatttttgtatattaagttgtaatcctccgtgtttataataactaaatttcgaacactaattaggttttttatctcttaaactttgacatgtactaaattatgttttttgaacttttctaactgttaaaaatttcccctgaactattaannnngttaaatttaaagacttttatctaattatattcaattttactattttagtgattatttatgtactaaatcatgttttccagactttgatatctattaatttatgcctttcgaacttttacatgtactaaattatgttctctgaactttcatttatgttagatttttttttactaannntagacaaaagtttttaaatctaatcatctcaatagttcaggaaatatttttaacgactttaaaaatttaaaggcataatttaatatatatcaaaatttgagagataaattaatttaattattattcttttggtttgtaaaagtttcatgatcttgttaatcttcatttatggggttccacgtgtgatgtattataatgacatatacgtgttgtgtgtgtgcatgtaagtcggtttatcatttcacaaaaagttaaaagtgtattgaataagaatataatataaacatttcactcatccaacaccacctacttactataattagtttgaccaggtttatataatattttagtttatcatttttcctttttaagaactaaacggtacaatttaaccccttttttttggtacaaaatgttaaattgttcagttcccttcgtatgtatagagaagtaggatctgccgacagtattatatttatcccattaaccaaagacagagttaggagaccgaaagggtgccgtgaccctataaattaaattttttattttttataattaatgtacaaaaataattaaaaataaaaataggaagaattctatttgcaccccataaacttataaatacactccattattaaaaagaatataaacttaaataatttttaaaaagtattcttaatatttt

SEQ ID NO: 36163 - DNA, 1649 bp, Cannabis sativa
aatggtatcaaaggtatcaaagtcttgactgacccagtcggaagtgtggtcgacgaggacgtcagacccccaaggggggtgattgtgacagtcagagcccctgattcaaatgggaaagaccaggagatgtacaatcccatatcgcctggggaaagtcatgtgtgatgatcctgagactgtgtaggtattggactacataggtgaagaaggcttaaatggattgattagtactacctatatcaacaatgtgcatcttgtttttcagtagcccatcacgaaaaaactccacagttaagcgtgcttgacttggggtaattttgggatgggtgacctcttggaaagttttcccaagaagcgtgcaagtgaggacaaagcacgttgaaaacacacatgttggtttgtagggtcattcatcattccaggaagcagccatagtgacgtactcatgtataagagctatcattccgtaggtgtaagggcccaattgagacttgaagcgcagacgttgcatgcttaatgaccatttatcacgcctctttatggctaatacttaatgttaatatgctaactttgaccaaaattcttatagttcttagccataaatattgtagctgatttgtcgtaaaattttcttaatagcctgaaaatataattctaaactctaggcctactatgaagctctataatacaccatacgagatgtatcctcaaaacaataaatgaatatgacttttataataaaaataacaattaaggctccccatggtataacttactggtaatcttaatgacgtaattaaatattaatttacgtgaatcaatataaccagcgaagtcataacttaagtgattaaatttctaaggaatcggttcaccttaataaagtatgtatgaatataatctttagtatcttaaagatatctcatcactttgtatgaaaaataaagtggtcttaattttaattattatgatactatttaacgatcctgtaacaaatgcaatgcaaaatattattcagattcttattaggcatacattaggcatctaaaaatagaagcaaatgaatgttcttaatttattctcattctagattattttacaaatgatgatttgagtttaatttattacacttaaagatataagtaacataagatgaataatacataattttatttaatcagagatgttgcggctactttctaattaattaaaattatatatgttatttatattatttatctcaaaataataatttaagatataaattacttcaccttacatagaaaacttttatcatttacaagtaacatacatattgtctatatataaaataaatattactcttactgaccttctggtatataattaatccataactcttttcaaaactaaagaaaaagatgacaagataaaataccaactgtgagaaatttattttaatctatatatatgtagactatttaagcttgtatacgttcaccactattagaggaaactatttatagtagtctgtataccttcccctctagttcactgtaatgaatttattcatgaattgaaacgagcaacaaatgtcaatgttactataatagaatcttttataaagacaagtgagaatgtaaatctcatttgttattgattcttagttc

SEQ ID NO: 36164 - DNA, 1139 bp, Cannabis sativa
tttgtcactaattacccaaccgacggtaaaagtcaataaattaaaaaaatttgttcattattagcgtcgttttaaaagcctcactcacgctttgtgtggcgttttaaaactgacggtaaagagattgtgagggtgagaaaacgacgcaaattctcctattgttcacttacccccaaacagtcaaagacactttcattttcgagctctcttttccctctttttctctgaacaactctctttccctctcgttctctcttgcgatttcgaagaactgaaggtctcttgcaatttcgaaggtctgaagctctctgtttcgaaccggcgattttcccacctccgtaagtctctctctttccctctctttttctcttgcgttctctctctctctcagtctctctgtgtaggttaggggtgtttgagaggttgattttcccattgattatagttaattttcaatgtctaaaacagatttgaatttttttttttttgagaacaaatgttaaactagaatatgatgatttatcaagtagaaccctcgaacaatcttgaagaaagaaacaaatattgtacacaaagttaaataccccaacccacttcatcttcgtcaatgcaattcgtctagtctcatctcattctcaaagctctctcgtagtttttttaacttagggttgcatagttatctgaaattttcaatgggtgcctctttaaaggacaccttatatcttgttttggttgatttaaggattaatttggtcctatattttcaaaaacgaaagaggcccaaagttttgcaggaaagttgagtcacttcgccttcgaactttaccaggcgcagtgaatatttattctgctatatttagtcctttgaattcaacccatttttccaattatcgatttttttttattatttgtgttgtgtatgcaaatttttgattgattttgttagggttccgatgatggcatgaaatctttgagacctgaatctcctaattgatgacatctacaagcataatcgctgaggatccctattttttttttttatgaatttagatttatgtttaagaaatgattatttgtgggtattgcaatagagatgatgaacatgcactgggctctgagcagttgtatatactgtttat

SEQ ID NO: 36165 - DNA, 1674 bp, Cannabis sativa
  modified_base (781)..(787): a, c, t, g, unknown or other
atataaaaacaccttatgctttttttaagcatataatgtcaaatttccttatataaattacgtttaatagttaaactattttacatttaaagtttgtattttatagtactttgtcatactcgaaatttagctggaggacacgtgtcaagataaagggaatgtgaatcggtgcaataggtttttacggaataactcattaattacataagagccagagtatatttgtaacccgctgactttaaggtcttaggcgagtaatcaatgtacaaactggcacttagtgtattagcgagaaaccatacatcgctaaatgcgaatagcgaggcacaggagaaagtgacacataccaactttaaaaatccttagcttgcaataagcaaactaagtgtaaaagtcgaattggctcaaagaacaagtatgcgagatgaccatctcgctatgggaagacttcctatagcttcatccaactaataggagcgaggctcacaaccctggcaactcagaagatttctttataaataactgcgatcgacacaaaacatacattgtcgaccgcgaaaggaagaatggccccaactcgctattgggatcactataatcaagtttctgtcgagacatctccagatttaacaattaaagacgtgtttaatacacgaaaattttgacccagtaaaagcgggaaaatcacaactatacgattttcaaatcataaaccgcatttacctttcgtgatatgtaaacaaatcccatgattttagggataattgttgtaaacatattnnnnnnnactttgtaattaactgcctactatgtaattataaatagtggcaaataagctcaaaaaagggacgaaaaaactcatatgaaagaggccctgaaaaatactcaaaaatttgaataagattgactcgtggactatgcagaattttaagtgcgaaaccacgtaaaaaatcctgtgttcatatattatttttctatagcttttattttttgtgtgaaattattactgtgaggctcaaatttagttaacaaaaatctgcgttaacagtttggtgctttcattaagagcctctgtgaaaaagctcaaaaaaaaaaaccctcccttctttcgaagaaaaacaacctcctacatggctgaaaatatagaaaatgttaagacccaacatgaggaagctaaccatcattctggaaaagagcccatgggctccagaagatctaccaatctgcagtccaaaaggaccacccgttctaggagggcccaacctgagggtggccccagtgcgcagaccacacgttctcggagaactcaacccgatgttagtcctagtacgcagacaacacgcttgaggagaactcagcgtgggaatgatcagaaccccgggacgagggatgaagagctccatcgtggaggtgcccaatctgtgggagaaagaacttatgaaacggaaagtcgtcgcttgagacgccgtcggcaatacaggggacgaacgctcaaaatcaacctaaacttggagtgggaagcccacgaggcagacctcgtggctcatgaaccattagataggaaaaggtccgagaagaataacccagggaaaatgagaatcaggatgaacaaccagatgggagacaaccggaaactgatgaacgagaaatccctcataaaatgaggaggatctt

SEQ ID NO: 36166 - DNA, 1050 bp, Cannabis sativa
cgataatgatagcaactttgaatgcagtggcgactacaaatgagatacagtgatgacatcggttttgaatggcaacacttttaaaatcatatgataagttttttttatagatttatcaattggtttttttagatctctattttgtgtgaggattttctaacctctattatttttattttactataacgtttgaaaatatctttttgttgttttcttttttagataaaaaattgtatgatgaatttttctaccgtattaatttattttttttttgtataaaaattatgaaaaaatttagtaaaataattactcatactattaaaaaaaaatatcaactttaatatatttttataacttaattagcaataaacaaaataaaaacgcacatgaagcaggtttgtttcctacttagtttatagctatttaactattttcttaaaaaattatatcatcttcttttaatattctattttctctattaaaatataaaagatgataacaactaattaataatattttaataagtaagttacaacacataataaattacctaataatctaataacaattcatatgataaattttacatgcatatgtatttagattcaattttagttcattatgcgtcttatatattcgagatcaataaccagtaaatgatgtactaactttgttgatgatacatagtcaaaattaataattaataataatcaataacatcggttgctaagtttataaagaacacatgttcaagatatataaccaatacaattaatattttttaaattttcaataatacatatttaagatcaataaccaataacaatcattaactttcaaactttttcaataacacgtattcaagatcaataactgataacagttagtaactttcaaacctttcaataatatatattcaggatcaataatcaaaacgatcaataatttctaaacattggtaatttttttctttttttataattcctcttcgatcaaatgatatgtaacgccctaatctatagggacgccacgtgtgtgattttataaact

SEQ ID NO: 36167 - DNA, 975 bp, Cannabis sativa
atagaaggtaatagaaattacactaaattgcaattttttctaattgaaagaatttttgcaatagaataaaaatttagaggaccaaaatttacaattgtaataatattggggacaaattcttatttatcctacggaattgtcctatattctttttgaaaatataaattattaaatactatatttacaaaatatataaaatttaaaaattatgtcattgtaattatggacagttacaaattttttttttttaaatagccacaaaattattatcaaatacacattttcacaatcacttaattgttatagttgtattacaatattatagcgtatatattgatgtgaactaaaaaaacaataacaaataataataataataataaaggtgatttagataatatagaataagtgaataacctaatgctttactttatgtgttaatatatatggtgagaataaaaggagcttttggtggtaattcaattggttaaggacgaaagtattgccacttttattaaggtaatagataatatagcacacacaaatagtgtgtgtgaacacaacagccagtgctcactctttcttttctttcgtcatgcatgcaaagaaaatgtttccttttccttacgagttagtgtaattataaagtaaaaagtaattagttttatggctaattatgattttttctttttcgaattattttttatttaagcatttatatattataatacataatttaagattaaggacctccaacacacatgtatcctgtgactactgctaatttccagtaatttttctttccaaactattaattactattgttcttttagaatttttatatccattaaaagttccttcaaatcattcagtgttgaaatataagactcatgttgagttcagtactctgactaaaaataatacataagggtcacatatgtaatttaataaaaattaatttaagaatttatgtttttt

SEQ ID NO: 36168 - DNA, 2443 bp, Cannabis sativa
tctattcttgttgtcccaataccatttttgtactaaagattgaagacattctaataaagttgctaactctcttacttctttgagcgctacatgcatatacatattctttaatatttgatgtatattttgttgagtatggtgcgaaaggtaaattttgatgaatttttgattgtttatcgcattgttgtgttgactgtttggttgatatgtcgaatggtagaatgagtgattgcttggtggttctgaaaattaaatgatcaaagttgtgatgtattgggactgaagctttttttatataaccaactttaacagatacagaaaatgtaattagttttatcataatatctctagatcggattattattaagttttattttgacaaaaattcagttcagggtcctatttgtacaatgttagaaaatacatggttcattttgtcatttaacaaaacatagagtccaattggtaacttttgcaaaacacggtgtccaaaatagtatttaccaaaaaaaattatttttttcatttattttattataataacacatgtaattttttattaattctatgatttttaatatttatatatttcaaaaaaaataaattatacttttaatatatattgttcttataattagtactctctcctaattaattaattatggagtctcataccattttaaaaaataaatattatatataaaataggatttataaggagaaaaaatatgacaactagcacatggctataaatctttccgtgggtttaacagtgaaaaagggaatgtaatcactgtaataaatatgtgaacaatcgattcgaaaatggagacattacaaaatctatgaagatgaatatgaatgtatgtaatagctttgtctccttcaattttcgttttctttccatggaaatgattatgatactactgtctctgtctctgttttttataataataatatacccatatttttgttcactgttttcatgaagcttcggagccaagaaacctatttttctttaagaataaatgttgtgaggtttttcaatgcagtgaaaacgagctgtgaggagatgatgatggaaggtgggcaaacttcagattgtgccatgactcagattgtgctttcttggactcttgaagacatttctaatgaaaatctttataaggttctttactctcactctgactctgacttttatatatgtaacattgttcttacatcttcataattatttctcttagggtttttgtttaatatgcatgttgctcttttctctgctctataattggttggggtttcacagaattattgttcagctttttggatacttgaagctttattgtttggccttttagtaacatttaactctataatagagaactttacggacaatccttcattttgtttgtttttgaattttaaaatttctagaattgtaatttctggattcttggaggtatatgttgacatattgctcttaaattgtgatgacaaaattcttgatgcatggattagattatgaaataggggaaaacccatttttagtaattgcttacttttgatgcaagtatgagattctgagattaatagatacaaatgtcgtttatataactaaactaatttgtttagtttgtatatgcgtgtcctaagctgtcggcctctctgtatgatttttgtagtttgaatttagtcccctttttttcctgctattttcattttgggataacttctgatcatgtgaatgccatttgggatcttcatatcatgttttaatttgatgtaagcaaatcattttttatgtgtatatttaaatgaatgatactgaggattttttagttgatagaggtgtattgttttggtgcatttcaagctttcctatccccattttttttatgcttccaaatctcacttgatatgatttgtgagatgcactgtgtttgttgcaactgaattttgactataaaactcttaaaaataagcttgttgggcttttgccattcattttgtttttgagtagaagttgcaagcttctttacttaactaataaacttactttgtttctttctaggtggaaaagattcctgaatcatttgaatcggttcagcattatttgggatcttttgtctaccctttgttggaagaaactcgagcgcaattatactcaagtatggacatgttgtatagattaccttatgccaaggtagttgcttttgatgaaactaagccacatggagaaaaagtttatcaagttcaagttgattactggaggaacagattcaatgataagagcaaagagccttacaaaactttgcctggagacatcatgattttggttaatgctaaaccagaaactttttctgacttagagaggacaggcagatcatggtcctttttatcagtctctagtatcacagagaatgagaagatagatgatagtagt

SEQ ID NO: 36169 - DNA, 1149 bp, Cannabis sativa
attggttgcaaatgggtccaccgaattaagagaaatactgatggatcatttcagaggtacaagtcgaggcttgtggccaagggttttcatcaaagagcagggttggattatggagaaacattcagtccagttgtcaaagcatcaacagtccgaattgtcttaagtattgctctgtcaaaaggctgggatgttaggcaacttgacataaataatgcattcttgaatggccatcttgaagaggatgtttatatgtgtcaaccagaaggctttgaggaccctacaaaacctgatcatgtttgtaagttgcttaagtccctatatggactcaaacaagctccaagagcatggttcgataagttgaaaggtactctgctgtcatggaatttcagcaactcaaaagctgatacttccttgttcttttacatcaacagtgacaccattatccttgttttgatctatgtggataacattatagttacaggcaacaataaggcacatctggacagattcatagaaagactcaacaagctgtttactctcaaagatcttggagaacttcatttctttcttggaattgaagttgacagaaatgaaactggtatctatctcactcaaactaaatacattgaagacctgttggaaaagaacaacctgcaacatctaaagccttgccccactcaaatatcaactgggaaatcattgtctctgactgatggcaaatcaatggaagatccaacaacctacagaagtctgattggagctttgcaatacttgaatcataccagaccagatatcagctatgctgttaactctctcagtcagttccttaaagctccaactatcactcattggaatgcagctaaaagaatactaaggtatctcaaaggtacaagaacacagggtcttcacataagctgcagtgatagactcaatctcactggatactctgatgcagactgggccagtaatgttgatgatagaagatcggttggaggctactgtgtctactttggagaatcactcgtgtcttggtcatcaaagaaacaagcagtggtatcaagatctagcactgaatcagaatacagagctcttgctcatgtcagtgctgaactgacctggattgagtctctgctcaaggaaataaaattt

SEQ ID NO: 36170 - DNA, 3993 bp, Cannabis sativa
  modified_base (829)..(845): a, c, t, g, unknown or other
gagcaagtataaatgtttaatattagtaaaaagagttacttagtgtaaatttctctaaaatttaaaacattaagtatttatgctgcaatttaccaaaaaaaaaaaaaaaaaaaacctacttttacgcaaattgtataaaagcacataaaactgacaatttccagatatatatagggtttagtaaccaatggtaacaaaggataaccaattgaaacagataaacataattacctctatctcacaatattctatattcgttgatcaggaaaaaaaagaacaatattttataattcttaccctgtaactttaaaaatacatgtataagaaatttaattaaaaattatttctacataatatttagtaataataaaaatggccgagggaaacaattatgaaatatatgctgttgttgcttgttggtataaccaaattagttgaagatgaatactaacctatgagtccagaactttaacttttgagggttcagtcttcaggcccattaatgtttatgggccatatatagatccaaacattatatgatagggtcatttatgggaaaatgacatgtttttatatagggattgttttacaaatacacacaaataacaaaaatattgcaaaaataaaatttcatgaaattttaaatattttttactattttttttattttatttacagaaaatacgattatattgtactcttgttaatttgttgttgattttttgttatctgtatgtttttttttattgttttgatgttattttgatgttatttttatgttacttttatgtagttatcttgttgtttttgtgttgtttctatgaaaaannnnnnnnnnnnnnnnnaaaaaaaaattaaacataaaaatataatttataatgctttatagtgtaaataaaatttcataattaatccaaaaagtaattgaaagtatggaataatttattatttgtaagaaacattacatgtaaaacgttataaaaaagtattcagtttattttttaaacttataaacaaatttgcaattaaaatacataaccaaaattcaaattctgtgatgtttttctccctccctcctttcattactctttccaatacatgattcctctatttcttttaacacacttaggtggcgttgtcttctctttgattgcaaatgaattgtattaggtaggtccctctttactcaatttcctctcatcctgttttccgttagcaagtccttttctctagaatgatgctctgaattggctccgtgtagagtctagcttcgttttttaagcttagggtctttggttatttaccctgacatctttttttgtgggctgcttagtggagggttttgcaatctcgctttctttttctctcgtggaaaactcttccctattgaacgacgtgtttcctgctgtgtagtatcatggttaacctgatttcaaaggatgttcatgtagaaactgtgaatgaggagttgaatagcactatggtgagggatagtgcaatagaaatggagctgctggagctttttgaagacattaccctggaagaggtagtggccaacaaagcttgtgcgggcaaggttgtggggtgcaaagacatgccggcatccgtggttaagaaaattctgactggtgtgtggcggagactagggccgtggaggatgaagaagtgtgaggagggtgtactcggctttttcttcgataatgaggaggattgttcgttcgtgctgcagaaaagactatggctggtaaatggagtgttacttaacattaaaccctggcctttggagggagaagtcgagcgggggagttttctgttgttcatttttgggttcaagattggtgagcttgctgaaacggacggatgcagtaagtcggaagtggttcggagagggtttctgagattatggatcgatgtttgggtagctcacccaatcccgacgggttttttcttgaaagtagatgggatgccggagtcttgggtgcagttcaagtacgaaaaactccccatgctctgttttaattgtggtaggctggcacattgggataaagtttgtcatgctccgatgacgatggtaacaccacgaacaggggaggctgtgccgttgtatgggctgtggattaaaagtgatacgggaaataccaactgttttaattcaaagggtaagggagttctcaaaatggagttcgtccctgaggaaaccccggagtgggatttgaatgcgaagaatcgtcgaggtttttggactcgaagggagtcacggaggttgacggagagacctctttcatcggagaagggggtggctggaggaagaggcccgacgacatccatgcaccagtctctggccaggggtatcgatggaaaggaaggacggtcgtacgttggtggtacaagtagtgggagggtggcaattgataccagtacgatgagtcatgctacagcaccacacgtggcagatgaaggggaccaggaggaattggcggctcctactaattatttgaatttacccaatccggactttgccaacaatcataatagagaggatttgatccctgatttgggccctaccctggcccaatgcattgaggttccacatgaatggttatgtctctcctagaaacctcactcttttcctgaagctacacctataacttggcccaataatgatgtagaagcccaaaaacttttcttgcagttatatgagccagattatttgaatttatacaaagcccaacaatctcttttatccattccccccaatttttctgagatgataaaccaccttttgggtaatagcagaaagaggaaggcccatacctggcttcatcccgtcccaaccatctcggagtttagccctccctcgactccttctaatctggtcatctctaacaatgaagaagctgcaccaaaggagactttttgtatcggagtgagtgaagaagggtcttgctctaaatataatgctcaaggaagaaaaactaaaggaagaaacaagtcatactcggttcgaagatcgtccggagtcaagactcggagtggaaggaaaaagtgcaatgtggtggaaggtcaagatatggttacaaccggaaatttggaggaaattttgaataattgtatagaagtggcaatcaccttcgaacggaattttggaagaggcgaggaggcggccgaaagcatgcccccaccgtctcaatgaggtgtttatcgtggaattgccgcggacttcgtagacccgcggcggaaagaacccttcgggggttaatcagggatagtaatgctgacatggtttttctttcggagacaaaggtggatccttattaaatggtggaagtgttgaataggcttggcttggataattcttgttgtatcccagcagtcgggctagcttgtggtttttgtgtggcttggagaacgggtgctggctgtgtgattaatgaagtttttgatacgggtttctgcgtaggaattcaaccgcctgagagttctactccttggtctctttttttgtgtttacggcacaccatacttacctttgaaaggtgcttactaggcgtggctaacttcaaaagttctggattgcaagtcaagttgggttgtgattggcgatcttaatgtgatcatgaatgcttctgaaaaggaagggggtaaacggttcaatgacaaagaaggggagctccttcgtgactttctttttgatacagggggagttgatctgggttgtgagggtggtcttgcgacttggtagaattcaaggaactctcatgggcgtattcggaagcggttggacagggcaatcgcagatgcagattggtgtattgactttccaaaagcgaaggtggttaaattccatattttgggttcggaccatgctccaatctgtcttcatactacaggggtgtaatgaccgctctagtaatttggattagtaaaggcaataagcactaatttttattattttattattatttgtgaattaatttaattgtggaccccaat

SEQ ID NO: 36171 - DNA, 2275 bp, Cannabis sativa
cggtttgttttctaccaactttgcctaccttattcaagcctttgaccgcgcccctgtgtgtgatgtcgccacagagttgtggaacaagttatgaaggtctaaagtcttggaacgttacaaggttctttggttgaatattatttctaatgctcttcctatctctgccctcctcgttaggagaatgcatattgaggtggttattgtcctctttgtggggagggtgagaaaacaatagagcatcttttcctctactacaacttttcacctttggcgatcttctccttggggagtgatgccagtttttgattctggcgctcgagtttgggattgggttaaatttttatggaatctaaaatcaaaaggggttgatgttgacaaattatttctctatgcctcgattgtggtggatacgatttggagggctcgcaacaacaaggttcactataattttttaagtaacattagacattgcattgactctatctctatctatatgtgttacacatactatgtgtcctgtttatttgcttcatcaaaaactgttgagtctcctgtttggtcccctctgcttgatgattgggtcaagatcaattgtaatgtgagagttgggtgtgaatccatgtgcgttgtggctttggctagggaccacactgagtcaattttttgggtggctacaaacatgcttaacttctatgattctcttattggagatgctgcagcctgtctattagccatggagacgaccgtttcgtttcaacacccttttgtgatagttgatagtgactctgaaacagttatcaagactctaaaggaaacctgttccaattagagaatcgataagtacgtgcatcattgtaaacatttctctaattttatgttagactgtaatttttttctattccttaagtttataatttcgcgacccataatgtagctaagtgggcttatgctaataatgttactgatatgattgatctttcttctataccagactttattctttgtaatagcctaatttttggttcttttatctataaatgctgattttcaaaaaaaaaaaaaaaaaaaaaatttggagaggtaacttaaaaaaaacaaattgataaaaccaaatttgccgccaaaaaaatttggacatggcgatcgactgtctcatccttggtaaggaaagttccaccgataacttctgtatcatctacagttatggagattttagtttggttacgaactcatcataatccttcaacactctggtttcaggcgcaggacaagaggtggggaagagctgtgttgtggtctccatcaatggaaaacgaatcatgttcgattgtggtatgcacatgggctatctcgatcatcgccgataccccgatttctctcgcatcccaaactatgatcaaggacgctcctctggctccgccttcgaccacgccattgattgcatcattatcactcatttgtaagataaaaaacttagctttcttctttccccaatttcaaattccaagtttagcataaacgtattgggattatgatgattttttgttgttttttgggttttggtagtcatttggatcacgttggcgctcttccttacttcactgaagtttgtgggtatcgtggacctatttacatgacggtaagtgtttgatgaaatgtttcactcattttttttttgggctaatttggatttttgccgctaaactttgacatataccaaattatgtcttttgaatttttcatgtcgttaaaaattcttcggaactaaactattgagattgttggaattaagtacttttgtctaattttactaaacaaaagtctgacgtggataaaaatttaggaggcacaattcggtacaatattaaagttgaggggtatgatttagtagatattaaagttcgggggcatgatttagtatatggacaattaccacattagcaaaattgaatgaaattatacagaagtctttaaatctaacaatttcaataattcgggacaatttttaacagcttgaaaagttcgggagacaaaaatcctaattagtctttttttttttttttcgcgtattcgttcttattggtaatatttgactggaattaagaactatagttttattgattcagtatccaacaaaggcattgtctccactcatgttggaggattatcgaaaagtaatggttgagaggagaggtgaggaggaacaatttacctctgatcatatagcggaatgtatgaagaaaggtacagaatgttccttgtacttttatttagt

SEQ ID NO: 36172 - DNA, 983 bp, Cannabis sativa
tttttaacttttgtttttttaactatttgcaacaaatttaaagttttagtagtttcgccataaattttccttactaaaaagaatttctttttataattttttttttctttttaataggtacatagcttcattaatccaactaattattcattttcatcattcaaatctaataaattatctagctagtaaaaaatcatgaactctcttcaatatggagctcatttaaaattcaaaatgtgtttttaccaaatataaactaacaattctaacaaaaatataataattaaacaacaaaaaatcaatattcaaaataatgaaccattaattaatacaaaagtaaaatatgtacaacaaaatttagctaagtgtttgattattcaaaaatcttaaaattttattctttatttttctaagtgcatatctctaactattttatgttaatcgtaattttgtatcaataaaacatataaattaactcgtagacaataaattttatcatttcttaatcattttgattttttaaaatctaaaaaaaacatagcaaaacataaatataagctagaatattaataataatctttactcatattataattagagtaattaataggctaattatagcttttaataaaatacaacaaaattaaagatttttggataaatgatataattaataatgttatagcttctagaagccttaattgatgagagatatatagaggtcttctagatggaaaatttggtataaaaaatatgggtattttatataatgaaatgtgtaaaattccactccataaattgaggttgagtggtctatttcttgaatctttaattggatctttctttgtaatatcttacgtgtgaaatttcaatcttatcataccctaaaacaaaaacatattaaaaatatattttaaaactatataaaatttatgtgtggacccaataaataaataatgtttcacttttcaacaagtcttctt

SEQ ID NO: 36173 - DNA, 3719 bp, Cannabis sativa
agtatttttgttaaaaaatggcaaaagtcaatatactatgtaaataggtccattgaaccccatttcaagtttctagatctcactacagacacattgaaccaattaactgatatgaaatcccaactttcaatgaccattttcaaattgttataaaatgagaaatgttgaaggagatttgggaatatttgggaattaaaggtggcgtttggttggaggtaataaaatagaatgaaaacaattttcatttcattcttttgtttggttgcacattaaagtattggagtgtcattctaatggaatgacttttctacaattttggtggaataactattctattttaaaatgaaaggaaagaccattccattgcatgacaagaaaaaaattaataattcttttatcaatttttttatgcattttaaaatttattctattctcatttctattcctatgttttcattcctcataaccaaacaccacctaaaagtctagagaaggataaaagaaggttcaccatttaggagaagggaagcgtgttcgtaacattattgcgattaaggcggaatctcttctaactaaccttgagctgccttattccaatacctagtatcgctattattacaaaaactaatcaagtctcctatttctaagtttttatgatcaacaaaatccttccatctagggccacatatctgatcatacaaagtacttttcttattcctatcgttaaattctaccatttctccatcaatttcgaaattttcagcaatattttcctctaaataagtatttcgaaccactttaacatgtaattgaatttatcttctgtccaatttaaacagtctaaaacttttaagagaggtccatgattgaatttattaacatgtaattcttttgtttgttgtgtttggtgattgtctgattgatgatgttttttctctttataaataaaaaaaaatgattgggaaaagaaatttaattgttggtctatgcaccctcgatacaaaatgtgcattccaaaattgacaaatctcaaaactttcagtttgagataaatatactaagtcgtacaacaagtgaaacaactacttagcactcgatcttttcgactttcctcttttcgcaaatttgccaccttttttaccccggctgttattcttgcccttcagataagaaatttgcgttgccttcttatgtctctcctttctaacttggtcaagatctttgatttcggaacgtacatgagcattaggcacgtggttctggtttcgcttacccttaaattttctgttatcaccttgtgatcgccctgcaaaagatcgtcctgcatagccatgtccacaatcattgagtaaataatttcttcaatcaaattttaaacagtaacaattttgaaccgacttccacaaaaaatgtaatgaatcgaaacaagcatccactcgagaattttaccagggcgttcatcagtattctcttcaccacctctaaaagatattttattgtgtgaatgttctttccatttcttgtatatcccagttttgttagcttttactcttgcaccactttctgtctttacctacacacacataaagagaagagttaagttaagcattccctacaagggcttgtattgtattaattgatctattttataaggccaaacaaccagccaataaatccatagcagtaaaaatccttgtgtaaatcttttttggcaaaaatccctatacaataatttagcagcaaaaatctctttgaggtcattttgttacaatgttagtccctttgttgttaccatttcagggactaatgctgcataaaatttaacgattcaagtgaactatataagtgcaacaaaatgaactacatagggatttttaccataaaaaaatttacataaggatttgggtgcaacaaagtgaaccatgtagggatttttgccacaaatttcccttcttgcatgagaaagagttcaactacgagcagataacaaactacggacggaatgatggtacaaacaacaaataacagtgttgggagagatgtttctccttatatgtatttaccaatattaaaataggagttcaaaaattaccttcccactagctgtaacacggtcaccactatttaatttgatgtactttttactccgctgccaccaaaatgataatgaggttaggggaaattgttcggataattatatgatcataatgaaacatttttagatgccgaattaatgaaaccataagtgatctatataccctgtcccagtgatacacagatttttgtctctgcattcctgcagtatcatcggcaactaaatctaaaaccgccgcttcaaacctaaaagataaaaatggtttagttcagtcccagccactacagcatatagcaaccagcaagacagagaaataggcaaaaagataatacaatcagtgagaaatctgcaattgcactctcctgaaaatgagcataagatttacctatttgaaccaaattcctggttagctccaacagagagtcctgactctgaaatctgaaataataaagaacatataaatcagatgcttattcagatagaaaagaaaaaaaaatccgggacggggtggagattctacttcttgacatgacaatacatttgcatattgaaatgaaatttaatgggaagtttgtacccgttttacttacatgattagtcggtatagaacttataaagaactcttcatccttgaagtttctttctttccttttcgaaccagcttctaacaatcagggacaaaaaacattcaaacgtttagattgctttgaaacaaacctcacttttgaaggacatgtagagagaaaaaaaataccaaataatagagttttactaaaaccagataaaatgcatgcggttaaacttaaagaaaaaagttagatgacaaaagtcaaacctttattatcctttcccatcacagaagctctgtcatcttctatttcctgcgaccaagagatttaaggtaatttcttaagagcaacactattaactgaaatcaaaactctaactggtgtttggtatgtgggtttgggttcttgggaatgggaatgttaaaccaaacctacatttggtataattttagtggagggcttatgattaagttggctccctttttaagtttatttttggggtaatcttaaactctttaaatacttgagtgtgagattcccttaacctcagcccctctcaactaaacccaccaagtaaaactcttacaccaaacaccccataaatgagattagctaatataattgttctaatcaattgtggtgattaatttaataaagtcaaaagaccccataaatgagattagctaatataattgttctaatcaattgtggtgattaatttaataaagtcaaaagaaagcttttacagcacaatattgtgagattaccttctctgcaatagtattagaacgctgctgttgaaccaagttaattatctgctcatgaatagctctttttttcttcatcacatcagtccattgactagaggaaccctgcaaacaaaccagaaaaagcaatatgcattgaatagatataattaccccactgaatgaaaacattgttctagagagagacttaaaatcagaaagctagtcacttcagaaaaagagaaaaacaggaaaatttgaaaacacaaatgatcgattcagagagtatagaagttacctgtaaatgct

SEQ ID NO: 36174 - DNA, 1986 bp, Cannabis sativa
atatattccacgatatagatacactatgaattatccatttgttataatcccaataattaatgatcctctatagatgatttacattgactagggacaaatttaccagtacacccttcaatgtattttatccttaaaacatttagtgttgtgaaaaattgtatacgcaagtacacgcaatcgtcaacaagtaataaagtgataagttgagtatcgtctccatagggattgaaaattggaaattaatttacaaaactaattactcacaaattagtttcaacaaaataaaataaagtgatgagaatatgtgcaaaattaacaaacacaaactatgaagaaaataagctagaactatcaaattggcctaaatatgtaaagttgatataatggtgcaaatgagtattgttataaattgatgatgtcgactaggaatttaaaatgtcattatcctttttccaaagtgtttatggtttgattctcaaattaattaacatatcgatatgcccaattaattttaagaatactaatttaaacacaattccttcaagtcatacaaggtaaataacatattcctatgccatttacaaatcacaaggtaagacttcatgttggcaagctccgaagtaagaagattgacttgaagccgttgtggttccagctccattcttgggtaagggaaaatacctggagcctgtagcacttatggagatcacttccgaaacccaacttcacgggaataaaagagctcaggacgtatatgaaaagtggaaactcccccttccacgagaaaaaccatctctgagctagcgttccatgggcagcattccgaaatgggtaatcaactgctaagggtacgcagaaaatacaaagatcctgatccgagaatgagaaatgggagtctgcggatgccccccaaatcaactgctaagggtacgcagaaaataccaagatcccgatccgggaatgagaaatgagaaatggcgaagatatgaagtgttggttattggaaccatacacttcgaataatctaacatagacaactcttaaagaagcctagcaaaataaaagtaaaagctccaaaagaaaatggtaaaagactactattattacaaccagcccctacagtcagggtaaagttagttgtctccgcaaatcaaaagaagtagaaagggggaggaatgtaaaaaaccaacaacaacaaaagaataattgttgcatatcctggatggtcaatgatgggtacttctagatgggttggaagactctaccccaggcatcggctccacagtctccctgaagaggttgtggacgacactcccgtatgaggcgagtctgctgggcatagtttgcttccaacagttggttttccttcttcaagccctcgacttgaagcttggccttaacaagttcagcaaaaaggatgtcattggcattacgcaggtcgcgattgtccttcttgacctactccagctccgtgactagtgcaccagcttctctagcagccctctctggcaacaaagccacctgctgcaataagcaaaataaaaaaaaaaagttgaatacaatgatagagattcagaactttaccccaactgcttgttgcttggcggcatgggctaaggcaaaggcatcgacaatactgcatgttgcccaagtttccaggggcaactcggaagcattaccagttacccagtctaagagttcgactgtaaatggtgcagcttcactccccaccttgggagccagacagttctccaaagcctccacttcaactgttgtcctagttgcggttaaggcatgaaggccttccgagatttcggccttcctcacagccgaaaacacgttggcccgcctgcgtaaaaatcccttctctacttccagacgctccccccaaagcttttttttttgtattcattaataaaaaatactctcatattatatttcattaaaatgtacatacttttttgagtgagttgcctaatatattcc

SEQ ID NO: 36175 - DNA, 6506 bp, Cannabis sativa
actcagggccggccctgtatatttcagtggagaatattaaaaaaaaggttcataaaaattttacctcattggtttgaaagtatgtaccattcaatggaaaacatcctttagttgctgttcgacaaggtatctgttttaatcattgtttgaaatgttaatccatgttcattaatatgaaaagttatagatgagattgtagagatgtactcaccaaaattgaacctgggatggtctccacatttccttgctgagaatttgtgtttgaagtggatggctgtgatgagtttacaatttcatctaaaagaaagaaaaagataaaaactgatttaacaacatcttatttcatacaatttcgaccatacacataaatttacattgtgaaactgtagattcaatgtgattattttgctaattttacgatttcaaattgttagtttgacaaatttctcacctggagtccatatggcaagaaggtatggagtaggatcattgttatctcgcttgtctagctgcaaacccgaaaaagaacatagaaagctcaagttaaaagacataaaaccttgaagattttcctttcatggaggaagaatggataatgtagtttacccctactaaaagtggatgtgaatctggaagttcatagctgcattaaacagacaaaaaaaacaatgcaatgattagaattttaaacactggattataccaaacatatttgcaatgtggttagttacttacactaagtgctttgttcttaaacggctggtagatttcaatttcgggacagagtagttagtaaattcatgtggcaaaacaaccaaagctcttgattcttctttgtctccatatattatcttattcatgtccatataattataaagtggatcttggctgatttcattacagagattgagtgtaggaatatcatcatcatcatcatcatagtcgtcgtcattgtcgtcgtcattgtcgttgtcattgtcttcttcattgtaaaagaaataatcttcgatatcaattaattcttcgatttgtggaggttcaggctctggtgatgcaggctctggtgatgcaggctcttcaatgataggtttacaaatctgatctgattttgaaaactgattggtttcaagaactaatggtggtgatggtaatgtgaggttgaggccgaggctgaggccgagggtgctattggcagccgctgttggagatgttgagctcgctttttctttctctttgggccttggcagggcatgccttgcactgcaagcaaagtaagattttcgtgattttgaaagtaagatttgcagacacacaaaaaaaagtgatacataccttgcatatgcactagcatagtgtctacactctgctctcattggacaagcattgcagtttggatttctctttgtgcaataaacctgcaaaagattacataaaattgatgaattttggagtcattttgatgtttttaaagacacatttcaacaagagtttgatttttcacctttccaaatgttataagatgataatgtagttgatatctgtgtaagaaaattaaacgctatcagaacaagaattagtaaaggttaaatagaaaggcaaatttgatgaaaattacagtgtttgttggtccatggtttgtagtcttggccagagatacttctgaatcgaatccatcaccggtaacctacatgaaaatgaccatagattacttaaactcattctctatggagataaagttacgtctttatgctcaaattttatgttattgtacttactcctgtaagagatgtatctgaacctcctcaggtaatggttcaagaggaacccaccctaggcgaacggctattcgaccaacatttgtatccaccttttcgaaagaaagaaaaatcaccaatttcatgaatgtctagtagttcatcatagtaaattatttaaattaaactgaggtgctgaagcataccgggaaggctacatgctgaagtgcgagtaggcgaatacactccacactttttaaaccaagtccatggaattctaagaggtattccctgcaaagcatcaatgactaaaactcagaaacttgaataacattcaagtgtacagtttttaagagcaaaaaacttaattcatgcttacttcactttcaatggaggggcatgtcttagccattctaagtcaagttccccatgtagtttaagaactcgattaagaaattcctgcaaaatattacccacataacaatcacatctcacaaaatgagagcttaaaagttctcaacaaaaaaatttgtaccttgattcgtaaggcaatgatattatgctggccgcgttcctcgatagcatgtgctatgtcctcaggctccgccagccttacaacattccaatccacagaatccttacgacgactatctcttggcccgtcaacatggtattttttcttgagttcatcccaatcagttccattatgatcaccttccttcttttctccctctaagttcttacaatatctctttgccattgcctcccagtcaatgacagcttttttctttttcatctctatcttattctcatcggtaggtagcatgacaccttgttcttgtaccgtttcatcagctaagctcccgggctcattgttggcgataattttatcagaaagttgctgtgaaccttctaaaatttttcctcttgttgtattctcactactactttcatatgaggaggaaaatctcgcaacaagtgacatgaaggcagagctgtagagaacaaaagtagaggatcatatgaaatcttatgatatatttataaatgtaaaatctacttattgtcaaaaacaagtacctagaaagattgtctgagacattctgagttaagaaaactccaaccgcagagtcaattactgaacctttccactctgaaaatgtcctatcacctgctcagattacaaattaagcagtaagataaataaaatctccataccattaagtatgagtagttgagatgtacctaaaattaaatgcaatttagcaataaatgcaccaatacgttcgcgaaatactcttctttcatcctcccacattctctcattttcttcacccaacctactcaagtttttcagttgaagcttccaagaattgacccccttagcgtgcaattcaagcaagagttgtttcttcttttttttgacaacagtaagttctccctgaaaagcattcttagagtgaagaacgatcgcactttccttttctatttttctcggtgcaagtcctgtgtaagggactattgcaccaccatgctcataatgaaaaacatttgtgcctcggttttccatcataaatccctgattaaaaaccaacgggccatccccatattgagcattattttgtgggaggttgtaatgatgttggtgcatgtttcccatagagcagcagctatttggacttggcaaaaattgagaaatcatgctgcttgttgcttcaaatgtacctgcatctaatcacaaagattatataacaaagattcatacttctcaattgggtagcaataagaaatcccttaaactcactaaaacatatttcactcattccactatcaaacttctcatccaaaaaacaagaataccatatttaacatcttaaactaatatagaaaagattagtaggtttttgttaccatctaaaatctcagattgtggagaaggtgacatctcagcaatattttgtgtgttatttgtgtcattatctcctgaaaattattgtcattagcaacataaaccaattttactgaggcattttcttcttggaaataacataaggaaaaaagacttaatatcaaagtaacctcttatattaggagtgactgaactactaaaatgagtcaacaatgaagtaacttcactaagacttgtttgaaactctaaattatcagagagagccatcacagttggtggtatagtcctgaacttctccttaaagtctgcaagtaagaattaagcctcttaaaataagggaaaaaacaaagaacaaaaaacataatgcaaaaggtgaattacctttccacaagttgtcttccaatatactacgtccactttctttgttaaagtcacagttgaaaaggggaaaaggttccaattccaactcattcttagtttctattgttatttgtttatgtttagcttcctttcttcgaaaactctttctatattgtcttctacgctgctttgatctctttccttttgtcttaaagaataaatgaaaaattgttgaaggcattttgttgcattgaattatctcgggtttcaaacttctttgtcccttcgagatgtttacaatggctaaactttcttcaatcttctcttccttatcgaagtccaaaaattttcttctagacacactagcatcattaacagcttcagcactagtctcatccactttttccttgtcacattctgatgtaatcttgtttttgatgtttttcttgttctttactacgttcttggtaccactgacacgctttggcgtaataggtttcggtgtgtgtggtttcaagggagtaccctttgaaggtgtacgccttagcttgcttgttcccaccaccttcggtctatgtatcttcttcttcttcttcttttttggtttcttagctggggttttttccaactcagagtcatttcctctttttttcgggttagacaaattgttgctttcttcattctctttatctgtataaactgaaaaaactgtattaactgtcatgaattctatccagcattatcatgtaacaaaaagtaagaaagagaaaagaccatgttagctgttattattggtaatgatttaaataaacttgtctcggccattttacacacaaaatccagactccaataatacacatatatgtgactaatgcagctaaattgaaggttatcaataattcaatttaaaaaactataaataaatgaaaagaaaaagtatattatatacaaactggttaagtggtaccttatttgttccaaagtccaaatcctattattatgaattgaaataagctataaccattttaaaatgtgctataaatgatacttttagggtgcccaacacctgatgatttagcctttgggtcttatagatttcatttgaaattaaagagtaatgattttcacattcaattacattcaaattacatatttaaacacaatgatctgtaatttcaatcttaatccttaatatgtgtgtgcaatatactgacctaatattacaccaatatgacacatgctaacctgttattacacaatataatgtgtattaaatattaatgtggtccagggaccattcaaattaattacatgtcattgtgtaaaatttgtgtgtgcaatttgagtgtttctaaataattattctatattatttagggttcttaataggtcaaatttttaataagaatattcacctggaaaaattgggttggaagatacctctggcgtcaaaccagtagtcagaattggggaactagacaaatctgaacattaaaagaaacaaaaagaaaaattaccaaacaagaaaagaaaatacttaaacagaatttagagtaaaaattggaaccttgaggagtttgagtgttgtccaatggtgattcttttccattgtttaattcacacaaagcctcattcaagtctggtaccaccatacccaattcctcactgtttttcttctctcttctcatatatgttataggctttaatggagtgtttatgatctccattattaaataatgattgttgtaaattgtaatcactgaatcaatcaaacaaaaaatctaaaattaattgaaactgatcgcatgcaatcaaaacagagtaaaaatctgaaaaacagaggaatttaacacatgcatttactcaaacacttaatcatctaaaagaaaataattatataacaggcttcaaatttttttttctcggattgaaaacaagccaatacctaatttatatattaaaattgttttgtaccaaattatgaaaatttcattgtaacggtgtaaaaattcaaatgtgaaaaatgttatcaaaataaaaagtgagattgatattaccaaaattaattgaagagagagcttcagtcactccatcaccgccgtcagagaaagaatgagatgatttttaggctattatttccaaattcagattatataatattaaattaaattaaatagaataaaaaataataattaaattaaatatctagtatattctctttttttttattctgttaaatttaaatgcaatttaaatctatggttagttttataaaatataaattaaacccctaaaatataaattaaacccttcaaaaccctgtgaactacccaaaacaactactctcccaagccctcgagtacaccatcacttctctccatgaaaatggtatcgctccagaaatcatccagattgctaaaattattcttaacctcactgcctctctccaaggtcactattatctctttttctctttcaaattc

SEQ ID NO: 36176 - DNA, 2188 bp, Cannabis sativa
  modified_base (1927)..(1927): a, c, t, g, unknown or other
aaggcttgtatgcaacttgcaaagagacttgtttcaaacaaaaagtgtatgcatccaaagttgatgcaataatagtacttttatttttctttttttatcataattttcttaaagtatattgtcaataacttttttttgttcttctttagtcttggtgaataaacaagtgacatagaagcaaattaaatgtcatcttcaagctctcattcaccatgtgctgcatgcaagtttttaagaaggaaatgcactctagagtgtgtatttgcaccatacttccctcctgatcaaccacaaaagtttgcatgtgtccataaggtttatggcgcgagtaatgtggccaagatcctcaacgagctcgcggtagctcaccgtgaggaagctgtggtctccctagcctacgaggcacaagctcgtatacgtgatccagtctacggttgtgtaggtttcatctctgtcctacacaaccgcctcaaacaagtccagaccgagcttcactcggccaggaaagagcttgaggcctacattggccctcaagcaatgatgataccatcctatagcctctccccaatgccacccatgttgggaattcccacaaatattcccaatatgggccggcaacaccaacagttcatgattcaagatccaaccaataataataataatcatcatttgcaacatccaatttttgttgacaacaatgctgctcatcaacaacatcaaatgaggttcaacaataataatggctttgatcacatgggagtgactgcttcaattggagacataggagttggcattggctgcggatttaataataatcaaatgagcagtagtggcggcggtggtggtggtggcggcggtggtagtggctctcctagtgctgttggtggtggtggtggtgttatgtctcctactttaagtctacaaggaagctttaataataacattttcaatagtactactcagatgcaaccacaccaaacaaccgtactaaatcacaattctcttgactatcaacttcaatcacagctcttgctccaatctcaacacaattcagaagctgaggagagttgagcttaattatatagctattttttttataatgtttatacttaattagtattatttctttgcaatatttttcattcattcatatattttttttttcatttatttacaattaattatcatattcatttaatttattctttaaggtttgatgaatatatatctttttggatgaaataattgaagaccatatattatatattggatagttttatagtgcactacatacgggtttatcgatgcacccctttatgttttgacatctaagaaaattttttattctcaattttgtcatgatcgtctatgctgtagttatttaagcatcctgtaaaattttgagagattcgaaaataaggttcaaaaagttaattgtacacgaggctcttttattttatacgcgtgtgaaatagactgtttaataattttgcaggatgccttaaataactacaatgtagacgaccatgaaaaaaattagactaaaaaattcaaatatcgaaataaatagagggtacatcagtagactccttttaagaatgtgtattgtaaaaattttctatattagttatatatgtagccagaaacaccaaaacatattttatttataaccctatatatgatatgatcacatacccctaatagttattatttttatgttgttgtaatatattaggttttcaaaccaaatgagtcctactaatgactatcttccaataaaaattggaaaataacaatcccattgtttaaataataatcaaaaaaatgataagaccagttaagacactcagggctcatttgatacgtcatattgtattgtattgtattgtattatgttggattgtatagtattgtattagtattattnaatacaatactatgtttggtatttacttttattaataggttgtgtaaagttacgatatattttcaataaactcgactacaacactgactctaggtcgggtccaatagtctggggtccgagtcgggtctgggttctgggttcgattctattccagtccggtccaggtcccaggtcgagtcacgatctgggatacagatccaggctgggtccagggttcgagattcgattcgtgtaacgctctatcccataaggacgccacat

SEQ ID NO: 36177 - DNA, 1025 bp, Cannabis sativa
tcttgcaaagagaccatactatctgttttaatctcgacttgctcccaatgtatttttaatccaatttagggcatccttaatagctaatgcttcaattacttcagtagcaaaattagcaaaattaccaccatagcagttagcccgtgcttaataaaactaccaaaatggtcacgaacaacaatgtcaaaaccatactttttctctccttcaaagagtgttgcatccacatttatcttgattgtgttttctttcaatttagaccaaaactcagaagcattagcctagttaccgagacacaaagatggtggagagattttattttgagctttcttccattgattaaaagctactttagtagatgcaagaatttttgtaacaggataattaattgtttgcttccaaacgacattgttcctcgctttccacattacccaacaggtcatggcaatgttacacactagatcagctgaagttgttttaaacaaaagctccaaccaactctcaaaaccaccaccaggatcgaaaacaaataaaaatctaaaattacaccaacaagcaagggcaaatggacaaaaaatgagagcatggctagtagatttagattggaaattgcacacttgacaaataggagaaatctccacatgctttgtgacaagatgaaggcaagtagggagacaattggtgacagctctccatagaaaattcttgaccttagagggaatattcaaatgccaaagatgaagccagaaacatgaagtacctttgtccacctaattatcattttgatcttaaagaagtttataggtacttttaattgaaaactcacattaatattctcccaaccaataccatgtattaggggtgggcatcatccaatccaatccaattgaaccgaaccgatccaatccaattcaatctaatccaattactacaagtaactacatcaaaaacctctaatcctgacgacaaaaagttggatatccaattacaattagattggattggatgctaaaagttggattcta

SEQ ID NO: 36178 - DNA, 1427 bp, Cannabis sativa
  modified_base (79)..(84): a, c, t, g, unknown or other
  modified_base (700)..(708): a, c, t, g, unknown or other
tggtacaatgtttaaaaaaagaggtaaaaatgatagattttaaaaaagaaggtaaaagtaaaagaggacaatataaaannnnnntagagtgtaatttcctcaaattatcaatacagatgtgtatcttacccaaactaaagagtgtaattgaatttttgaagtcatgaaactgtcacgcccaaccaaactaactacatacctaccattaattcccacacttgttgtcaacctcgtagctgcatgcgtcggatgcctgactttgaatgcgttctccagcccaccctaccctgacggcctcaggcttcaggccataccattccaacaaactttttcagagaaacaatacccaaccaacgagtttgtgggtaaatatgccactttttaagtttttttttctttgcaacactattaatcgtttggactcaaaaatagcatgttcataaaaagattacaataattcacatgtaaattgtacgagtgacgagaaaaattgtatttcatttaatattaaaaattaatgaatgttattattcaaattagatagtgatttttgtaaataaaatttattttaggtaaaaaagtggtataaatctttaattaaaaaatttagtgatacaaatattaatggaaaatttatatggtatactaacttttgctatttctttacaaaaatactatcaggcggtattttttacttttnnnnnnnnnttttttataagtttcatactgtagtatactatgttaagttttcactggtgttttattgttgttttgagttgttctgttttgtgttttactggtgttttacaaaaatacagtatttttgaaaactttgcagcatgacagtatttttgtaaaagttaactaaaattccagtatttttgtaaatttcccatattaattggtagtagtaggccccggggaaagtgtgcaagtgttaattgtgtggtaagactcgtcactcactcgtccatctatacaacacttaagcatttcgtgtctttattttgtggttgaaattaacttacttacttttaggacagctagccaatatgcaacacccccacaacatatccacttcttttattgcttcaaaatttcaatccatttccatcttcaccactcaaatgcctgctacccctctcttcttcttcttcttcttcttctttccacacctttaattaaaaataaaaaataaatattcagttgagagtactaactaattagacatgtcactagctccatcacttccccgctttaactctccatttctttcttgccctcttaagctttccacaactactactcccaccacttcttatttttcttcccaaaaattatccagaaataataatcaacgctcaccaccgtcttatccatgcattagggctttggatctcgatcaaaacacggtactactactactt

SEQ ID NO: 36179 - DNA, 1379 bp, Cannabis sativa
ttactaattagcctaaaataaattctttaaattttattttcagtactttaaactattacgaatttattctagaaaaatttctagtgctgattgtgaaattcttatagaaaaaacagtatagtggattgagttaagagtactcgaaacatacatgtcttatacaatagggagagtggtatttgtaaagtcagtattgatgacaattcatttttattggacacaagttatgatcttcccaaataagattttaaatagaattgagcaattttgcatggcttctttatggggagaaaatgttaaacaccacagactaggtggtatcttttgggataaagtgtgcaagccaaagaaagaggtggattttcattgcactgtgaactcaaattttgtggctatagggaagcatgttggtgggattataaagcccatcaagtcaaaatcatgctaaaagagtactgcaccaataagcaatttgagcaattgaattactctatcaaggaggtttgtgacctttcttccgatattactcctgctcggaattggtatgcttcaaatgtttggatgagatataatgtgctaaaacacatttattataacctggttagctgcttggcatagattgaacacaagggatataagttaagctctcatggtttactaccttgtaattgtttcatgttgttaactggtgtgtacagtttttgaattaatggaattcttatttactaaagaattaaaaaactattaagaattttttaaaaatttaccaaattaattcattagataactaaaagtatattgtcatattaatatattgaaattagaactatttgaatgtcaaaaatatgaataaattgtatggaatttagattttagtatcaagtgagtgagcttataaacgggtgacaaactagttgagaaattagacaatttgcgcttgtctttttggagagaaaaatttaaggagggcaaaagaaacgtggtcgttttggagagatatcatatattagttattgcttgcttcttaaaggagggagggcaaaagaaacgtggtcgttttgaaacgttatgatacctaagaaagagattatattagagtggtcccagtggatagagaagttaattggttttcaccgtctttcggtgagaatataaagagaatggggtccataaatatcctttattttaagaaatatgttttgattcacagaacatgggccatggggcactcttttaaagtttggtctcactcactcgtggcccactactcttaatccacctcatttttcaagtcttcacttctctactctacggtttcaattaaatcttttttaactaataataataatacaagaataaaaatggaataattacataag

SEQ ID NO: 36180 - DNA, 1373 bp, Cannabis sativa
aataaaagttttgtttcacttttatgtacttttttttttattactggctttgcaaaaagcaccaaacacgaaagcaaaacagagcattgaagtccgaccgaacaagaccggccaagaacaaccgctaggccccaaaggaccaacataacaagaaagcaacaaacaaaagaacacaaactaacaaaagtaaagagaacagaccaaaacataagacacataaataaacgaaagcaaacaaacagccatctgctcaagaaaaaagcagggaactgtcaaaattggacagatcgataatcccaaactggtttgtatcgagtgcccacttggctaccttgtgcgccacaccattgttccttcgagggatccaagaggcctcccatagtccaagaagattggctgagtccagaaacaaacagaccaggtcctggacattgtgatgcaaagagattgaacggtcttgcaatttcgtgcagcaaaccgaattgactgcttccaccgaatcactcaggaagacaacattagtaatgcccatcctcctagctgattccgcaccccagactaatgcagctacttcccctgacaatgaatcggagtaggagaagcatttagtacagacatgaaatattataccttgatcattcctgaaaatagcatccccagcagacatgttgtccccaattgcgatatcagtgttgcaaaaagtccacccaggtgggggctgcaacaaagagtggttcagagagttctctaaggagcagagattgggcatctccataagccttctgttagtatggacgagaacaacagacatcggagtatcttttgcattgtgaattttattgtttcgttccctccatattttctcaaagatgattgcagcaccttcaagaaaggcattgtaattgagtccccttggacgattagcatccgtcttgaaccatgtcaaccaagcatcccagtgtaggaggcctgggggatcagttctcaaatgccagatacaaccaaaccacaaggcccttgcatagtgacagttccagaagagatgaaatgaatcttctacaaccgaagaacacataggacattcggtatcccgaatggagaacatggagctgagcttactttgggtgaggagattgttggatagaatcttccaccataacatcttaagtctactatgaatattgggcccccagataattctccacttagcatcattagtatcattaaccttcacgtttttaactaccctataagcagatttgatagagaatttaccattatgctccggaagccaaatccaggaatctggagatgggatactaggaagcatgatgttaagaattcttttagcgtcatcatgatcaaaccatctc

SEQ ID NO: 36181 - DNA, 3222 bp, Cannabis sativa
aaattgtcaggaatatcaggcccaattcgctcataattaattaacaatattcgtttgatgagtgcacatatttttccagtagttttaattttcatatagacaataaatagtacggcgttatcataatctcagaaatgtatggagataattaaagaaaacatggactaataattatatggaatatatataaagagaaggaaaaaaaaaaatgaataggcacgcagagacataaactcacttttaagagtttactacatatattcaaaacaatgaagggctttttctttgggcggtcgataaggaaagagagggttggaaaatggtctggtcgtctatgtcttatttttgtgtactatggtcggctagcgctacgatggtattcaaactacgtagccaataaccctatatgccaaaaatttgtctttacatgtggacacgtatcacaccatccaaattatatcttttcaattacaataaatttacatgatcatgattaatgattattagctttttgtgctatataccatgtattgatattactattgtaccaaataaaggacaatactggggcgtgagtcatcatcatatgcaagaaaaaaacaaagacgtataaatgatgtatggcttacgtaactgatgaggctttgaccttctaagtttctattcggcaagtatagagatagagtgatggaattaatgaaggctctctttgtagctactcagtttcatttgtggttgttgtgtgtttctctcgttagtttagttgaccatttatataaatttattatacagctgcagctatacatacttgcacttgttcattcattaattacactgaacatatataacaatggatgcattattcgatcaaagtaaaaagaaaaaaaaaacagagactattcatttataattgacatcatacacatgcatgtatgcaccgtcaataatataaattaatattgaacacgcaatcgaacaaaaatattatagagatctagaaaagaagaaaaaattatgatgaattaataacgatttaaatgtgataaatattacatgtgtggagtagagactgaagcagtgtaacacatacacatacttatatatataaagattaaagagatatgttagagacgtgtggagaaagacattcattggagacatttaggattatatatggtgtggcgcgacgatcatgccataaataaaaacaaaagggacccgctttttgagacaaattaaagaggttttcttttctttttgatattgaactcatcattcttaataagtccaaagccgaaaacattcaacgagacgatatcgaattaggaccatatatatatatggtattattatgaacttttgcttgctagctatatagctagctatcatgattgctaaaaagctatacattaaccatttcctgaaaaagatgtacatatatgccacattattatagtgcaactcagttgaattcgtacgtagccgaaatttgaaagtaatttttgaatttgcttccattttggtaaagtagtggatcatcgtttaagtcaaaaattattaactatagctaattaatagtactcccatggcttgtgttggcctcaggatatcgtgctttcaagtttgaaaataaaaatgatcgatcatcattatattttactaattatggtactttttgttgaaaattatatatattattgactatatattgatgttgccctttattcaaaataagaagtacaaaccaggaaattaactaaaaatatatttggtgctacttataaattataatgttatgcggactttgttacagaacttttattagaattagtcttatattattgtgtagaaataaattgtaatatataagatgaataagttattttttcattgctaattggttttgacataaaaactcattcatcttattcccaaattctaacaacctttgttacctatatatataggctataattgaatatcattaaaattttatttttcaataaaagtggagactaactatacataattgtaaggaaaattataattgaaaatacatgtgcgaatttcattaacagtaaactagataggaaaaaaaaaagaaaaaaaaaaagtaaggaatctttttcatgtaaagagctttttcttttagaaaggatctcttagtttgaatgcaaaaaaatcaaattcacaccttgttaaaaaatatataacaataagattttttctaaaagtgctaggagagaaaagatgtcattgcggaatatggcgatatatctaataacagtacaactattgtactttatatctcatgatattgggtaatcattattgtaaaaagaccaaagatatcatatatatgtgtatatatgttgttccctaatctaagtcttcagtcaaaaagggaccaaaaggcaactggatataagaccccacctctcccgccccctctttcgtttggttccctcatttggtaaccggatcaagtggtcaacaagttacatcacaaaaccctttaaggccccacaaactgtattattgagtccacgtgtctccagtatgaggtaattaacattaggttcctggtttgacattggggtattaaataataggataaaagagccaaaccaagcacaagacccatgccaaaaattttaataaaaagaaacactgccttttatttttaaagtggtcccctaacaagggtcaccgctcttgtcttgacacgtatggtattggtttcgtcaaactcacattacaatgataataggccctccatgcaaaattattactttattatacgtgaaagggaccaatagccacacaagtagaagtacacgtgtcagtacttatatacaaatctccggcttgttacgccggaaccaatgaactagtattgtcggattccgagaaaccttacatttttttcctacgtttccgtaaactagatatatatataatattgctagtcaccttttgcgattgtttagcgatattctctaaaaactattatattaaattatatgggacataatacttagttggaccaataacgatatttacacgtaaaaaggtgttaggcaccaatactactctttaacatttctcatatttatatattgtgttccttacaaagaatatatatattgtgtttaattattttgtaagggtgtctatttcttgcatcaaatagaaatattaacgcgcgtttctcaaaaaaaa

SEQ ID NO: 36182 - DNA, 1341 bp, Cannabis sativa
tatatatatatgtttattagtcaatctcaagaaggagaccaacactgagtatgtacccatttttatcgcttatatataggatccagagtagaatggtacgtacattttgtattttttggaaagattaattaattgctacccacacacaaattaggaccactcaatggactagctatagagttactataaatatatataactttcttattactagattttattatgagttcgattactacaatttgtaacaaatagttaattgtatttatcatacataattgttttcacgcatacaataactgcttaaatagtttaaaacagaagatacatataaaaataaataacacattaaattatatgcgtatcaacaatctgcaaagatttattaatctataagacttatttaaacgattacaaaaccattgtaatcttaaacttctaattaaaagttgtgaagcattaagatcttgaacacaatgcctacactttttctatcgaaaagtatctcacaaataaaatttctcctgaaacttgatgaacatgctcatgtaccattacaagaaatgtcacttttaccagtgtgctaaaaaagtaacttttaccagcacatttcgcaaactgtattggtaaagtggtcaaaattttactagcgtacatttacagtggctaaaatctaacttttaccagcgcatttacgcgctggaaaaagtcattttcgccagcgcttttcattttatgctggcaaaaattgtaataccaacattgatttgccaacccctttttgtcaacacatcacaagtaaattctattttaccagtgcaatactaacttttgccagcacattttatgctggcaaaagtgacatttcttgtagtatgtgtgtatttaacatgtgtacaattagcacaaggaaaaaaattaagggttaaatgaacattagaaatggttaaatgaacatgacatttgtgaaaaaaaagataagttcttaaataaaatggcaaaattgaaatcttgtaaggcacattaagggttcggccaagaagttcaattaagagccactattttatcttttttaattctatttatttctaaacctaaccctagaagatatcttataatagaataagatgctcttattttcttaaccaattatcagacaacttagaaaataaagagagatcctctattctatgtgatgacagattataaattaacctaaactcttttcagatcataaagatcctaaattacaagtcaactactgcatctctgagatagaacaacatacaatttgcattaagtaatatataatctaaaaatcacaaaaactatgtaaatact

SEQ ID NO: 36183 - DNA, 2003 bp, Cannabis sativa
  modified_base (1133)..(1157): a, c, t, g, unknown or other
  modified_base (1305)..(1313): a, c, t, g, unknown or other
  modified_base (1971)..(1976): a, c, t, g, unknown or other
gtgtggtcgacgaggacgtcgaactccataaggggggttgattgtgacagcgtgtagtcccgtgatccgtaaggagaaataccgtatggaactacacaattgaagatagcttaaatgtattgattggtactaccttatatcaacaaggtgcatcttatttttcagtagcccatcacgaaagaactccacggttaatcgtgcttgacctgtggtaatttcaggatgggtgatctcttgggaagttttaacaggaagtgtgcgagtgaggacaaagcaccctagaaagactcgtgttggtttgtaggtttgtagggtcagtcgtcatcccaggaaacagccagagtgacgtactcgtgtataagagctatcattttgtgagtgtaagagccgaatagaagcttgaagtggggacgttacatatatggctcaatatttttatatttaatccatgtggaataatgttctctaatatactttaaacaagaactaaagaatatctatttatttcgttaagaagtgggtatttttagaatgactctaataaaatttaatagtttccctatcaataattttttagaaaatattgatttgttatattcataaaagcttggattactttgctgctaatattcatatcaaaaaatatatataaaactattcaaatgatgacaccaatttatgaaggaaagatctacatcaaatgccattaaagagaagaaaaaaatattgaaagaaaatttctcactcatacatctctttcaaagacttgtacttattaattaacaacaaatgcaaatataattatataaatgtcaaatgaaacgaaaaaaagtattaaataatttgttgagccttttgaacatggaagtgtaaattttttacttttaaaaaatgtagaaaattcaaaatatggaatatatataataaattaagtttagctcattaaataatacacctttctatttataattaattaaatattatcaaagaaatgatattcgattgatgaactaaagtgaaaatttgtggtattatatgtgtgataaataaataaatttttttaattagggtaaatactattttggatcccgtgttttgcaaatgttaaagattggaccttctgttttgttaannnnnnnnnnnnnnnnnnnnnnnnntaaaatagtaaaaataggaccataagcttaattttcgacaacttttgtttttaatataatcaacttaaaaataatttctaacatgaatagatacagaaaatgcaaacagttttgtcataacacatttagatcgaattattattaaatnnnnnnnnnacaaaaaatcagttcagggtcttatttatactattttaaaaaatacatggtacattttatcatttaataaaacagaaaattcaattagtaatttttgcaaaacatgaggttcaaaatagtatttacccttttaattattattactagtagccattattcttggatggtggaataaataaattttcataacctattatccaaaaataaaatgaaaaaaaaagtccaataaatcacgagtcaaaaggaataacacaacaaaacccaaaaagagaaagaaaaaggagaaataaaaatgtgatgatttggttgaaaattagatgaatatcattgtcatgagtagttatgatgaattgtgtgattcattgcttttcggctctcattcctaataagttcacaccttccctctctactcttatctctcaaccaaaaaaaataaataaaactattattatttatttatctttttttcttactcattaatattatttatttattaaaattgaatatataataactattttatcatttacaacatattataaaataactacaatctagtataatttacttaaaagactaaggtaccgtttgtgaacgatcagttttctgtttttaaaagtgaaaaagtgaaaatatttttcaaaaacatgttttatannnnnntttttacttttcaattttataattaga

SEQ ID NO: 36184 - DNA, 1263 bp, Cannabis sativa
atatatatatatataactttaaatttttatgttaactagtaataataataagctgagagacataattaatgttttgattagtgtatgtaaagcaaaaataaccaagcatttgaatatgcatgaatgcatgcaaagtgcaaatcatttatctaataagccacatagagttatgatcaatgtacatataaaagcaaatatagccaggcattttgaatatgcatgcatcatgcgtggatgcatcgaattttaattacaacatttttgggtaaattatgattagtatatgcacatgtgagatgttttaatctttttaattagtaaataatcttttggagtgatgtttatggcagaaaataaatagtcgtaatgcatccatttctccacaaacgacaagctgaagctacctacttcacataggctcaatgtttacttgctcagctcaatagaacaacaacacattaaaacaaaaaaattaacattaataatattcataaaaagatatttggataaatgatcaagatcaagtactttagatcaatttgcataaaaaaaaatactttggatcaatcttttgggcttaagcaaggttaatttagctgaagcccaataaaatgttgcttataagttgttcttcccatagaaagaaaattgggattcttttacaaatacacaaaaataataaaaaaattacaaaaatatggttataaagaattttaaatatttttacgatttttattttatttacagaaatacggtcttttaatgtatttttatattatactcttgttgattttttgttatttattattgttatttacttgttttgatgttattttcatgtaattttcttattgttttggtgttatttttataaaacacctaaaaatatatatatataaaaaaaaagatcttttaatgtaaaaatgtaaaaaaaaaattaaaaaaatagtgtattatgtaagtatcccaagaaaatttagtaatagttgggattttatgttacttttcaatatcatgggatttccaaattttaaatttttgaatgatgttaattaaatttgagaaaattacatggcatatctactttgttttatttgttttaatttttacttttattttcatatttttaagatatatccacttttatagatgatatcttattagatcccttatattaatataaattatatgctagacttaagtagagagtgagagtatatccactcaaaaaaaaaaaaatagatatattttaataaaatataa

SEQ ID NO: 36185 - DNA, 2393 bp, Cannabis sativa
caactcaaaggagattcaaaagaaatctgatgacaatactgacatcagtggagaagggctgtttaccaaaggcaaaccagacagaaagaatcatcacaacaaacagaactacaatcatcaaaacaagtcaaagttcaaatcaggaaagaaatgtttttattgtcaaaaagaaggacatttcaggagtgagtgcagggcactcaaggctaaacttgccaaagaagaaggcaagaagcaaggagaagctgacattgcatgccaagattatatgtctgctgatgttttagttcaagcagagcatatgaagaggagtggatcttggactcggggtgttccttccacatgtgtccaaaagctgaaatgttcaatgatctcaaggagatctcagggggaacagtgctgttaggaaacaacaaagcatgcagtgtacttggtattgggtctgtgatcatcaatatgtttgatggcataccaagaacacttaagaatgtcaggtatgtacctgatttgaaaagaaacctactgtcaattggtatgttagacagtattggttgcatcatcaaggtggaaagtggaatgcttgtaatctctaagaattccatacctgtgatgaaaggagaattaaagaatggcttatattctttaattgggaaaactgttatgggaaatgctgcaccagccataacagatcaagagattgacaagaccaggctatggcacctaaagcttggccatgtgagtgaaaggggcctgcaagaactcgaaaaacagggactgttgaaagacaagttgaatggcaagctaggattctgtgaagattgtgtttatgggaagtgttgtaaggcaaaattctcatctggtctacacatcagcaaggaaccattgaattacatacactctgacttatgggggccatctagaatcaagacactgggaggagctagttactttctcagcatcattgatgatttttctaggaaggtatgggtgtatctactaaattctaaagatcatgctttcaatgcatttgtcacttggaaaagacttgttgagaatcaaactggaaagaagctaaagaaactcagaactgataatggtcttgagttttgctcaaaccaatttactgagttttgcaagagagaaggcattgacagacacaagacagttcccaagaatccccagcaaaatgggttagctgaaaggatgaacaggacactgactgagagggtcagatgtatgttacattgtgctggacttgagagacccttctggggtgaagctgtgaagacagcaggctatctcatcaatagatgtccttctgcagccattgagttcaagacccctcaagagaaatggacagggcatccaccaagttatgaacatcttaaggtgtttggatgtactgcctatgctcacataaggcaagacaaactccaaccaagagccttgaagtgtctatttctaggatatccagatggagtgaaaggctacaaattatggtgtttggaaccaggatacaaaaaatgtattctaagcagggatgttgtctttagggaagaagaaatggcaatgaaatctaagacagacacaaaaccaaatgaaaactctagtgctgaaccagttgggtttgaggtggatacagacactacagatcatgtacctgaagaacaggttactgatcaggctcattcagaagaacatatgggagttgaaactgacatgagtgtagatgattaccaactcactagagatagagaaagaagggttcatagagcccctgccagatttggttttgctgatttcacagcttttgcacttgcagcagcagaaaagcttgacaactcagagcctgaaacctttcaagaagcaatcacaggcaaggataaaaggaaatggaacaaagctattgatgatgagatgctatccttgaagaaaaataagacctggattgttgtcaacaaaccagagggtcaaaagctagtaggatgcaagtggctattcaggcacaaagaagatgaaactggcaatggtgaagtgagatacaaagcaaggcttgtagccaaaggctttactcaaaaggagggaactgattttactgaaatttttgccccagttgtgaaacaaacatccataagggttatgatagcaaaagcagctaagtttgaccttgagattgatcaaatggatgttagaactgcattcttacatggcacacttgatgaaaagatttacatggcacaaccagagggatttgacaatgggaatcccaatcaagtatgccttttgctcaagtctctgtatggtttgaaacaggctcctagacaatggaatttgaggtttgatgagttcatgaaggccattggattcaatcaaagcaggtatgacccttgtgt

SEQ ID NO: 36186 - DNA, 3008 bp, Cannabis sativa
aaaaaaggtatatattgaatatctttgattagagctaataatacatctttatacaaaaacgaaaataaataagtgtacaaaagttgggcgtgtgagacagaccttaacttaattaattaagcactaagtaataaacatggttggactgaaaagcaggtctgaaattgtcccattttcaaacagcactaagggacaatcaagtaaactggtaaaaaaagacattgattcaagatatatttttagctcaattcttatttgttggctaataaagctgatgccttttgtcatgccaccatctccacctgacaaccaatttttaaaaattataaattagccaattacaactaatattttaactttcataaaaaaaaaaaaatttaactttgagatgtgagagagaaaaaaaaaaaaagagatccttttcagttcaaccaagcatgaatatatgtgtctatcttttcaaaatgatcactttaactcagctcagattctaaaacaaaatagatccttataattaacgaaagttaattactattcggtttatcataaatacatatatatgctttcttttttaaatttgatatacttcaaatgacttgaaaatatatatatatatattatagtgttgtttttgtatagcagcttataataattttgtaaacaaaattgtaaactttagtctattattataaatttgttaattttgtttagagaaaaataaattctgtgtttaccattatatttttgtattttttttcttaattttatatttattatttaaaaaaatctaggcattattgaaaataaattaaaaaaaagaatataaaaagtaaatataatagtgtacatatacctttttattttttttaaataatttatggtgttgaaaatatattataaactagtctattctacttgcgtatgaaataaactttaagacaaaaaatgtgtttggagttgtaaataatttttagcatgatcttaaatataataactgtgttataaaaattgtcttgtgcaaaaatttgaattttgtatcatgatggtgggcaaaaaagcatgcccgacccaatatatatttatatactatgtggaaaagaaaataagtacattaaaggtagttaattaataaattgatgtcacttataagtgggtttcgcactataatcacactttaagtactattattagtgcactatagctattagctggggataaataatgattaagcttgtacacgtttctatggcatattatgtttttttatagcacatagatatatgttaattagatgataatatatgtccaacctttaaatattttcagtaaatcctaaataatttattaggatcttattttggacacccagcctagctatgaatacggtaaaaattacttatataataatgataaaacattaaaaaaaaaagaattggatggattagtgttaatgatgataattattaggacgtaccaatagtaatcccaacgagggcggaccctcttcatgtggttttcgccgtaagggtaatcggtctcagcacgtttggtgttctgaaaagcacagcaaccaatggagtaaatagcgataaggaagacaagcatgacgatgttgagtactgacagcttgtgccagtcgatcctaatatcttccaacactccagccttgcaagaatcacactcgtaacacaacagattctgtgcgttgttccaacggtaacaatctgggtcttgtgcactacttccaatcacgttcacgttatagttacatgccgttggaggtttacaacaacccgattgtataggactcatatctttttccatataatctaaaggggtccaaatagaaagcttggcacaagttttggagctgaaaatacaaccccttatggtactccaataattaggattcttaatcctgttggttaaccatggtgagtatttttcaagatggtattctttgtataccctaccggggacttcgacaccgccaccagggccggtgacgacaaacccgaaaacggtgagacccatgagtgtggctataaggaagagcatgacaactaggtagacccaaagagcccatgccacgtgaaaacatgcgcctatgaagcctgctaaagagactatgaggactacgaagccaaccacgagaagtggggtttggaggaagctctcgcaggtggtgctgcttcgagccatccataggcctccgccgatgataggtatggaagccaagagagtgaagaggttcaagaaccctatcactgtgttgctcaaccggtacatttttttcaatgtagtcttattgctttgatgcttaatttctttctcttttgctttgagcctctctttttattcttgtgaaggctttctagataaatatgtgtgggtgcactttggaaattcaaaatgtctcttgatcccttttagtcattggtagctttttttattttattcggtgtgtgtgtttttaggttttgtcatgatcatgatatacaatacaactttatgtatcatgtcattatttcttgctagctaaggaactttattattgggaaatatggtagctaatattagtttattatatactttgggaatttactaaaatgtccttattagttatttgacattttgacttgtatctatagggaaggagtactatagctagagtgggctagctagctatgtaaaagtaaagaaacttgagtaatagagctaagtataggatcacctggaagcaattatcatcattcatggatacatgtagagttgtacattactcatcatcattagctcatattctgaattcaaatactactttatatatttattaaaactctgaaggcatttttgcctgtatatttaaaataaattatttttattcatcatcatgttttttttgtaattgatggacatatatgtaattatatttcattgttagataaaaattaattagtcacttaatttgaaaaagaacttaaatgggtgcgaattagatgaactga

SEQ ID NO: 36187 - DNA, 1631 bp, Cannabis sativa
ctatttttgttacataaaaattcttaaattttagttcaataaattattttatttggtgtctttacacagttacggtaatgtagatatggatcagactaaattaaatcaagctgactatagcaatgtgaattagtggagccaggagtcacgtcaggggtttgagttcaataactggagaaacacgttagaaattggattggataggaaactattgtaccaaacgatactaagagaaataatgaaagagatatcattgcattattggaaaatattggcataatggtgtgaaaggtgttatgatatttaattagaagaagtgctgaatcgagtttaaacatgtcgtttcattgtggacagttcagttcaatgatatcaggttgaggatcaatacaacttgtccccaaaattacaacttcacctaacgcgccaaaacaatttaacatctccaaataagtgtgatgcaaatttagtacaaatgttatattaaatttggcactaacatattttttatccatataaataatacataattttattatttatttttatattattttatcaatatatttaagttataacattaattgtgaattatttgtatatttttttattattttttatactttcaataaaaatattatattttgttttattatagcaatgttagtctaaatattgagcaactttggccatgacaccccttattttttaaggctcaattttcacactcatttttgttgggtttttcttataaaacattattttgacttttatgatcattttcgttattatgtaaaaacttaagaggatgttgttattaaatattttaggtgtgatcaaggtggtgagtatactttaaataaatttattaattcacttgcttttgatggcactgtgtatcaaatttcttgtactaatacgcctgaacatggatgaaagaaagcataagcacattgttgaaactactcgctctcttttgttgtcatcttttgttcctagtcagtatcgggggtagttctaactgcaatttacctaattaatatgatttcgtcttctgtcattttaggtttgtctctttttaggaaactatatggttgtattcctgtttattcttctttaagagtctttgattttacttgttttgtgcttcatcctagtgtagagcgtgcaaagttgtcatcacactctgcactttgtgtatttcttagttatggagaagggaaaaagggatattattgttttgatccagtttctcaaaaattgatatctcgtcatgttgtttttcttgagcatatatctttctttactattcctgacactcctcataatttgacaaaatcagatcttattcacattggcccattctctgagtctgagtctgaattatccattactcgtacagttcttttttcctcttcattactcttgcatgcattatgttgaaaggtctcaagaattagacactgctactttgcaacctaaaatcactcctccatcagatattggtacttcgcagcctgaaatcgcccatcctccttatgcaactgttccaaatcttcctgagattgtggaccctcctcctcgctatccactagggttgtacatcagtcggtttgggcagtttatcctat

SEQ ID NO: 36188 - DNA, 1845 bp, Cannabis sativa
ttggaaacacttggattggtctgtgggggccaatcgtcagttcgggaagcagctagagtgatgcactcgtgtataagaaccatcattctgtggagataagggcccaatagaagcttgaagcgggaacattaccgaggtaatgtataaaagaatgtcaggaagagtagtggtatcactaaggtaaagaagattacttgaattacttaaggtgatacggtaatgatggagagtactttataattgactagatagtcaatgtggtatatatataaggagaccattgaaattctaagaaagtattactttattaagcaattatggaaagacattctcacccagaatgggggaaagcttatgaattgagatgaaatttgttgaacatgtaattgagtgattggtgaatgttagatcacaaagtaggttgtttattaaacaaggagctatataactgagtgtaaaataaattttaaagtggttaaccaagtatggagatagtgatgattgcaaggaagcaatggtagcatttacattcaatgaaaataagttctgttgaattaccgaatatgaatgaaaataaacatttacattcaatggttgtaaaacatatgatccatggaccttgtggaaatttaaatccaacaaatatttgtatgaaagatggtttatgtaaaaatcattccgaaaactatattcattaactacatatttaggcattagtgagtacctgaaatataagaggcgcgacgatggtcaatatgttaaagttagagggcatcaattaaataatcaatgggttgttccatataatccttatttacttacaaaatttgattgtcatataaatgtagaaatatgttcaactattaaagttaagtacttatataaatacatatataaaggccatgatcggattgctattcatatcaatcgagatgaagatgtaaataacattgatgaaattaataatttccaattaggtagatgggtatccccacctgaagcaacatggaggatatttggtttgacattaaatgaaatatacccatctgtaattactttatagttacatctagaaaataaacaatttatgacatttaaaaaatcagatgatcgtggtaaacttattaacaattatttttgcatcaaaaacaatgctaactgaatattttaacatgaatacaaataatgataaggcaaaaacgttactatataagcagttttctcaattttttgtttggaataatagagataagttttggtatgcaagaaaaaaaggtaatattttgtgaagctgctatgttacttggattactaaagggagataattacatttttttatgccttcaagaagcctgtctatatcaatcaccgtacactttgcgatgcttatttgtaacaatattaatacattgtgaaccataaaattcaaaaataatatgatagaaatttgaaaatgcaatgagtgaagatcttattcacataagtaatgattctacaattattaaaaataaattattagagcagctaagttttatatttgaatctatgggaaaaaaatataaatgattatcgttcaattaatattacagttactttatcagaagaaaataaatttcagaaagaaataaatgaggagttagcagttattgttactaaagatgacatattagctgaaacacaactaaatgaagaacaaaaaaatgcatttaatttaattttaaataaaaaatttctaaatgaaccagcaattttctttatcgatggacctggagaacaggtaaaacatttttatatcatgccatacttgctaatattatatcaaaaaacttcatagcattagcaaca

SEQ ID NO: 36189 - DNA, 1767 bp, Cannabis sativa
attctccccagttgcaaaaatggtgacattcaaattactattggccatttccataattaaaaaatggcacgctttgcaacttgatgtcaacaacgctttcctcaatggggatctctatgaggaggtttatatgcaactccctaaaggcctatctctaccacctgagtttgcacaccattctgacattgtttgcaaactgaataaatcaatttatgggctcaaacaatcatctcggcagtggtataagaaactttcagacgctttaatagaagaaggatttaaccaatctcaggccgattataccttattcaccaaaggtactgacgacagttttattgctcttttagtctacgtggatgatataatcatcactggaccaaacttgaccttattacatcagttgcaaacctctctccacaacaagttttctctaaaagctcttggccctctcaaatatttccttgggtttgaaatagctcgtgcaccagaaggcttagttatttctcaaagagagtatgctatacaactcctagaagatactggatatattggaagcaaaccaacaaagacacctatggatcctcggctcaaacttgatgatcaacaaggagaacttcttcaagatccctccccatatcgccaaatggttggcaaactgctctatctaaccttatccagaccagatatcacttttgttgtgaacatactgagccaatttatgtcctctccacgcacccctcacttacaagctgtacaccagttgcttcgttacataaaaggcacccctggccaaggcctcttatattatgcatcttcaacactccaactcaaaggatactctgaatcagattgggcttcctgccccactacaagacgctcaacaactggtttttgcatcttcctaggagattgtttaatctcttggaaaacaaagaagcaaccaacaatatctaggagttctcctgaagcagagtatcgggctctcgctgctactggtagtgaaattacttggctccaataccttctccaagatcttcacatacctcaaactcaactgacattcatcttttgtgacaaccgatcggccatccacattgccaataaccccacatttcacgaacgaacaaaacacatagaattagactgccattttattcgtgataagatcaaccgttcccaaattcgcttaagtcctgttcccagcaccatgcaactggtcgatgtcttcacaaaacccctagcttcaactaccttatcaacacatgtaaccaagatgtttgtccacgatgtgtacagtccatcttgagggggggatattaagtatattgagtctcctgcttgtactgttatatactgttattctcattcttgacttagctggtttattgttaagtcaagtttcccttttcagttattttgtgttagaaggtagttaattagttagagttagctcttgttatttaggtgttagttttattgcttttgcttctgtatatatacgctgttctcgattgtattgtgttaagtcaatttcagattaataaaatgtttttctttctttctttctttccgcattaaattgttatgtaaaggtatgcatcttcttaaattctttacctacaatttgctcacgtttagctcgctataagatatttcaatacttaaaactaactactcaactgataccagactcattagtttttcctttgaataataccattaccaatttgaaaacttacaatgtaacgtccccgcttcaagcctcca

SEQ ID NO: 36190 - DNA, 1387 bp, Cannabis sativa
agctttactaagatccagtttgagtgccatatagccttctttgcctttacgctttcttttgagatagtgcataacctcaaacgctatcataatattattagtaataaggcgtctcgagatgaaagaagattggtttggggatatgatctgaggcaacacttcttttaaacggttcgcaagcaccttagacactatcttatacaagacattgcacaaggatatgggctgaaggtcacccatcgaagtaggttgtttcttcttcgaaatcaaaacaatattcgtgtcatttagtccatcaggaatactgccatccgcaaaaaattggcaaacttggttcacaacatcgctcttcactatttcccagtatttctggaagaaacttggggtcataccatcgggaccaggagatttatcaggatgcatactaaacagagctcttctaacttcttcctccaaaaccggcctaagtaaagacaaattctgatccacgataattgaagaagtgatctcctctatcacagttaagtaatcagccacatttgaagtaaataagttattgaaataatcaaccataacattcggcaactcatcctcccaagtaacccagtgacccacatcattcataagccgagttatagtattgtgtttctttctagaagtagctttagcatgaaagtacttactgttactatcaccttcttgaagccacaactgtttagagcattgacgccagaacacttctcgttggttcataacttcactaagattcagttcagcctcccaaaacttctgaatggatatagcatcacaccccttcttccaatactgaatttctcgcttgcaatggataattctttgctttaaaattacctgtataatctcgcccccacgcttgaagagattccccacaatatgaaattttcttcataacatgttgaccttcacaaaggtcccaactatctttaataacttagcagcacagcggttcacggagccaggcattttcaaaacggaatcgacgaaatggtaccgtcacagaacttaccgtctgctcaagaagcagcggataatgatccgaagcagagacttccaagttatgtagctgagccatacgaaacctctagaaccagttagaacaaacaagaacacgatcaagacgaattttaatccatgaatcagtgcctctcccacgctcccaagtgtaacgatacccgattaactccatatcaacaagatcacagtcagacaaagcttgattaaaaccatccaccaacatctgtggatatctatttcctcctcttttatctgcatggctagtcgtattgtttaaatctccaatgatacaccaaggaagagaaggttccaactttaacgatctcaataaatc

SEQ ID NO: 36191 - DNA, 6552 bp, Cannabis sativa
cgttcctatagttgggccgatattcttgggcttaaaataatacttcttttaatattaatttatcactaaatttgagtttcacgttgccctcaaaataggctaaatcaaatcctcataaataaaaatagaggaaattagactctatacccttttcatattatcctctttcatttttactctcttttctaaagcctactatttttacctctttttttgttttaaatattttaccgattttacccttgtcacctcaatatactctccatataactcctttatgtcagaatattttgagtacaatacatataaaaaaaagtatgtttcaattaaatataaaattaaaggtaaatttagttcattgaaaaataaaagaaatatttttcaacataccccataaaaataagttgataagagacaggataggagttcattatccccattaaataagccctaaaataaaaaaccaaaaacacccttcctttcttccttccttccaagtataatttcaattatcaaaaaaagagagaagaaattgaaaaatcctaaaattcttctcatccatcctctccacctttttcggagtgaagcatactatcttcctcttccgacaacgttcgacccgcctaactgcataaaggtatataatcttatcatccccttttgaaaacttcaaacctgtaccactaccaccccacaatgattttatatagaattgaaaatctccagttcatttttatatgttaccatccactctgacttgattaaaaacatctcattttttactctaatgctatctaaatcctaattactataaggttaatgtaaaattatctgttagttttccatttctataactgattatatgaaatcactgaattcttccatttcctttttctgttcttcattcattttttaatttgtattgatgaataaaagtgtgagatatgttttccctgatttaaaaaattcaatcctggatttgattacagaatgatatttttttattagcatatgtatcctaacataaagttgtattttttttgtcatttctcaaaaggtaagaaattactaacatcaagtttaactgagatacttctcttcactagtatgtgtgtgtatatatttggttcttttccattttcaatatccaaaattcagtttggcagatctctatctcactcggtaagttgattttgtttggttaattctttctttagtttggtccattcagtttcaagatattatttttatttttctctgatctgagaattttattttgtaattaaggtgtgtggttgatttagtatgtaatctgctgtatctattttttatttttgtttttctttaaaagtatgttaaacttttctgaattatttgtgcaaagtacagtttacctgctgaggagcactgtgttttgatttattaatgtctatatatctgatctgagctttttttttatttaattagtgaacaggatagtttttacctaactatccttttgttttgggatgaattttgccagatttgcgtgcaaaatcccaacctgtaatgcgatatgttgtggatatttgttacaatagaatcataactgtggattaaccaaataatagtctgtttttctcaaaaatgtggtatcttagaatagtgaaatttctacttaccctttctctctcttttctctcactttccagagaaaattgactcggaggcttccttgttattcatctgtcctcatggcttcaggtttgtcatattttatgagctaagctttgtgtctagtactctatttgattgattgactcatacaatttgctgcaatttgtatttttctttattcataatatcttgaattatggttgatattactattttgtcatacaatatgtttttgaagaatttgttttacaagtttgaatgacatgtttaggcttagcttgacttgcacatttatttaatttatttttttcctttattcttattattaatttttatgaaaaagattgcactatttagagttggggattttgatatatgttaatgtttgtctcttgcagattatgcctcatctagtttgactgaacttgaatcggctttgaagttgaagaatgttcagtacttcgtcactaaaagaccgtggcttggtaggatcctacctccttatatatactgtgtttttgttttagtttccctcttattatttttttaatatggtaactcttaatgtgacaatttggctagattaagtcttcgtatattggtttttattgtttcaggttttatgtttcagatctttatggaatcaatgttagacccgttgctccttttggaagtgtgagtaggaaaccatatgttgatccagcgctgatacaccgtagcttacccgatgagcttctctatgaggtatggcattttagaaactatttttttggtttgctactaagttgaaatgcaacactttttcatctacattacttattagggagtgactggacaaaggtaaggaaattttgtattgaggtaggcattttatgaattgatgtgttagttatgggaaggaacaaatgggagtagagaggagaggggtatgcataaatccaatcactaaatgcctaaggattgtcactgttttgcctttttcattaagaacccttatatcatttcttcttcacttgttttgttactgctatattttttctgcacaatttagattgtgcataaaagggtgcattagttggtatatagccatacggactggtggtatgacctatatacgaatggaagctcatgttgaatttatggaaggactatagaaatctattcagggtgatatctcatcggatcaagagaggcagaaagtggctgttactcaagaaggtttagagggtatcactcggagatggtttcaagtggtagatgagcaagatctgatcaagaactggttggaattttgcattacgctgttcaactgttgttgtaaaaccgattatccatttcatcaagtgacagtatggggttggacccattgggtcacgttgttttctcttagagggaggcaggaagtcaatttttactagcccaagatcgacgaagaccaccatggacaactggctctggagagtcttacagcgccgaagattgagtcgatctgccgattttggggataaatacacaaacaaccagaccaaacaatacacaaacaaccagcaaaaggaaatattaccgtaactcgctggtgttcgagagacctgcaccctctaagagctaagctcaacaaaatacaattctgacatcccttttcctagtactcaactcactacatatcccctccccataaacattccttaccacatcattagcaacctgcccagattacccctgctataatctgattactcttttccgcccctcctagcatatgtaaaacgtatcacaggtctatatactgctcatgtgttccattgattacttttatttataattgcttgtgaaaattattgagatgtcacatgtgctagggcaggattgtgctttctacactattttatattattagagatttttttttttttttgaaaaagagaaaaaggtcacttgtcttagactgacctcctctcaaatttattgagaagaaactgtaaattctcttgaaaagcattgttgttgtttttttttctcttcctattttgaaagtatccaagagggactcaaacgtcagtccttgtgggagcaaaccatatgacttaaaagtgtacttttacttagaaatgatctaaatcttttttgatgatcttctgatgaagtgattatttgtgacaagttcttatggcacataactttgttcatttgcaggtctttgcacgaatgacaccatatgacttgggaagggcttcttgtgtgtgccgaaaatggcggtatacaattcgcaatcctgtgttttggcgcaatgcatgcttaaaggcctggcaggtaactggtactgcttctgttttgagcctatagtttgtcaattgtctgttgtctattttaaaactgggattcattgttttgaagctttcgggagtggtcgaaaactataaaattttgcagtcaaagtatgagagttcatggagaagaatgtggcttttgagaccaagggctcgtactgatggtaggagatgccttaattttaattgttgtttgtatctttctgattttattttcactttttgtgctctccaattcatatggtctgtgtttgttaacgtaactctgattcagtgttaccatccaaattcccgttatcgtatttttgactgtttggatttggagagatgttcatgtgaaatttttttggcatgtcaggactttatgtaagcaggaacacttacattcgtgctggagttgcagaatggaaagtcactaatcctgttcatgtggtatgctgttattttgttgttaagacttcaatttgtgtgatgagccaatcactttctattgattgaatttcatattatgctcttcatatctaaagcctaagcttaggtatctgaaacatatcattaaggttaaattaaagggtaaatagcacttggggttcccatcattttttttttggtaggggtttccatcccaaatcagtaggaaaaccattttattcatttgtgcatcactgcatcttcaatgttctccactattgaaaaaacttgcatggtccattctagatttaaattatatgttttagttccttgacctgtcttagttcctttggttgttcaggtctgctattaccgttacatcagattctttgcttctggccgattcctgtacaaggttaaatttgttccaactcttgtggaaggtttttttaaaggtgaaatatgattgattatgtttttgtatctgaattactttttctttcttccattaaatctgctgttgcagaattcatctcagaagatcaaagatgtggcaaaatacatgaactttcgtgcagccaaggctgaagctgttttcagtggccattacactttgtcagacgataaggtcagattgttcttctccagaccttagttgcattttccttatgatgaaaatgttgatttcttcatattttattactccattgtagattgaagctgcagttttgtacccaggcacacgccctacagtatggaggatccgattaaggtatgggcatactgtttggatgtaaagcttaaatggccctgcagtgttatttgattggtgataattattcttgttcgggcaatgatttatattttgaacaattcttaacaacaataattttagggcgtactgagataagcccacaattacccacaattagcaccaaaaacattagacagtaaccagtaaaagcacattagtagaaagcttaaaccattatagtcatgctctagattgtatttctcaaaaagaaaagtaataacagaaagaaaggatagtggtcctttcaggccttgatgtagagagagaaatctcaattcttacatgacattcccactagcattagctgccactatatccctttcctaaacaactcaacaattaccaaaagaccccccacacgcatcgctgcccttacatgtcaatatccttattacccttggcccttctagcataagtaaatctgataggagttctaacactggactgttagtttgtttcttttaattatgtgaataagcatcacattgtattttgttggtttttcagtcaagaaaattccttaataggaagaaatccttgtcatattgattgatacattacaaagaatcataagtagggaaaaatacttatattattcccattgttgttcaatatttttccggctttagtgaattcctcaaatcaagtgcgctttccaaggaaagcttagtcattttcggaaatcgtctttgaatgaattatgtctggatacatatgtgttgagataattgccctgtaatcacaacaccaaaccgaacacaatagggaattaaaaataaacaaagctgaaactgagaaaccagcaatggatttttggagagcctggtctttctacaattctcacaaaaatcccaaaaacccttctcatttgccttaccgaaaagcataactaactctttctctcacctatgagtcagcaccactgtcttgctcacctaagacacacacaagtcacccactcaccctatttatacctttcacataggtatattttgccaatgctcttatcactactgccctcctgaagagatggatggccctactgaaaataagtctcagaagtgaaagtggaagtaacactcaaacaaacaataaaagttaggataggtatggtaagaacatagagccttagctcatgtccgttaccagtaataatttatgtcataagaacctgaaataaacaatgatctgaaatgaatgagatgcaacaattaaggttatgagtgggttgactgataggaagcaaattgaatgataaattaggtaaatgcaagacatatgacaaagtaagcaaaaatatcgccaaatccttctgactttctctttgtatctatctatatatga

SEQ ID NO: 36192 - DNA, 1530 bp, Cannabis sativa
atgtaatccttcatgtaattcagtttctttacctgttcataatgctcaattttctctttggcacaacaggttaggccatccaactgctagaattgttcaaagtgccttacaatcttgtaacatacccattagcaataaaactcaatctggtttttctgatttgtgctctgcatgttgtttgggaaaacaccacaagcttccttttccaaattccacaaccacttacactgaaccacttcaactgctgcactctgatttatggggtcctgcccctatcaattccgcaagtggttataagtactatattagttttatagatgcctactctagacatagttggatctatatgctaagaactaagtgtgaggctcttcccacctttacaacttttaaaaaccaggttgaacttcaattgggttacaagattaaagccattcaaacagattggggtggtgaatatcaagctttcaccaatctgttgcatcaatgtggtatcattcacaaagtgtcatgcccccacactcatgaacaaaatggagtggctgagcgtaagcataggcatatagttgagagtggtctcactctacttgcccatgcctctctcccactcaagtattgggatgaagcatatcgagttgctgtctttttaattaatcgaatgccaactcccaaactgaattacaagtctcctcttgaagtcttatttcacactaaacctgactataccacacttagagtctttggttgtttgtgctatcccaatctaagaccctataatcgaaataaaattcagtacaggtctattccttgtgtattcctcgggtatagtctgtctcataagggttataaatgtctttccaaagatggtcgattgtacatctcagagatgtactatttgatgagaatgttttcccatttgcttctgctgctgtagctgctgcacattctaattcttccatgcatactactgtcaatgctcaaattcctactatcatttcctctgctgctactaccacacctaatatcatctcatcatctgtatcaaatactcatactccaaccacagcttcatcttcaccaaatatttccttgtcatcatcaccatctgcccctactcttgtccataataacacactggtagcacttccttccaacacaactgagcatgaaccaacaagaattcaacctgttatttctaacaatgtttctagtggtgttgtctccaatacaggtacaaatttgcatcctatgcaaacaaggtcaaaaaatggcatcgctaaaccaaaagtgttaatggcctcactttatcctctcaatgtcaagtctgcccttaaagatccaagatggtttaaagctatggatgttgaaaataaagccttgatcagaaacaatacatggaaagtggtacctcttccaccaaacaggacacgaataggatgcaagtgggtatatcgggttaaagaaaatgctgaaggagaggttgttcaatttaaggcaagattagtggccaagggctttcatcaacaagct

SEQ ID NO: 36193 - DNA, 1407 bp, Cannabis sativa
agtatttataatatattgttaatttcacaattttttaaataataataatttatagggtaaatggcggcataagtacccaaaattttatgtttgtaagccgcataagtacctaatgtttgtaaaactgtaaattttctctaattttatcattacaggctctgttattgtcttaaacatagcacatataaggtctaaattttttatcattgggtctagatagaaatatgtagtatcagttactttcattttttttcaataaattcaaaacagagtttgtactgacgaaactagaaaaaaattatagttttacaagcattgggtacttatgctgctaaaaataatattagatttatgtcgcttacaaacataaaactttaggtatttatgccgctatttaccctaatttataattggacaatgggctaaaattggtcgagttttcgcccagtttcaaaattataattaaagttatagccttaaacataataacatatattaatacataattatgtcaaaatgactaattgactactcttttacaaattgagtaatggctcaccacaactccacaaccaacaaaatgaatgagagaatgagaagaatcaccaatgccacggggaaaactaacgacatcaggagccaatcttaggctgagaacaaagcttcaccaccggtaaagagccccatcaacctcaacaaccccattgagttgtgttagacccctaagccgaaagccaccatgaacattctctcgaccagggcacggaaagttgcacgacgataacgacctcggccgaaagaaacaaggaaaccctataaagatcctagaagaagggaaaaaagagaaaggacaaatataaattttgtatggtaaaaatataagtttgtaccaatttttaataatttttgagtatattatattattaaaaaaatatgtcacccttaagttaaatccactaatttacactcaattttaatcgtaaagatatgacttaacaaatgcaacctaaatacttaaaatgaccaattttttttgttgagtttaaaatgactaaatgagattgaagattatgtaatcatattggtagtttggcaatttttcctcctaaattttacaaagtgaaaattaaatatctaatgagttcttgtacaatttgtataaacacataacttttttttttatttccaaaaaaattattttatagaaaaaattaaaaataaaaaaatttaaaaaatagtataaaataactggttacggtaacccatttgattaccgtaaactaatttttccatattttattttttgaattttttttcacaaagtaactttttttttaaaaaagccctaattttataaaatttaccaaaaaaaaaagagaattaccccatatactattttttaaactt

SEQ ID NO: 36194 - DNA, 1384 bp, Cannabis sativa
ttgaaatatctataaccacttttcaaatttagatatttatctaattgaattaattaaataattaattaacctaaaaagacaaactttatagggacaggctacatgatatgtgtctaccttgtcttgtttaagacaatgatggtatcttttgtcctcacaacttttgtctcaataaatattatcttaataacttttgtcttttccctatttatttaatttattttttttttaatttattacaaagataagtaattactatttttccaattcaaaatagatttttctgaacgatattatactactctttatccttacccttgacagtattttaaggtggcaattcggagactatgggcctataattctaagctccaataaattagattatttattgagtctcatcaaccaaataataattatttattaatttcatgattactccactataaatatagaattaaactcttagtaattatataattatatttattgagttttactgcagtatctattaatataatcaatttcaatgattagttatccttgtgttggttcgtaattagttttggtcaaattagcattttaccattttaattatttttttatcatttagtttcattaattcactagtggaagcatgattcagatcccatctaaatttgtgcgcaacttttcagtactaaaattaacacataaagagaaccaacattcgatctgttaggaaagtgatgattccataattgtagatcatgtttccagccatccacattattagttttccaaaataaaagttgtaagaatcatcttctctgaaaaactttaatgagtgaatcaaagaaactaataacatgaacatgagtttatgattgctcatgatttaggccgatctattactgatcatcgctgaattaggtctttatagtaaatgtcatgttgataaagatcttagtctttatggatcatatcagagttataaaagcggaagcgaaattaataaaaataatttttatctaatatgaaccataagcccaaagatctcaacctatcatatataaattaaatccagactaatgaaataaagacaatatctcttgaggcctattagggtatccttatttctattagtacaattaacgattatctaatcaaaaaacttatgttgaagtatccataccttaatcttttaagccagcctcaacactcaggaatagagtgggctattagatcttataggataaatcaatttaggcattacagtgtgtactcaactcatgagatactgtaattgagacaagattatttaatctcacacacaccttttatggtgtaggcatgtgagacctagagaaagagagagagtaggcgtgagagagagagagagaga

SEQ ID NO: 36195 - DNA, 2193 bp, Cannabis sativa
cgaatccagcctatactcagtactctagtcgtactgatgtggtagcagttaattcatactatatggaggtctagcatatggcatctacgtgcaactctatgtacacttcacggataccctgatatactaatttgatggccactaacatgcacactaaacatgtatacatctatgcaaatcattctactaatcttaccatgattctgaatgcaagtatgtcggtaattctaagtggaaactgctgctcgacgatttacaggcccctaagtcataacatacgtacaactgataagtgtttaatctagaatacttttctaatgtctgaaaagaacctagggtttttctaccaaatatgtggtggagataccctaaaatgaaatacatatttttgctctaatttatataccatatcgtagagctcgtcataggctttaaaatagtatatagaacgtctaaaatacatatccaagtgaaaagttatggccaaaatactaaaatcggcctctcccaatacagtccaatcgaaattcttgttggtacaaccctaaaccaacaagaattctgattgtctgggcagaaaaacacgaaaatttctaatcttccaacccccataacttggtccaatcaaacccaaatgctaccaaactttccagaatatcaacataccacataaggaacctattacatagcttaaacacaaaaattatgctaagaatcaagatttgccatggaagatcaaagtttaagctcttgagctcaaactttgtctaaacaacacaacaagcatcaaacaaaacttaattcaactcaaataacaacaaagtaacttctaaaatcataaccaaactcgaattaaatctacataacccaactcaacaatcctcaatgaaacctaactttcaagtttgaaaaagaaaaggagacaaagagggaaaagcttacctcacaaattacttaagctacagctgttgaattcctctaaaaatggtttgaattgaacaagaaaattgttgggttttcccttggttcttggtggccgactcaaagaaagagagaaagaaagtgttttgtttttcttctaattttctattattgaataaaaagaataaatcctaatgtttatctaatattcaataacttaaattcagattaactaagcttaatatcaacccactaaaggacaaaagaaaattatggtaaaagaccatttgcccctttttttccccatgaacttacattgccaccaaagggcattttggtcaaattaaatacctcgaatattcttgacatctccaatatctaactaaattgcccaaacactaaaatataaccatttaaaaatgtgaatctatcagccaaacgttgagttccactattactgggcataaaacatgaaattcataaaaattcatatataacctaaacaatgcacctagcattcaaatatatttctgtagttgagaaaataattttttaaggcctatttcttaatttctactaagaggcacaaaaatcacataataataattaaccttctaattatctgctaattctcatgacttaactatgcggttattataattatccccccgttaaaaggattttgtcctcgaatcaaatttgaataactagggcctggagccacacgtcggattctaattcccagttgatttccttcactttattgtttctttaaatatcttaactaatactataactctgtcgcatatatctttatttttcttattgagaatcttaacctatttttctttaaagagtaggtttaattgaagttttgagttccataactaaagatatgagccaaatttctcaatctactacatgaaaacgtcttgtgtgctgcaaatgctacttgtaaggttaaacacaaaattattatcctgatgttctctggaaattctaaaattcttgtgaatctaaggcatatcttattcttgttcccaaagtatttctcctacttaggaattttgcattcttttgagctttggattaacatgacctctgttgtctatgttgagtagaaagtaccctaatcataatcttcactatagccttatcaatttgctgaactaacctcggatctatcctattttgagtttacaacaagaacaacacttcatactatataacatctttatagggaaccatccctgttacactctgacaattgtt

SEQ ID NO: 36196 - DNA, 1210 bp, Cannabis sativa
  modified_base (390)..(392): a, c, t, g, unknown or other
tgagttttggttaagaataagtaaattacaatatatgcattatcatatatgttacctaattaaaaaaaattaaaattttttaaaaaatacatatgtatgatcacatttaaatgacacgccaatatagtaattattaatttctttatcacttataaaatatgcaatagtaatattcaattttatagataaatatattacatataattataagtgtataattatagatctaaagaatacatttgttgattcaaagagaagaagctaaatagcggaagcgtaccttaatccatagatagtgatgatcttaatctattttgtagagataatctttgtggtgattttggataatgatcttccaagaaaataagacttagggttttctaattttcnnncttgatgggggaagatgagaatagaaattggctcttgttttttggggaccgctaccaatttataaccccatagctaggttattaattttaagtatttctaatttagcccctcaataaattagaaatatcacttaaggtatctacacatttagcccatgacactttaatacccaatgacccataattactaaaatgatcactttattttggaccaaataacttcaaatagcaatataataatatacatttgagcccatttgaggattttaatccaacaatctcccacttgggctacatatgttttcagatagtgtataaccttataagcgcttaacttttgctatcataattataggtatttcaaaataatctcgttcattgattatactaacataggatcaaagcgactttcgcaacatttaacgtagctaaacccatcaatagtcacgtatatcaatataatcaaatgacatagaccgatcgtagatacgtagcatgaaaattacatacaaatgtgatcttagcatgcctatttttaactggtcctccttaattaagatcaattctttattaattctttctaaccttaatagaaagaaaatattcagagtactcaaaacttaagtccatactttatctgaagaattaaaccataaatatgtgtcagcttgatagaacatctaaaatacaaactcccactaaactagcacaatcttaaataaaaccacatctaggaatgtcaatggggcgggtcggatctgatccaactctgatccgacctgatccagatcatatacggatctgccccgcccccgccc

SEQ ID NO: 36197 - DNA, 1304 bp, Cannabis sativa
aatagctgtaaataaaaaaaaaatgatgatgagaaaaagcttggtgaagagggctggactcaagcggcctaatcaatacgagaaggaagacgagaaccaacatgcgcctcgagcatggcgtcaagtttcttcttcttctcccaaaatttagcaataacctcctcaagtttggggtagaagtcaagcttgatactatggccatttgtcgaccaggccatgtagacgccatcatcgaagcgcttgacacaacgcttggaggagacaggggagaggagctcatctcttttagccttctttaaggcttgatctctgaagtcctttagctccttcatctccacagccaagttagccctggactgcaagtccgcctagtgcaactcctctaaggacctcaccttggcggccatctcgtttatggcctccttagcctcccgaagctcgcgcttggccttggcagtggcctcgcccttcgccctcagcgcctcctggtgcctcacctccagcctatccctccgcaggacctcttctgggagcatcgcctccgcctgggcttccctctgtttggcctcctcctcgagcttggccttagcgagggcctgctttcgctaagcctactcttggatcgcccgtctctaagcagacaggtcccacaggatcctcacaatctcgtctatgccctcgaattcggacaagacgaagccctgattgacgatggtcctggagaggcggctggtctccgcagaaatctaaaaaaaggagaaacgagtgagatcgaatgccttagacaaaacattgaggaaagaaatgagtcaagtgcttaccggggccatggctttgctgatgtgttgaactttgtagacggagttcaaggatgcacaagtagcgtaccgtttgggcgggaattgagtcatgtgggagacatacttgctggtcatctccgcagtaaaaggagccaaggtgggccccaggaagcgattaaaccagtcctttagcggatccatattcaggtcccacggattccggaagtcctccgcattgaggacgttttgctgctcctcccgtaccttcttcaaggcctccacttcagcatgcccccgtgtgtattcatcaacagcatagttgtgcttggctatccgaagattttgcctctcctcgactccaggaatcagagtcaccaccatgctgagaggcactgcgtattcctccgccccggaggggatcccggagttatgactcgggcccggagtgtccaccctccggggaagtttagaaggctcctcttctaccatcttgcccttgcgctt

SEQ ID NO: 36198 - DNA, 2187 bp, Cannabis sativa
  modified_base (372)..(372): a, c, t, g, unknown or other
  modified_base (398)..(399): a, c, t, g, unknown or other
gtgtgggacacggggatagggttaaggttgggtgtatgggcgcctgattataatccaggttattgctatgttattatttatgcttttcttacttggtctgttgactcatagctgttatttctatgtgtaggtaaggaaaaggctaaggttgagcagccgtgagagcgagcagatagagattgtacatgtcaaggcagttatgcctggagcgtacaatctttgggacatcagggcttattttgtatagtcgctaggcgataaaaatttgtacatgtacggtgaaacttttgtaaatacttttgtaaacgggatctcaatttaatataagtatattgttttagtgtttgtaattaattaagtaaaattttaatnaatcacgattttcaataaactcgttnnttagcaacgagctgcacagttagttaaaaatcacgtgaacatgcctaaactagtagggtgttacatcgcggttcctcggtgtttaggatcatgtcctgaaaatctcgttgagatgatcgtagcaatcacctctatgcaagtggtatcttcccctgcaccgagtttccatggatcctgacctggtataaacactaggaggacaactattagtagaagaggaatgaaaatcaccttcatttacctatgtccgcggttgggcctgactctatgggtttcaccgctcaaaatcctcctcttgcagtctctcctctctctgctcaggttgatgactaccatcagcggcaacaagttccctattccttatggagttacatgtaggttggtttagtttgagaccagcttgttcaaccactcattccctgcaagtacgagtattgttaggacactcagtatgatgtctagctatattggttacttgaggattgcctaaacgtgggtttgggacttggggtggacgtcgggtcctgactcattctcttccatcgactttaacctataatgcttgcatctgttcctggatggccatgtactatgctgtcataagctagacaatgcctacagaggccaaccctcgtgtgatcggcgggaagtgacctactgtagtcgctggtgtggacgtaccatgtccagcaattttagggaatagattgaagaggtgacgttgatccgtcccacacctccaatgattgtattagtttggtttgttctatctctacgaataggaacgtgcatggttccaacattgaaagatcatgtgttgttgtttccatttgtttgattggcaaccatggtgattttcctccaaaatcgacaaaatagtttcctacagacgatgccaaatgttgtcagaggaattcagacaacaccaaaatgtaagcaaataataaataaatcaaagagaaatagtgaatactatacttagaatagcgagtattcaaagaaaactaccaagataatagagcaacaggaaatataaaatgaacaaagggaaatatagtgattcagtcagatcaccctctgcttagtccacggttgcaagtgatttctgcttagtttattcaacttggatcactcctttatattgaaagcaagtatccttttagttaaacatcactgattggcaatagaaccgttttacaataaataataagaataaacgtaagagaataaatgaattgacagtttaattcgttatataaatgcagcaacgtatgtgaccaatagggtgcgagtttcctgttcatattttcgcacaagctcgcaggctttaggtgtgttctatattcataaaagggctaatgagcctaacactaggatatctgcgttctatttgaatcgcattgacggacatcttgtgtgtcaacgacatgtgacatgtaagtccctatcgagtcatcaaacacgtttcgtcatttggaccaattattacataaagaggtgatctttacttagtcgcaagagaacgctacttagtcattgcatatatttttatatatgcacgaattgtataaatcccttctggtcttgcttgtcttacactacgcaaggcatagcatgcgactagaccttgttaagatcgcatcatctcgcgagtttggctcaagcgaggtcaactctcggagagtcattagttagtagctcatccattccttgaggattgaatccacgtgtcaattttataggagactgatctcaagtttctatgcaaaaattcacactataacaaac

SEQ ID NO: 36199 - DNA, 4537 bp, Cannabis sativa
tttgaaaaactgtaaaaatgtaaaaaaacattttttgaacgtaaaaatataaatattttataaaaaatagtaccttttgtaattattcatttttagaagatgcaccatacaatttttcaaaatttcccaagtttagcatcacatttgcatctaattgttattattactttgtttccattaggcaatgccttctttttcttttttctcctcttttatttattattaaggccaacccaaacaaaagaaatcatgttagtgtcaaagtaaagataaaggcagccttagtgcacgtgtttcatggtggtgtcacgtggcaggagtgagagactgacaaatggagttttggcttatctagctgtgatgtgctcatcatacataagcctcctcctccttatgactatgccatgtgatttgacgaaaacacccctccccttcccacacctactatgaccaaacccatgtgcatgatgcccattcaggtcacacatgtgtgggccccacatttgccaaaatattcattcaccgcgtaattatcaataatgcaagtgccactttctccaaactcttaaaataaaaataaatataattgtaaattaattgtgtaattgacatctttgtgtgtatatatatacacatacattacatatatcccttggctatatccacttgtcctattgtttgtcacaggtgaaccaatatcaaattttggcttaatcttacttgtacatggaatgttactcttttctataaggaccattttaagaatctgattataatattattgaccatattaatcagtcggtttaacatttgggctataatacataagaggtcaacttatattcgaaatttagattttggtggaaatgtatatatatattttctataaattaatgattgtggtaggtattggcctcaagctcatccctagaaagagcccaaaaaaaaaggactgttcttgtttattccctccctagaagtagaacagtgttttaagaagtaaatttcgttttgataatcattatgagattgcatgatgatatttcgggtcgggttcggtcggatcgggtcatttgcttgcatatataggcgtaggtggggttgaatttgatagggacttaacttctccctaaaataattgatttgaattgaattgtttttggaaatcaaaattaattcatttacagcctgctatatattactaaaaataaaattctattacttttaatttttacgaaagacaaaatatgttcaacaaatattatatgaagttttttgtcaaattaattgatgaagtttcctagtaaatcaaaaacaacacttttgtttttcatcataggaacaaacacttatttacaactatatatatatatatatacgggtaaatagcgacataaatacccaaagttttatgtttgtaagtggcataaattcaatgtttatttttagtggcataaatacttaatatttgtaaaactgtaattttcttccagttttgtctgtacaaactctgttttgaatttattaaaagaacatttagaagtaattaatactatatatttttatctagacccgatgatcaaaaatttaggccttatatgtgttctgtttaagacaatattagagtttgtactgacaaaattagagaaaaattacagttttgcaaacattgggtacttatgccgctaaaaataaacattagttttatgccacttacaaacataagactttgggtacttatactactatttaccctatatatatttcacgagtaattaagaaaataaaaaaaatgaggaaacttgtttttattccactaaataaataagtaaattggatgagtaggatggagagtgcatgtcttcaatttcaaattgttgtacacaattatgattatcatatctcaagttctcaattcataaatgaaaatgtccttagaggaagtagtcattcaatgtcaataggcttgttagatcatataataatgaattggtctttattaacaacctataacctaacataagaaaagaaaataatcagttgataaatgttacattgaattaaattagataatttatttcattgtgatccctccatcttttattttatttctattttttttttaaattattgatcttagtttaaacagcttaaaaaaaaaaaggtaattactggcgaaactctttaatattttaatttttatatacaactctataatttttatatttagtggcaataagtttatttttgtttacaaatttgatatctcaattaaattttatgattaaatagtaattaggtactacggtaaataactttagataaaataaaaatatgcaacgtatacacaagtatatagtatttaatgataaaatttaattagaattttaaatttataaacaaacataaaatttaagagtatattgacacaaaaaataaaaaagggagacttaataagtgtttaaaattaaaatataaaaaagtattgtgatcaaaagaaaaaaaaaaaagaaacaaaggggtatgcaaagtaataaaacaagaagtccatttaagaaaaaaaaaagagaattaaattaagaaaataaattattgaattaagagagaaatgtagaggcttttggcgggtttctgaagttgatatctgagctaaaacactaagctccatttcacctcattaatggcgttaaacaattaaccttgttatttactccattttagatcttaatcttcaaattatatcctaacaaccaaaacccaaatactcttcctctcaaatctctccctctctctctctctggttctgtatcagtggagaagtcagaagcttcccagtaaagattccctactttgccttacatcttaagcacctgcagatccggagccgaggtaccaaccctcactgcacacttagcatttttctaatggagaaatactaaacattattcaataatataaaccatttttattattatttttttagcgtcgacttttcctactggtcaccattgtaccctgcatagcattttcggtagtctttcttttttggcgtttctaataattttagcttcgaatttaacatttttttttttaacatttgagtttttcttcattgcgtcaaatctggtttttgacgttttcctcaatcaaatacagtgttttttttttggtgcagagataaaataacatttcttttagggtactcttttttccacatttagctaagcattttcacatttgagtctcggattctctttcttcactctctgctatttttgtcagttttcgggttcagtgtatatttactggcctggttaactctggcattgctttgaggttcttcttctgggtatattttttatttcgtcggtttatggatgtgagcatctgaacgcacggcggttctcttgggacttttggatccgatggattttttatttccttttttgttgcaaatgggtttctgaacttgtccctggttttggattttacgggttctaaacctccttttaaggaacaaggtacctttccaatcgagcttcgttttctatatgtactttgcacttttccttcttgcttggtcgctgagaaaatgttggattttagttttttttttctgggtcttgtggaaactagcaactaattttgaaatgctcattgaaatgaagattcagttttggagacatagaagaacgagattgaaaaaaaatcattcagtttccagtatagtgtgccatcttagtttagagctagtgtaaaaccctgacatctttcttaatcgtgctcaatttattgctgatttaactgtagtctttgactctagtccgtttcaagtcatgaaatggttccatctagtcgagggaattgtaggatcaacctagtaggagtttttgcctatactgtttaaattaatctctaacgccatttatttcttgctctaaatgctctattgttatcctcattgttttcctttggactgggaaataattaactgtagaagttctttgtatagttttaagtcacagatcatctgtttgtatatgttagttaatacatacttggtaaaacatatgttgttgtggtgtctagagaagtgttctggagaactttaccacaagaagcatagttttatcatgctttgatgtaccaaaattttgaatatgaaagtatttgtccttttcatccagatttagtatttgttactggtacattatataatatataactacaattttcttcctctgattaaggttgaatggtgcagggtatggaaatgggacattgatcaatcactggacaaattaaacagcaatgtcaagggtcactagatggaaagttgagaaaacaaaagtcaaagtggttttcaggctacaattccatgctacacatgtaagtttctggaaaacttctttaagtctgtgtacagttgatatgcattgtatttcatagttctactctttgtattttataaaaatgtagttctagattgtctgtgcccacacttctttcttcttttagccaaaagagggaaaaagaa

SEQ ID NO: 36200 - DNA, 1526 bp, Cannabis sativa
atatttttcatagtgtaaaatgtattgattcaaaaaaattttttgaacatttttaagtatagaaaatcaaatttcccattacatattcctaaacacgtgactacatacaataaaattatacaaataactttctaaaactatttaaaagtaatttcctagaatcaattattttcggattaagctataccaaacaccaaataaaaaattaaatcataaaaattataaaacatactttgtttttagatcaccaccacccaaaagactccattgtcggctaccaccgcggttaccaaaaagaaaaattctatcaaacaccaaaaataaattaaaacataaaaataatacaatgtaacttacaaatacacatattagataaaagttttacctaaatgcaagttaatcaaaaccaccatatagcttggaatatcagtttcgatcgtatcgttccccacctaaaatccccacataaacattggagttttaatgctaaaatcctaaaataagtaatttttggtactctagatgtgattatcggtcagagaattgaatatgaaaaaaaaaaaaaaaagggtaaaatcaacaaaaaatcgtgaaaattagtcggatcacagtggttttctttaggtttttcaggttttatgtctttttttaagcctatgtagacctatgtactaaaacaagcctatgaaatgtctttatttaattttttttaacttttttagtgaaaaacagaaaaaaaaaaaatgtgttaattatagtaaactctacatcacgtgattccctgttattcaaaaaaaaagaaaaaaaaatcaatgtactaaagtattgttttaatatatagaaaaattgttagctaggagcgttttttattttaagtatatgcaaaaatcataagttgactttttttttttaacaacgtaaattatagttatattagcaacttaatttgttcgtttaaaagaaaaaatattctaaataatttatcagtcaaaaatataattggaatattttgttgcaacaactattttaaattttatttttaatacattaaatttattattaataataataataataataattgagatataacttattacatgatgaaaataatacacaatcttatataatttattacatggtcaaaataatacacaattttatataacttattacatggtcaaaataaaacacaatctgttggaactttatgaaattttataaaaaaaataaagtgtgtgagtaaatgggtcccacatgagaaatactttattaaaattgtatatgtccaagtttagaacttgggtttgggccccgaggggtacctaggtttgtgcgcatgggttagtactcacatactagaccaccacacatgcacgctgccgtccgtgctaagctgagttggtgggtgtggtgtcaattttttttttagaaaaaatttattcattaaattattattaatatttatttatttaattaattaaatattttttttttaaaaaaaaacatgtttaattaattggtaa

SEQ ID NO: 36201 - DNA, 1111 bp, Cannabis sativa
  modified_base (486)..(491): a, c, t, g, unknown or other
cactatgcgccctcgagtgctttacaccatttctgcataagtggttttgtcgtcaatagtgattattagatcgtgtctgatttttgcatttaatccatctaggtacttctcctttttactgaaattggtttgcacaattcccgaggccaaccttgccaagcgatcaaattcagtcgtgtactcagtaacattcgtattttctttctgagtcaaatgggtgaattcttttctcttggcacttttgacctcattatagtacttggcattaaacagttcctggaaattctcccaggtcattgtggtaacgtcatgaatcatggacaccatgtcccaccaaactaaagcgtcttcttgaaattggaaagggcatagaccactctatcattcccgtgacgcccataaaattcaaaatcctggtgatcacagttagctattgctcggctttcataacatcagggccttcaggaaaactggaggtgcctgctnnnnnnacctttcatacaggggttccattgagttcattgcaaccactggtttggcctgcacagcaggggcaggtgccactggcatttctggaacaagcactgcgggagcaccctgctgccttgactgctgaatcacttcctcttgttcattgattctagtttgcatttctggaagcctgttttcccaattctaggcatcttgagcagcttgggcagcttggccaacctgtggtgggttagtatcaccccaccacgtgccctgcccttgagacctctaccacagccacagacatttggggaaatctgagctccctgaccttcatttgatccaatggaattaccctggctcatggtgtttcacctggcgtccatactaatctgaacagcctgagtaaccaagagctagtcttgtcagatcatgatcaaagaaaaacttactaatgccgctaatttggaaattaaaaacatacgcatattctactatcaggctactaacatgcttcctaacaggcttttcttatatcatactataaaaaaaaaaaaaaaaaactaaaaaatctacacaaataaactcactaaatcatttttaaaatatatgtatgttattgatttattattatatgggt

SEQ ID NO: 36202 - DNA, 1058 bp, Cannabis sativa
cggtataaatttccatctctagaggtcgttaatatcttattatttatctgttaatttataattgtctttttattgttttatagttgctttattatattattattaggtattctagagttattttatagttatttttttgttgttattatgtgttttttttaattatacagttgttttttagtttatgtatttttaattatggtatatatttttaatttattctagacagtttttttttgtatatatgtgcattcgttttgttatttttatattattttttagttatttttaagtgatttttataatatttttttattcaacagttattttttacggtatatatttttaatttattcctgacaatttttttgttgcatgtgtgttgctttatagatgtaaatacatgtatttagtttattttgacacattttctaaaaatacaatgataagttttttttaattgacatgtgtagtagtaaatattgacatattagttatatattgtccattatattatatatcacacactacaagaaatgtcacttttattggcgcatttggccaaatgcgcctgcaaaagttaacgggataaagtgcctatggaaaaatcaaaaattttgagcgaaaattctgtcggcgcaataatgcaccgatataagctacctatatcggcacagttcatgaaatgcgtcggtaaaagtcttggaattaaccgccttcaaaccattccaatggtttaacaaccttttgtcggagcaattatacactggcaaaaggtaaaaaaaaatagggggaattttctcgcgtggaaacataggttgggggaaaatttttactggcgcaagtctgtgctggcaaaaggtcaccaattttttttttgaatttttagcagggaaattatatacgtcggcaaaagtcccaaagaaagagggaaaattttcgcttgggaaataggttagtgggaagacttttatcggcgtagatatgtgccagcaaaagtgtttcaaaacggttcatttttaggttaaaaattctttttgccagcgcattatttactt

SEQ ID NO: 36203 - DNA, 3909 bp, Cannabis sativa
  modified_base (3280)..(3284): a, c, t, g, unknown or other
attttaaaaaatacacggtccattttgtcatttaacaaaataaataatccaattgataacttttgtaaaacacaagatctaaaatagtatttaccactttttattacatactaagcatcacggtacctcgtagcaatactcccctcaattggacaaactttacatattgacgatgtgaccgaattaggtggtgagagatgtgattagttaccacactaatgggacaaattaccaattcaaagtgacagaattacagtttgataacttaatttaggtagttttgctgcttatggtagctgctgattataaatataaatctttaggtaattttgcaacatatatccctaattatattttttaagaatatatccctaattattagttagtcaagtttggaattaagcctgataaactataagcatctatctgaaacttaattaaaataattggcaacgatggatttatatattaattgaaatagttatctatattattgtgactatatattatgtaactatatatatatattgaacttaaaataattatataatgacttaccatggaagtaatcccaacaaatggtagatccaaccgtaccccattccccttcatgtaattcacaaccatggaagttctcagtatgattagatactttgtgaggagtgtgcttgaaaatatggtggaatttctcagctggagctttgatttctatatttgtctctagctttccaatgaggtcagaggaggaagacatttctcttttaagggaaagaaaagaaaaatagtatattaagtagaaagatctagctttagtttgatgaaagtgctcctgctgctaccactatttatagaataagttatggatcctgctttcattgtactaatattattataattggaaatgctataagggtacaattaataatctatataattaattatggggtttcatataatttaaaataataatttttataaaatatcgttaaacaatcgtaaaatatcacttctaaatattgctaagcctcgtatttctttttacatggtgaacagagtcacacatgattaacaatacaacacactacaatcggcggtggaaccccttgaattaggatagcttattgtctaaccaaagggtatgttttgccaaaccatgagctgtggaaatcaaatctccatccacataggacaaaactgtctccagaaatatagacaataaaactataacatctttgaacaataccccatcaccttgaaaaacatcttctctttattaatagttgtcgccagagttaacaaaattaaaaaaaaaaaacatcacaacatagttatattagaatgacaatcttcaaaataaaaattaatatacaagtatagaatttaacacagaactcaaattactagcttaaaattactaaaaaactaagaaaacaataaaatttcaagaataactagccaaaggtattaccctttggctagtaacaatatactaacaccctaatttaaaattgctaaaaatcaataataaacagattatatttaaaattaaaacttatcgacaaattctctgtaaatgtaggccctccacaaaacaacttacaaaataataaaaaaaataaaacttaattaccaaataatataatgaaaaaatgtgtgcgaaagaaatgatggtaaaccaattatatccatattaaaattaaggacttaaaaaaacttgaaatacttatccgttaaaataaaaaagttattgaagaaacaaaagtaattataagacttttccgtatttttactttatgatatgcttattttgattttacaagaagaaaaattaatataaataagataacaaaataaaaaatagaatatactcatttagtactttatctttttcttaaaatacacttggtaccttgtgtgattaatagtacttgtttagtaccttatattttgaaataatacacatttcgtaccctaaagtaaaatttaatcaatataattttattaatttgactaaatgattctcagttatatgtaattaaataattaaatttgaatctaaaatttgtaatattgaagacagtttaattgtattgataaaattttatcaaaaaattttgagtttagggtactaaatgtgtatgtatttaaaatacagggtaccaaataagtattattaaaaatatagggtaccaaatttgtatttaaattaaacataaagtaccaaatatgtatacacccaaataaaaaacagtaagaaaaaacgaaaaattattgtaaaggatctattccatttattaaagaatttatgatatatatatatctttacatataaagtattaaattatttaagttaaaatgattataaatattatctaatagtacatctctgttgataaataaacaagtattaaatttgaaccacctttcctaatctaaatttcatgattgatgtattattttgatgagaaaacaaaaatgtatctttaaatttttttttttttttttaaccaaacatctgttttcttaaaattaataaagatgtaatactattctcaacaatttttttttttttttaattttgggaataaaaaaattattaatcaattcctaaaagcaactctcttgttaatattatacttattactctttttcatagggaaatgtgacatctcatgcttaaattaaatgcatgatctaattaatatctctttcttaaatattaaataaacaacattgctattaggcaccagtgatgcctagcaccttgcaacatgtcatgttgcgattggctagcgatacttcctaaaagctattatattaaattatatgagatccgatacttagttgaaccaataacgatattgacacataagagggtgctaggcaccacgggtgctctttagcatttctcttaaataaaatatgttacttctttttttaccaccaattttactcctcaaataacaaaactataaactccaatcgctatctctccctctcattctcgtcactctctttctctctctagaaactcacacacacacacactcttgtcaggttttttatttggcggagcaccattgataaccaagtgtcaacccaagctctctactaacataattcttcataagacaatgagtgtgtaatttatttagttattattgttagatttagttgtatttagattgaaatgaatagatctacacatatcattatgtaggaaatttagctctgatacataggaattaaccactgtaagatcacacttaaacaaataaannnnnaatcaaaacaaacaaatcaagaacaaaaaatcagcaaacacacaaaccagaaaaatataacacagatgaatctaaatggctgtcagacacaataacacagagatttatactggttccgatcctaagttcaatgtgaacttggtcatactccagtttgaaagtattgccaccaatctttattgaaaatgagaacaagagatattaatctcaaaagctacaaggaaataatcacatcaagtcatccatggtgtaatccctcaacacacattaactcactaacctcaaccaacataatcaataatgttgctcaatacaatttccccatcccagccctctctctcttagatatctctctccatttctcactctaaccactctctctttctgtattggctctctctctctctttctctctctctctctctctctctcttgtgtttgacttcactttttttttcttgttatgaaatgagaggagtaattctctttatataggccaatgaacccaatatgcaagttgtcatttctaatagttaagttagttaaagactaactaactaaccgaatcttggttgttgggggttaaaggaataataccacaaattccaccttatttcttcaagcc

SEQ ID NO: 36204 - DNA, 4156 bp, Cannabis sativa
cgtcattgtaggagatcgaggatttgagagcgacttgagaagcaaactccggcgtcggccaatatagttcctgcaacacgaaacagaaaaaaaataaaataaatgaggctccaacctccagcatagattgactattgtgtaactttgtgtatttatatatggagtagagatagagagagattactctcttaccttggctttgctgtgttacttccagaaaggaaacgacggagcggtgttggccgtttgtgtgcacgaatggaattgctaatgctacggactgaacgctgctggccgtttgtggtcgtggtcgtgcgtgaatggcgaaaagatttggctactaagttttttctgtgagaaaagaaagagtgctagggttttttttctttatatggttatcatttatgagttgtgagggtgttgtgtttgctagggtaagggatacactgggccattggctggtgggctgaaaattgtatatattttttttaatttttaaattgtctaatgggccggcccgggttgggataaatgggttacaatgcaatcagcctgttaccaactcaatgaccacgggttgaagccttttaaacccaattaatttcggcccaataaaaatgaggctgattcagctcaaaaacgggttgggttggccaggttggtcggctcaacggcccaaatgctcagccctatcttgaagtgatgttggctctttggtaactaataaggctttacgcttgtgtataccagacttggatctggctctcatgttatgtgtgttattctggtttagaggtttgtgacagccagaaatagtagccttgttagttacataaccaagagcaatgtcagtgttatttgtgataggtatcccttggatagcaatactaggattgtcagcaacttggacactagttgtagcaggaggctcaacaatatttggaatttgtgtgtccggatgcgattaatttgaggaccagaggcaagacctgttgtgggaggagagcctactccacatgttcctgttggggaagaatgtggagtagatgctatggcatctggtatttcagtaggctatctagaagattgtcatacataaaaaatagatggttgacttggcagccaactattagtagcacaaaccaaatgaggtaaaatagtatttgttaaagcattttaattaatctcaagttgaggactcatcatatcagatatggaataggagcaatggtgatgagaacatgtagggattatagaagaaacacttggaaacttatttggtttctgtgtggaagatgttttctgacagaatgttttaaaggggaatgagaattcctcaaagacaacatctctagagatatatagttttctatttggatctagacacttgtattctttgtaatttaggctataacccaagaaagtgcatgttgttgacctatactctagcttatgtctattgtatggtctgatattgggaaaacacctacacccaaatgttttgaaggctatataataaggttgaattttgaacagaacctcaataggggatttattacctagaactggagtaggaagtctattgtggatgtagactgcagtcctaaaggcttcatcccaaaacttaaggggtagggaagcttgagctaaaagagcaaggccattctcaactatgtgcctatgttttcgttcagctaggccatgttgttggtgcgttgttgggcaagaatgtctatgatgtatgccatgttatgtgaggtacttagaaaatgatctaaactcacccacctagtctgtctgtaagcatttcaattatgttcctagttgcaattttgctaatagtttaaagtttagaaagactttaaaagcatatgatttatttttcaaaagatacaaccgtgtaaaatttgaaaacacatcaacaaaatgaatataatatttgtaattattgaatgaagtagtgtgaatggaccccatagatcagacattacaagttgtaaagactcaaaaataacaatgttagaagcttttggaaatgggaacttatgaatcttgccaagacaacaagttgaacgcactgagtaatgagaaattttattgctgatatgaatgttacaacattgtagcacagtttgtacaacttttttagaggggtgccctaatctatcacgccaaagggtaaaatcattctcaacatctaaattacatttgatacacttagacacaactactttggcgttatttagagtgaccatatagtaccatataaaaacaaaatttttatattttttatgttttgaaatcattaaattcaaaaactttccaaattttctcttacctgtttataatttattttgaacaaaagaaattttatattaaaaaactaaacaaaatacaaataaaagcagcagccaaaaacacccagtactcaaaagacaactaccaaccctcaattacattcaaaacatactgctcaccccttttcatcttgctccttttaacacccaacactctcatcttaactgtgtttctaatctctttacaaataacatttacagaataacacgtaagattaaaaacaaattgtttctattactccaaatcaaatatatagttgctgccataacaaagtatgccaccttcctgctcaaatctatacaacgagtcgaacacaatctctgcaactcgattatatttttttggctaaggaatatctcccatccacctattaatctcaaaaacaactttcaaagtgaaagagcactccataaaaagatgatcataagactcttctttatcctcgcaaacagagcaaaggattgagggaatcaacatgaatttgatcaagtgatttctagttaacaactcattacttataaccatccaataagtaaatctatatttgggaatgattagcttttgccaaacattagttgcatactcaactctattagcagcaactaaggaggtatagaaattttttatcttaaacttatctctattagctgcccgtaacagaaaatcagccacaattccttctcaaagcttaagcagcttcctaaaataccaactcatatcctgtttaattgagatgcaccataaatcatgatctttcaagtatattgaatggatccatttaacccaaatattttcttgcttactagcaatagcaccacacaaagttagccatcatggctatattccactctttcccttctcgaaagccaattctcccaaaaaaaaattggagacaaaccttttcccaagagaaaagatggaatttgcttttgttccttttccttccccaaagaaaatcatgacaacttttatcaatggctgtagtaattttctaaggaagaatgaaaagactcatccaaaaatttcaaattcccaacaacaccgactcaataagctgagctcttccggcaaatgagatatgtctgctagcctagctattaagtgttttattacaccacaatcaaaaactttccatttggtaggcctgagattaacccccaaacactttaggggaaatgaaccctctcctatttgatcaaattccaagatcttctttttacactcctctttaacacccccaaagtaaatttaagactttgatctattaatagaaagaccagaggcatcatagaactctttgaaggcattatacatcatcttcatagaatttttattacccttacaaaacatgattaaatcatcagcaaagtaaagactagagagctttacggacttacaaagaggatgaaatccaaaacccttcctactagacatttaagctaaaagtctagtaagatattccataaccaacataaacagaaggagagagataggatcaccctaccttaaacctttctcacctttaaatgactcttgatccttccattcatgagcaagttaaatctagttccttgtaagcaaaccagaacccaactaataaaacgactaggaaaatacaaccccttcagaagctccctcacaaattgccaatcaatattatcataagctttactgagatctattttcataatgcatctagcagaaatgttttctctattatagcctgttaggttataattagcctatgtttcgggtctttaaagttagcaatatctcgtctattggtgtcttttggagc

SEQ ID NO: 36205 - DNA, 4144 bp, Cannabis sativa
aaaaaaaaaaaaaaaagagtgtacttggctagatgatgagcaacaaagttagctctctaagaatataattaaaccccgagaaaccacagctttgggggacatttttatgcaccaaataagaccatctaagtctccattgtaagactctgagtgagaggactggaggaatatagtttgggcagagtccaattcaacaatgaacccattcaacttcaagtctttccctattttcaccccttctttaatggcaaacaaacaactcactcgtaaggttattaaagggtctgtcaaaaaacttactctgaccaccgacacacaatccattttcatttctaactaccactgcagcactgcacactttagccgacttatcacatgtcgcatcaacattaattttgaaacaaccaacaggagatggattccatttggttgtccttcttctgattgatgtttgcatctttaaaattcctgcaataatggtcacaccagtttaccaagtctgaggggtgtggctctttctctccttgtttgtgtttgtttcttacataccaaagctgtcaagagatgatgaggaatagatcaatgtcttcattattgcaacaacttctcatatgggtagataaaagacaacgagtctcattctttacagctcttgatcatcggccagtagggagtttttttttttccaatattttgcacttgacaagcatttccaaattgcgtacaatgcatctaaaacaaccagcctccctagccactttcttgcaaaaaaatattgataattgggagccacgaatggcttagcttccaaaaaaaaactatttagggggtgctctcattttccagattgacatccaaagggattttgttttcatagtatctgagcttttagattttttgatttgatctatggcaactctataaccgctacaaacattgtagtccctatttttagtgtaatgccaaataaaagtttctttgatacgagcctcttcactagggatgttgagaatcagccttgagtcctcgttgaaaatagctcttataaattcttcatcccattgatcattggcaagcttaagatcgataaatttgagaccaggaggcaagtgaagtttgtcataaatcttaaaagtagtaggtctaggaatccatgggtcattaagtaaatcaacctcattaccatcaccaatctaccacctagcaccctggtggagaatttcctttccccacaccagactcctccacattgaagaacctttagatccacacttggcttccacgattgatttatttaggacataagaggttttgaggaccttagcacacaatgaatttgggttcttcaaaaagtgtcaacattgttttaccaacattgatttattaatcagatgcaaatctctgaatcccaaaacacctttctacattggttcgcaaagcacaacccactcacaccaatgtattttgctcttctttttttgttgatccccaccagaaatggctagccatactgtggatatttttgatagtttttttgggaagttttaaacagctcattacataggttaggacaacgtgaattagataaactccttccatgctgctgagaacaaagatctcttctacccctttaatattttccacacattatctttgatgctagcaaacaaatctttcttattccttccaacaaaagaaggcagccccatatatttaccatgggattccaccagattaacctcaagcaacttagccaaattcatcatttcatcccgaggaatgcacttaccacaactaggattaaacttcttgagatttataagttgtcccgaggctttcaaataagtatcaaggatccccttgaacaccctacactcttcctccttatcgttcataaaaataaaattatcgttggcgaagaaaaagtgtcactgaaattgtgcttctaccaaacttcagtccattatttttccatctcctttagccttttgaattaacctcgagaatgcctcaacactaaataggaataagtaaggtgataaaggatcacagtgtctcaaacctctggatggaaccacctcacccttatttcttccgttaatcgaaatgtgaggtggttccatcggtgccaatgtgaatgaagctaaaactctgacagaatatctatcggtgtatgaaaattggtctggccagacttgtagtgttccaaatctagtgtccttttctccaaagatttaagtactagtaagaaaaaaccaattcagcaaaacctacactttgctccggtttatggtgaagagagacacgtgggaaaccctttcatcttcaagaggaaaaaaaaagagatgattatatcaggttaaagacaagaatgttacatagattggaaggttggaagatgaaacttctctcctaagcaggaagactcacgctaattaagtcagtagcgtcctcaatgcttgtttacgctatgtccaccaacaaaattcccatatcaacctgccgggaactagatgccttgttgagaaaatactggtggctaggtacggttgataaggacatatttttggctcttaaagcttgggatcagatttgtcaacccaaagagtcagggggtttgggtattagacgatttgaggatatgaatagagccctacttgctaagcttgcttggagtctagttaacagggaagaaaattcgtgtgtcatatgtctgttgagtaagtatttccatcacgaaagcttttaaagattagagcagaaaagcaataattcatatcagttgaaatgcattctggaagtgagggatatcattgttataggatcaatctccatcgtagcaagtggaaaatctattgatttttcggaatcaactgtggattccctagatggatcttcggactttcaaggagacaatggttgaactcaagaataagggcttcactattaagaacctggctggcatctccacaggtaatgaatggaataaagaaatggtcattcaaatctttggtcttgagttgggggatagaattctggctattctgaggttaccaaagacctttagggatcaattattctataaattcaaatataatgaccaattctttgtcaaagacgcctatatggcggattaaggctggaggtttgccccaaagagagatttatggaaatggatttgggatagaaacattcatcctaaagtttctatatttctatggagatctcttcaagaagctatcctgataaagaaaaagtttccttttgtccaggacaagggatgtgatctttgtggaatgcatgatgaaaacaatattcacatttttagagattgcagcttcgcaaaggctttatggttaactagttgttttcctatggtgattgagaaagtaccaagaaattccatgattcttttcatggaaaacttaatcttaagtagccccggtacttctagaaaggatctcattttatttgttggttgtctcttttctgaaatttggcatcaaaggaaccttcttagcttttggaactgttagcggtggttagtataacatcagcttttttttgagttttctactgtgacaggagacgaccccctgatgggccttctttgaggctagaggatagtaccaagaagatcctttgcgaggaagaggcgaattttattttattcaccgttgcttcctgggtcagtggggaagtcagcatagctgtcattagaatcgatagaagtactaaatggtgggcatccaatccaaagaagattgtggatgcttcggttcttgaagccgagtggagagctatcttcctgtctcttacttaggctaaggagatgaattggaagataattctaattctattggattcgaaggttttagtccaagctttgtcagttatcaaaggtcctccggattggacgattttcaagttattctatgaagtagttaacttatctaagaagttcctagtttgtaagttttgttatattaattgtatttttaactctatcgcggatggtatagctaaaagtgttagatttactagccaatcggctgctctttgccaaggagaggaaagtcctcttgtgattctcatctaattcctttgttaatgaacttgttggtctttcaaaaaaaaaaaaaaa

SEQ ID NO: 36206 - DNA, 971 bp, Cannabis sativa
gacattggaaaagagactgcaaatgctttgtcaaaggaagccaaaaagaatgagctaatttcaaggtcttctggcattgttaagtctcaaaactcagacaatttatcttccattttctccaagagaggaaagaaaggaatcaaccaagactgtcttgttgtttgggaggtaattaaataattaattaatttcttgatttttcttttagcaagaaaattaaataaaagattgataatataacttattaatttatatataggaatttggttgccaagaagacatggtgttttgtgggatatttgatgggcatggtcaatggggtcatcttgttagcaaaagggttagagaatcattaccctcttctttactatgcaattggcaaaacactctttcccaaacatctctagacctcaatttcgaaatcgaaaacgacagagatcttcattggtttggtacttggaaggaatccttcttcaaaacttatgcagctattgaccaagagcttaaacacaacaatgaaattgatacctttctaagtggtaccacagctttgaccattgttaagcaggtaattaattatataaaaggatctatatatttttgtacttaggatatttgtggagaaaattccttaatatttataattattacacatattatattaatctaaaaaagtagcgacaaaaatatttaatttaacaattttattgcaatcgtatttttttagctgttcagtgtcaactcaaaaatacgtggcgacatattaatatatcgttacgtgattctaaactggcacttaataggtttaattgacacttaaacgaaattgtaagaaaaaaaactttttccgtcactttttttattataatcatatgtgtaacaattacaaagaatttctccacaaatatacttttgtacttatagagctataccaagttaaaatattatagttttttcttttcattctaatt

SEQ ID NO: 36207 - DNA, 1322 bp, Cannabis sativa
taccgtatatatgacttggagtgattggataaaatgagcatcccacaatgggggtttgtagtttcctgatcgacggactattgctggttgttctttgaaagtagtagtggagattagtcctgtaatcatcgatgatcatatatatgtgttatatatatgcctcccacttaacctcaaatgacaatagtgggttattagctaagtgcctgcctttgcaatatatttattagatgtttccatattaataattttatataaaagtattatgcttatgaacaccaaagtcactaagaaacaaaaagatatttatggactactgtttatgtataataagttgtagttaatatatttttttaagagagaaagaggacaagaaaggaaagggatgtagtagtaatgtaattttaataacaacatttctctctctctctatatatatatgaaataataagcataaacaattttgggaactaatcatatataaatctttctattatggtgggattcgaatataattatcagcaaagacatttttatcactatatataccacacaatagttggatatatatgaaatatatttgaaatgtagaacaaatttttattttatgaaagatattttaagtaacaaaaaataaatttttttaagatgagatgagagtacaggtaaaaaaaaagaaagaaaaatataaaagtattttctatatctttatataaataaaggtaagaatattaaaataaatttctttcatatatctaaaattatttatccaatatttgtgcatgaaataattgatatcaccagccaattaattggagtatgaatttatgaaaatgataaaacctgatagtgacatggctgagatcgatatatgaaacacaaacaaattttggtatatcctaaaccacaactcacaactttattagttaaacgtataccatacaaataattatatatagtaataataatattgtttatggtgtacttacttattcaaagaacaaaaaaacatgtgcgttatatcaaacatgctacatagttggcccaagggtgggcaaccaggtactaggccctatagtttttattttttttttgtttttttttttaaaaaaggatgtatcacactaaattaaagagaaatttacggccagttaccgaaaatttgaaataaatatcacaactaccacactagtaatttaattgtgaaatataacgttaattttcttattttcttaaacacgtatatacgtctgcggctgcctattattttgcttcagatttttagtatattgttttgttcttttcttcctcttttacatata

SEQ ID NO: 36208 - DNA, 1401 bp, Cannabis sativa
gcagcagctgttaccgttgcggcggttccgttggcagcgcttgtttcgccggctaactccggtgacgagcaggtgatctcctcaaactcttcgccagtgactcctccagtcgctgccgcgcactgtatgaccaattgtacgacggtaccggagcttgtggatgagaatgagcgtttgaggaaagagaactcgcagctgagccacgagttgactcagctcaggggcttgtgtaacaatatactaactttgatgacaaactttgcctccagccagctggtagccggtggtggaggaggtatgccggcggagaaacctctggatcttatgccttcgtcggaggatactgcacataagggcggagcaccgtcgggtttgaaccccgagggaccgaaggatgaagatgaggacatgagaccgaaattgtttggggtctcgatcgggcttaaacgcgcgagaaaagacgaagaagaggaggtagatgagggtggccagaaccagcaacaaccgattttacgagatctcggacaagacgttaaagcagagccttcggatgtcaactcctctgaccaaaacaacgactcttccggtgatcggcggcacatggttcaccggcagccccgtggtggttcagttcctcgaggtggggtctgcggtttcgattattgaaaattttcaatcaagtcaactcggccatcgaggttattgatattatgaagaactttctggctcctctttcttcaagaagatgcactttcatctggtatgccatttcttctttacagttttttgtcttgttcatgggtaattcttaagaagagagaagaaaattatgacgttggtgattgaaataaagctcagttttgttgttctgcagttctaggctcatcgatagttcaagatatatgttttcttatacaagttggattgatattttgaagttttttattgtctcagttttgcaatagtcataaacattgtgcttttggctgtattgaatggcttattgaagatttagctctgtttcagggtgtgccaagaggagtggggatgatctgggactggggaaactgtttctcaaatcaggtatatgaggccaatgcaaatccttccgtagggtctggatgttggttgactgattttatagtggtttcaattccctggtctaagagctgttggagaaaatgctgaataccctctttgtttggataaaaatttgattggcactactaacctggacgagattatgacaaactgctgctgctagaaggtttgtaattcacatttccatataatctcaattttcaatttgttttttattcaagtttggatgttgtgttttttcacaatactaaaaaccataaatttgaagaaagcccaagtgtttcactcttgtttgtttca

SEQ ID NO: 36209 - DNA, 3612 bp, Cannabis sativa
tttgtgttttactggtgtttcataaaaacgcagtatttttaaaaagatttccgtgtgatagtatttttgtaaaaattaacctaaattccagtatttttgtaagtttccctttatttttttaaagctgagatgttttacttattaatggtcacttacttctgtagcatggtattcatccttctcaacatgtaacagtaacaaaacatttcatagatttcttaagagcataatgtcatgtacatccaattattattaaatgaaatacacataatatttactaaaaagatactaacttcaaattttgtgtcctttattattgaatgtttggatataaaatcacacaattaaaactgtaatcatcaccaatatttcattacatgtaaaattactcaatttgttgcttcacattgactcatttaaaaagtttttcagttaaagattacttcctttcaacttcacacactaaccaaccactcttacacattaatcttatgaaaacgcatcttaaccaaatcaaagcagaaattatgtacaaaaatgattatatataacaattatgatcaatataattctaaaagaaatacaaatctttcaaccaaaaaaaaaaaaaaccccctcatcttttgagacatttctttggttaaaaactaactactttttttggtctcaaaattaatcaccactaattcccactaacaataaaaaaaaagtgggaagactagttttggttaacattcactaatggtttctaaaacaggtttccataatctgttattcccaatcggacggcccagattaaatccttcactagcaatatcattaccaatctcttcgaaaacactactcactactaccgaaccctccaattcctcctcggccgccgcagtcgccaccatagccggcgaaaccctagagctgttcttactctttttcttctttaaagtagctgacttcacaatctccatgtccgagtcagaaattttacgattgaccctactcataggaacaagaaagtacacttttttagcaacgagatcatcctcggctctcatggccgagtacctaccagtccttcggagatcttcagccggagaaatgacgtggccgggctcctcctcgagcatgagctcggctgctttcaggggaagcttgactgggcggagaaaattccctttagcgtcgaaaagattggctgttggtagttgtggatttaccaaaacacaagacgataacgaatattggttccccatgtgttggacccttttttccttttctgaattgatcagtggtagtactaatagactcttaggtagagatcgatgtaatggaatagaaggaagaaattttagttgagatgtgttgtgttgtgttgggttatagtagtagtgttagtgtgggtgtgtgcgagtatatatataggttatataaaatatgagttatgtggtgtgagagagagagagagatagggataaagttgattggagagtcaaaggtgaagacaagagaaatgttatgtggtgttacaaacgcggatctactactaaccaagtagtgttggtttttctttcttcatttttgtgtggaggagaatggtgatggttacgcctaaataaacgctgagttgaatcttactctggatcactattatctctcctctttcttctctcatctacttcttttctattctattattgctttttaactcttactttctttctaccattattttatattattcctttttatttttataaaatgaataaatatagtgaataatagtgaggagaatcaattttgttcataaccatctccctaaggctatgtttggttggaggaagggagagtaggatggatggagaagttagagaggatggggagtatgaaggatagagaggattgttaatctcctttgtattatttggtataaggtgtgaggtgggaaggatggagaaaaaattgattagtaaaattataaaattgttcttttaaaaataaaattttattatttttttaagggtagttattgtattttgcaaaatgtattttgtatttttctacaatgcttccaaatttagagggattaaattttgaaggtttgaagggagaatgtctccctccatctctcctctccctccttcttgccaaacaagtaatttagtctcttcttccatcactctccctccatccctctccattcacctatttcaccttcctaccaaacataatttaaaggtggttgtgctagatttagatatgattttgtaatatatttatattaatttttagcacatgcttgcaaaacaccatacaaaatttgatatttaattaatattttcattgaatataaaaaataataattttattaagtaaaataataaataaaaaaatataaatagttcataatttgaattttttttttatattttatttataattttataacttaaagtttttattacaaaaatacaattttaaagttccaaaattacaaaaatacaattttaaagttccaaaattacaaaaatacaattttatcactaaaaagtatgaaaatggttaacttcgaaatttacccaggtgatgcagacatcaatgtttaacacgtggcaagaaagaaaatatctcggagttaagaagtcttgagtcatagctgtcgacctgggaggagtccataaccatacaactaggttgacttcgagaactctgaaatagatgtttagatcccgccaagttgttttcaactcactatctttcagtattttgtaccataaagacatgaagcatccaagtccaagacccgagagctaaaaatacatgaaatagtacataaaaaacaacctaggcacctagagttttaattttcgggattgtcttagtgtaaatgggtcaaattttttactgtgacataaattagacatgtcacaaacataattgaggcatcagaatcaaattcggagcactttcatttttgagcacctggagcactaagtgccccaggcacccagcacccaggttaacatattgtcagcctaggccacttctaagcatcaaattgaatacctttctcgtgcattttctttgtcttcatcaaaacacaaggaaaaagtactttggggaagaaatagaccgacgggggccataaagagggcccagtgcccaagttgactcctggtgctggcccacaacctaggttgacacatagtgctggcccagcgcccaggctgacattattttaacctgggccaattccaagaagtttttcaagaagtcttatgggcatattctctattttcgtcaaagattaagatagaagtatttatgggaatcaaacggagtcatttgatggcctgaaactggacccagcgcccaggttgagacctagtgctaggcccaacgcccacgttgacatattgtcaacctagattgtttccaatcctatttttgaaaaaatattctgggaattttttttgtcattagaaataaagaagatacaagtaaactcaaggagaaaactagaatttcaggggcatgaaaactgagcccagcgcccaggttaacaatcaacctggtgcactggttttgtaacgccctaatgctaaggcacgctacagt

SEQ ID NO: 36210 - DNA, 2105 bp, Cannabis sativa
  modified_base (1937)..(1950): a, c, t, g, unknown or other
aaaatcttcaagagaaaaacgatgagaaccaaaatcaaataacagaaataatttttttttttttttttaaaaaaaagaaagaaaaaacaatagatctcaccgtttgtttaaactttgaaactcctcctccgtcacttgacctccaaaaaccaccttgctgatcccatccgaaggctaacattatccccaaatcaaatgaattaatctctaaaatcaaacattgaaatagaaagattaaaataacaaacatatctatttttttttcaacctggtgagaacgagcgccggaacgagatgcagcggaggcgacggcgggagattcagccggtggagtttcagaccaagtaagcagatctgcggtggatgtgtggggcttcctaaccggagtgctcctctccatctctttcctttttggcttaagtttgttgctacttcccttctttattcttcttctacttcgcaagtatggagtcttagagtgagcttaggatttggacaaaaatggcggagaaacgcacagccgttgtatctactaatataagtagtatagatttaagagattaaagaaagatttgcagaaggagaaaaaaaaaaggggaaagaggagggaggctttggggagagatgttagttggaaaatgacgaaaataacctcggtggccttcaactttattggcttttttcctttttttaattaatctgaattctgggtttgttggtgttttcgtattttaaatatatatttctatttatatattgggagtggatttgaagggagagcaagagaccatattgagtgtagtagtagctacttctcttctgtttcaaaacaaagaaatcattttcctttttttttttttaattattaatatttttgttaaaggctaaatttgaattttgtaccgccccgaaccatgtgcttataccgccacgtgtcggttgttttaagtggaacaacccgaatattctttgctgaattactaaattgccctgtatcgtatatgtagatgaagtattgtatttgtatgttaccctttttatgttttattgattattattttagtaaacaaacatacaaatcttgattgaggaattatcggggttcacatggatttgtttgagtattttaatcaaaacttttgattttaattcgatgtatataaacatattcttcctaattattgcaaaacatctcacaagaaagagacaaacaaaaaagaagtttacctactctgcaaatattgagtaaacatattaagtgtttttataatgtactctaaaaataaatgcatctaattttttatatttaaaataattattattttgtaattacagtttagtcataatgaagagatgtactaaatttgaatattatgtattttatactttaaataaaactcaatttaatttattttttttcattatcaataaaagattatttggttcacatatttattttattattatatgtatgatataaaaattctattaaatccttatcattattgataattatagtattttctgcacagtagaaattaagtataactttatgatataaattattttagtctcgtaatttatctgtacactgaatttatattgacatgataattagcgatgtaatttacttacacttatataagtaaaatatttttccagtcattagcaaagtaagcctgtatcggatatattagttatacatcagactggatcgatattaacaatgaaaaagatatcataaacttatcgtaatatcttttctaactcaatgtcacttagttgatcttagatcaatgatctcaatctggaaatagttaggttcttgcctaattgtactattcgggttctttgatgtgttcgttacccgcttacctgtaggactagctcatacttacatcttagaaataccatactgcaattgagtgggagcgctnnnnnnnnnnnnnnaatctataacttctataaactcttaggagtaaaacgatagtttcattagagcttgactaaacgagtttaaatagtgaaatggtggagtacccatttcagtaattatattagtttattgaaatatcatttacaagtggctaagtattttaaggata

SEQ ID NO: 36211 - DNA, 1076 bp, Cannabis sativa
taaaacctaacccccaaaagaagttagaacgacgcaaacttgaccattttttccagtgaatcttagaattattaccataggaaccccaccagaaattagccattatagactcaatcttctgataggtttcaacaggcaaacggaaacaagacataacataagaaggcaaggcttgaatcacaactttgaaaaggatttcctttccagccttagggaaggccttactattcgatgaggttaagaaagtgctgactttatgaaggatgaattgaaaagagatttcttaggtctacgaaaacattggggcaggcctagatacttgctgacaaaatgcttatcctctaacctaaaatgtcaaaaaatggctatttgtttcaaatattagtatgtggagagaataaaatggaggacttagtaaaattaactaactatccagatgctttatgataggtttccagagtcgatttaatagttagacaagaatttgattgaccacggtaaaaaagaagctattatcggcaaacaaaagatgggcacagaggggcattcctaaaatttgtatacctggaaacacattctaacgctccttacttttaaggaaagcaaaaagcccttcagtgtaaaggatgaataaatagggtgacaaagggtcaccatgtctaatgcctctagtaagaaccatcttcccatcaacatggccattgacacaaaaaataataatgacattagaaaccccactcaacacgatcaaaagtgttctccatatctaacttgagactagcccatccaacaacctcggttcctatgatttatcacatggaaaatctcattagttatgaaaatattataaaaataatacaatcacccaaaaaagtactttgaaaataaaaaaattaaatgactaaggataggtttaagcctattagcaagcactttggacgcaaccttatacaaagttgtacgcaaactaataagcctgaatccctaattttggtagcatgagaattcttaggaataaggaaaataagagtcttattaataagggacatatcaactccttaattcaggacatcaag

SEQ ID NO: 36212 - DNA, 5837 bp, Cannabis sativa
  modified_base (5769)..(5812): a, c, t, g, unknown or other
attgtaaggtggtttgacgctttgaatgttagttgttaagcataaattgaggtttataaatatatttttagagcaaaggatcatttcttttaggtaagaggagctcattgctgtataaatagagaaatttcattcacctttctatgcatttatggggttgggatatttaatatccttttacaaaccaaattatccaggtagtatattattggttggatattggtcttaccatgtacctattgaccaaaaaagtttcaattttatgcttgatgaaaatacaaatccttaaatagattgctacctcaatagatggcataaggaggccactatatcgaggatctcttccaagcatttgaactacttcttgatcactctgcattcccatggctttcatgaccaccataataggaatctatacaaaattatcataaagaaaattgattcagtcacataatgagattggggtgcaaataataattattattatgtttacaggattaaaccttttttgttgaaaattgattgagcatcaaatacaacttcccgttttccatttgtataatagttttgctccttactgcctcagagctgcttgtaacagatgcatttacgctgaacaagaaaagatccatgtgccaatgtgacaaagcataaaggaactaaaactgagagtcacaagtaataagaagaaataagctacaaaatttcaatggatgaattgtatacgggtttgggagaaaaataactttcaaatgctaacttgactggcaaaatcaaatcaataattgtacatcatcatggatttctttttcaaagaaatttagacagattgctttctgtaattgattatgggaagcagtctaaaatattcttttatctaaacaatgaaaaggtctgcaattcttgtaaccatggttctcctctgccacaagtgaggactttcaatgtataacgggcagggacctgtctaagacaaggggttccttgctcttttcaaaaaaaaaatgaaaaggtcttaacagaacctactatgcatggattcaaaattttaaatcatatatatgacataagttgtgagatggaaaaataactagcaaaagaaatgaaaccatattaaattgatgatagacttatattagtaatccattaaaagcctgaacactaaatggaaccaaactatactaaaaacaggtataaaaaatcaaaatcaaatacttacttccccttcttgtctgtatcaattattatcctatttttagatagttgctcttgtataagaagcacctggaagaagtggcttagtcacaacatggtagtatagaatgatcaacaaagaaacaaatcaataaccaagcatccccatgtaaaacaaaaacaaaaactctccaagtttagtatatttttcgagaaaagaaatgacatgcaactttctttttcatatgaaacaacactcatacacaaactagaagatgcttgtgcaaaaagaaaattacaaaatcatttctgaaaaagattgagaatcaaattcaattctatgatgatcctacatattggcaattctactgtagctagaacttcaccttttcagttcctttgattacaaaatatcctccaggatcaagtggacattcccctttagtcagcaggaaacacatgcagaagatatttaagaagcgtcaatgtgaagtatttcaaattcaacaaataagaatttttcatatcaagcacacaaaccaagttttgcaagttcagcttcatcttttccatataagacacagcagcaactccgcaacatgataggcattcttccaataatgacgtcattctgcaaaacaaataagatagtagaatgcagagatatgtgttctgaaacaaccccatgttaccatgtatgaaatgtttgtgcttaccttttctactttagattttaagtggtgacttccttcaatatattcaacatcgactttaattggagcagcatacctaaatttataactcaatatataatcaaaataccccaaaaaaatgcaaatctgaagaaaataataattgaacattagcaaatccacaactcaaacagatagggagtgaccatgtgaagtaataatttaaataagaaattagaagaaattgcataaaactccatgtcaaatagggaaatagaaaccaatttccaaacaaaaacacatttgatagcaaagtgaaattcagaattgagtattcaaataaatataataaagataaagatagctcacgtcatgtcagataatcgacatgtttggggttctagtttttcactaacaccatccaatgtaacagatggctcgccaattcgaatatctttaaacctacaccaaacaaagacaaaaagttataaacttcagcacccttgaggtgatattcgaacaatcaaataaaccaaagtttcaaaactgaatgagcattaacgaacatcagaaagagtatatgattatattgaatacttgaatgtaacagtaaacataacctgagataaatacttgggtcgacacttgacacaatacgatcattggcacgcacaatcttttttatttcagtattgatgaagtaattaaaggaatccaagtgttgtttaaccaaaccccttatctgcaaagccattaaacagcaaagatgaaaaggcaataacaactttaaaagttgttccaagtaaataaaattacttccagttagcataccttcaaaaattcaggaagtaattgaaacttgtccacagcagatttaattggagcagctagaaactgcttatcaatgggggaacttttgataggagaatcaggaattttaccaccattattagacctacatatcaattcaaactcataattttaataagtctaatcaaagcacatgtaaattaacctcaaaatctcaatgatatttacattaacaaaaaaaactactaaacatacatttcggtgaaagaggcttctacagttttattcaaaaacaaggtgaacttaaaagccctattccggaagtgagagaccactcggcaatcgcaggtggtgtgcggctaagggcagaatgcagagagttgtgaaactgaggtttttagagaggtttaacgaatgttcactgagaagtgaggccaaggttgcaatggccgggtcgggtagagttgctaagcatggggagaaaggctattgtggtttgtggaacacaatttaaatttatatggggatgtggacaaagtgtgttgatgaggagagtcggccgtgggggtaaaggagggtgacccgttaactctctcgttaaatttagaggaatttacatgaatgtggattttgaaaagttttttactatggtaggtttaagtttgactattttttattgtattttgttatttttggatttttgtatgacttagatccgctgtaaatgatctttcaaatcccatatttaaggtacacccaagcaatcgtctgagcaatgtacaccacgattgttggagctcaaaatctgccatcgcaagcagtcgtcgacgccagccataccctaccaaccgtccaacaaacgaagatgattgagatggttcacactttgaattttgaaatgaagaaagttgaaagtaggtaggttttttcttcacacaattcagagttgtatcgatcatacattctctcctctaacaagtgtattaggtcgtttattttgttactgatatgagattttggtagttatgagattatttaggtcttgaaaaagtttggaatttttgagttggtttgatttgatttgtgattttgggatctttcattcatatgttctttcaaactctttgaatagttaggagtttaattagatttttatttacatagtaatacatataacttgaatgtttttagttaaaaacatgatattcactatttgattaattctcagctcattttcaatatgacccagagtaaattcatttatagaaaatttggtacaagaccagtacaaaggaaatacaaccaacgtctctttacagctgtaaacaatacaagaaaaatattctaacagaaatgattttctaatgattgcaatgataaggacaggtaacaaaaggtgaaacctcagcaatccagaaataacacgcaagtgataattcaacagtaaagagaaaaagaattggctgcaatcatgtgaagcagtagcagctgcaatttggtgatggcataatgttgatacagcacattggcaaaagatgttattccttaacatctccccttaaacgaaagggtgagattctcacaccgagtttgtccataaggaaagcaaattgagaatatgatagacttttagtgaggcagtcaacatcttggtcatgcgaggggatgtatctaacttccaattgtttctgtagaactttatctcggtcaaagtgtatgtcaattttagtgtgttttgttctggcatggaagattggatttgaagccagcgcacttgcactcatgttatcgcaccatgtaattgagtgtgatacaagtggaaattcaagctctttaagtaatgattctatccaggagatttcgactgcaagctaaggcacaatactcctactcgatacttgaccttgatacaactggctgcttcttggaagaccacgagaccaaagtatccccaaaatagacacagtatcctgctactgaacgtctatcatcagggcaacatgcccaatcaacatcgaaaaatccattgatggttagtttgtcactgcagcttatatgcagccctttgtgttttgttccttgcaggtatgttaaaattcttttggctccactctaatgcacagtggtaggtgattgaaggaattgacttagtttattggtggcatacggaatatcaggtcttgtatgacttagatattgcaatgcaccaatgatgctcatgtacaaagttgcattttgcattggacatcagcttttgacattggttttcagcagtcattggagtaggacaaggcttcatgtttcccatgttaactctcttcagtacatcctcaatatacttagtttgagttaggtagaatcctgagacatctttaaagacttcaatatcgagaaagtaatgtaatggacccaagtctttaagtgtgaactgtttgttcaattcagcaatgaaggtcttcattttgtcactgtcattactagtaacaattatgtcatcgacataaatcaatgctagtattatggtttttccagacctgtagaaaaatagagaagtgtccaatttggaatttttaaaaccccattgttgtagccttgctcttagtttttcaaaccaggctctaggtgcttgtctcaatccatagagatatttgttgaatttgcacacaaaatgttcttttcctttctcttcaaagccttgtggttgcatcatgtatacattctcttcaagaactccatttaagaaggcattgtttatgtctagctgcctcacttcccatcatcttgaagctgctatagttaacacaattcgaactgtggcagccttgattactggactaaaggttttaccatagtctatgtctggcctttggtgaaaacctttggccacaaggtaacacccatttgttactaaccagattgtagtgctttgaaggtgcatggtactagaacccatgttttgtttcttttttaaggcctggacttcgttgtccattgcatttgaccagccatggtgttgaagagcatcctccacactgttgggttgtggaattatattttaccaggaacttagatnnnnnnnnnnnnnnnnnnnnnnnnnnnnnnnnnnnnnnnnnnnnaaaacgataaacaaaacacataaaa

SEQ ID NO: 36213 - DNA, 872 bp, Cannabis sativa
ttttttttttttttactaaaacccgacaaccctagttgggactagatagattttagctatgaagttttcgacctcgtcatggagagtggtctttcattgttctccattctctgagattagtcttatactaatcttttgttgcctctttttcttactctctctgtgtgatccttttgtgtgttagcgtgctcccatttgtaagttcctagtctctgctcatttttgtttttgtgcttaacctctgtgtggtgtcttttttccttcatgtgtttttgtttctctcttctctcctaaccctttaagccttgtgtattgattgcgggtggggtccttgtgctttttttcttggttggaacttttctttgttctgtgtcgtatagtgtgtctgttttattgttggggtgggtagttggtctcatagttattgttcttgtctcttcttgtcttgtgtttttgtttttgagtgttatggagttagttaatgcccctgctgccacacttaaaggtaaatgctttacctgtgtggaagcttcgatttctctggctccttgtgccacctccctgaaggtcctatcgtctctatgcttatttggaaaggtggtggcgcctatgttggtggatgcagatgacatcatagaatttgtaacaaaaaactggcagaaaaaaataactgtttgctcgctcgctaagggtccagtgtcgaagaattgtttcaagcttgggttcgaaagtggtgaagatagagattgggccctggaaaatgccccttggtctttcaaaggatacacctttgctcttcattcttggttttctggtatagaaaattctaagtcggtggatatcctaagagtgtgggtgcaatttcataatct

SEQ ID NO: 36214 - DNA, 1508 bp, Cannabis sativa
ataagaagtaaaattaatttaattttccctataagtatatatttatagctacaaggaatgaaggaataaacgaacaacactatattaacattagacagcgacatttaacggtggaaaatcctcaacatatatacatcattatcacttcttattatctcttttttgtcctttaagtttttatcttatattaaataaagtaattcagatctatgaaaccttagccgtccaattaataattaacccttcccccacaaacaagtacagttcatctttatttaaggatttgattgaggctaactagctatgagatcaaagccatgcatccaaaccctacatgggttccatacatattgtctttttttcctttttcttattgtgatcgatattatattattattaaaaatacattattttaagaaaatcttaaaaaattagaagggccagtcatcatatatatatatatttatatataggcccctctacgtagtagtccccattgactctgttgttatatatatatatatatatatcaggaaaggagatattggggagagatttaatgtcaatatatatagatatatagatagaaatgtatacaaggctgaaacgtactgtcatcatctccaatatatagataagcttttttcaattttctattatttaaataatgaaaacctaaccctattaatatctatattctatagggtgtaaaaagtaaatcagttaataaacctttgtatttacaaaacactttctccataaggtgcattgtacctatcggatactccacatttttaacgtgaaattcctccaaaaaaataaaaataaaataaaataaaaacatagtaaattcatgaataacctattataaaggcatgcaaatatatagtaaaagcaatattatggagagggtagtgtgcttcactaccctagctagctacttcattttcttttaattaatgattcagcattagctctaggcatagctagcttgagctatatagtttaatttactaactatactaatgccatcaataatctagctagagtcgatctattaattccatatatgtgtatatataggtggactggacagtgtatagtggtggatatatatcaggttatttatatacgacataaaatatgtaccaaaaaagtttaaaaaaagttacttatagggataagaaattttggatgaggctgttgatcgtttctttgaattgaaagagtgattatgaaatattatatatgatcgcagccacggctctctcttgtggattcgatcatgacacacacgtgacaagatgaaaatatatatgtatagctctttctctctttctctctctctctctatatatatacatgtatatttgcctaaaaagatatatcaaataaaatatttcatatgtatatgtgtgtgaggaaaagaagctttgagtcaagataagataacaggagcattgtactgaaaaggtcttggaacttggaagtgttttttaattatgcat

SEQ ID NO: 36215 - DNA, 2527 bp, Cannabis sativa
  modified_base (2461)..(2467): a, c, t, g, unknown or other
aaaaaaaaaaaaaaactctaaaaattaattaaaataaataaagttaagttcatcttgaattttattaaaaataaatacaaacaaatcatttcaattttatttttgtagccataatatacattaggaaatatgtgtgcaaaagtattcattatcatttatgctatttaaaaaagaatatagactttatccgtatttgggttaatgtattggtcactttttataaaagaaaacaaggtaattggggaaggcacttgtgtaaaactgaatcttccataccaaaacttatcttaaaccatttacattttctttttgctttgaagtggtcaaaggtataaagggagcaatattgttctttcatcagagcaaggtttcttttttagacatggtcatttgtttctaattatctaccaaatatttcatttttaatgtgttttcatttattacatccctggattatgtctgcatttctgttttaaaatttccatatatcaacttaggatgattagttttacttgaaatttacttcttttgctaaaggaataaaatatagttattttgcaccctaaaagaagtggtcattggatggagttggtattaggctaatttaattgcttttaacaaatgccggaggcctgtccctgcatattatttttttttttttttttttttttccaaagttgggttattataatgatattgcaacaactcgtttgttggtgttaatagatactataatacatataatttcaaaacttgaccaaactgaccccagtgatgaccactataaaattgggctccatggtaattttgtagagataaagacaccacccaaaaaaaattgtcctataagacctattccattattttattttattttattttaaaaaaaatgtaacttaagtttttcaataccatgtcttataatattatgcagtgaccataaacagaaagtaaaacgcttccataattctaatatttatttattttatatttttctttaaaaaaaaataaaaaatcttccataaggcttatccattatcactaccgagcaaaagatcaacatttaacaatcaaacaattctctttttttttttttttatagaaaacatttttttatttctcatcactaaaaatagacccagttagatttttattttggaataattacataaaaataattttttatatttttttatgttcaatgcttattttttttttatatttttacgatgttctataaaaataacaataaaattacataaaaattaaaaaaaaaaataacattcaaataaaaataaaaattagcatacaaataataacaaattaacaagaatacaatataaaaatacatcaaaatactatatcttctgtaaataaaatcataaaaattgtaaaaatatgtaaaattttatacaaccgtatttttatattatttttgttgtttttgtatatatatgaaatattctcttttaattttagcaattagattttaaaaatgatttcacagttctataatttaattattataaacttttcacatttgtgatggcgactatgaatatttattaatcctcattcctcaccgcaattagactgtgattataaggatttgaaatcatagtaagtgtgaccgtagttttacaaataatatatatagagagagagaggggagatatggcccttgttgcagacagtcataagtcataatcctcaaaataaaggcatgaaatggtcctctaattgatagtttgctcttagaaatgttagttggaggttatatatgctccattaattaggtaatacagccatacctattgaggctaactatattaatttacttcaaatatcaatgtcaatatgctccaaatgcaagtaagaaatccttaaaattgctagtcaattaatatatatgtatattgacacataccccttacattaaagtatacttaagagatttctatgatatacagttaacatcttttcatcagagaaattaaaaatttagtttttatatatagatttataccaattatttaagatgttgaaataaaataatagtagttcaaacaggtgtgagttttttgtttttttaatatatatataagaagttgtttgaactttaatttcagtgctataaatagttttagatttattgaaaagttacataatgttgtaaattacaataaataataaataatgttgtgtaaaaaaatcataattataatttttctatgaactaaaaaaaatcaaaaatatatattttttttttacaattttttaaggctaattagaatttttgtccctgaatttttatatgtaccaaatcatgccctttgaatttttaaggtctctaaaaatgccccatgaacaattgagattgttagatttaagaaatttttttataattttagttgaaaagtctaacatggatgaaaattcaggggacataatttagtacatnnnnnnnttcgagggacatgatttggtagatatcaaagtttgtagatcatggtttagtacataaaca

SEQ ID NO: 36216 - DNA, 1457 bp, Cannabis sativa
ataaaatggcttaaataattatagattgttttctttgtttgcttgctctaatagaaagatacgatggttaatattaacatttacagcagtacaattttttcagcgacattttttcgttgagcaaaaaaataaaagtgagattttcatattttattatgctaaaggaggtgagattatttatcctgagatggatttgatttgacgacgacgtgtcatcgtgtggaagtgacacgtgtgcatgtggtttggggagattactgattccaggggttcggatctttggcagcaaaagaaaagagatttgtaattgtcacatgattggtccattcccaagtggccacgtctccacccctatatcactatgactatgactatcactactactaccataccatggctgaatccactcacttttaccattttgccctctccactctccacgccatttctttttgcctgtaccgtactatgctacctgaatttaccataatacccttgatagccccactcacttttaccattgagcgcgagtgattgtcgttatttgtttttgctagataataagctttgaaattatatgtaaaaatattaattaaacaataaaaatatatcaaataattttaaaatatattttttatattattttaaaaacaatgataaatttataaaaagaacttattgtataaaaaataaagtaataaaaaaatatatttaaataattattacatgttcatttgtaattatttaatattattactgtatcccacttgtaattatcaccaatacccttcacaataagttagctaggtacataaataaatcaaagaataatggcaagtacccatttttatatataacgaatcattctgttataaattaattaaattaataatttgttactatatacggttatatcaatggcaaatctaaaatttaagttgaggggcttactttttttttaagtgaggggcatatttcttttcttctatatgatataacatattaaaaagtgttatgaatttatattttttataatattaataaaatttaagtaagaaaagtaatgataaaaaagttaaacttagtaattaattaagtactaaatacaatttttttttaataaaagtttaaaaaaaaacttaaaatattaaaatttaaacttgttagaatttaaactcatgatctccactatgtgtataagataatttaactattttcttttgaaagaataagataatttaactattacataaaaacttatattttgtaattatattacttttaattataaatatatgttgtaactaaaatatatatgaatatttttttctatttttttattagggtgactgccacccttgtctcatccaccctcaggttatatagtttatttattttttattttttaattaattaataatatctattttttgacaaaattaaaaaatttaattaaa

SEQ ID NO: 36217 - DNA, 876 bp, Cannabis sativa
catgtgttacttacagggactcacagatctcctccaatcaccaattaaaggagctgagaagcatggtcttcctggtgtattgtcaggtaattgaatgcttgtataattataatttttaatgacttaatacggatattgatggatgtttgcttcttgattgcgtgtctatggtgtaggaatagctttaggtgttacaggtcttgtggcaaaaccagctgctagtattcttcaactcactggaaaaactgctcagagtatcagaaagcggagtaggctataccaaatgggatcacaacgtttcagggttcgtcttccaaggcctctaagtagggaagtccctctcagaccctactcttgggaagaagctgttgggatgtctgcacttgctgaggctggtggtggcttgagactcaaagatgaggtcttggttgcatgcaaggcacttaaacaacctggtaaatttgtcatcatcacagagagactcatattaattataaagtgctccggcttggtagagttgggaaagcccgagtttcgaggcattcctgctgatttggagtgggtactagagtcggaaattgtcttggaaagtgtaatgcatgctgatactgatcatggagtgattcacattgttggaagtagttcagataccttattgcggcaaaacaagcaggctacagggagtagcggaattagcgtacgatggaatagtcctactctccctctcattcagaccaacttagaactagcaaacacagaagatgccgagaacttgttacagattttgttggcaacaattgaacgaggaaaggatgaaggctggggctgtaggtatcttttgcaccgaagtagtattaagtaggtgcgtgtaagcgc

SEQ ID NO: 36218 - DNA, 2589 bp, Cannabis sativa
tccgatctttccaaatggcaggatccccctctcttgctctgcctctgatatgttgtgtgatggattaacggctgcgactagctgaaaattcttgacagaagccacggtaacacgtcctttgaaattgaggcaccaacattgaagttgctcgtgccatcttggagccttgtttttcagaactagaggctcttcgtcaccctgaaccgacgatggcagctttgccaagctagtggagctgaactctgtggcgggctcttttccctttaagctcagtaagggagaagaaaactgctgctcgttataggtggtatgcaataacggtttttgtatcggtgttggggtagaagcaccctccttaatacaagagccaggaatcgagtgcataacacaatgtaatctcctcggacctcttgttcgaagaacattaagctcataagagatactcccaacactgtaattacaagccggtactcttgaagactggtgcttagaatggaaccttctactcgaatggttactcggttgaactgtaggagcagcattacacggtgactcgctgtcgtagatagtgaacttagtacccaaaaaattggacctgacaagattgataaaagggtataaacaaactaaaacatagaacaacaagagatacattaacataactaagatcacttcacttgccttaatttaccaacatatttagagctggtccgggaaaaatcatctgaaaccaaagatataacaaagtctgtgtttgttgtccttctaatctttttggcagctaacaacaacttatgcctctcgctctcagctatcaattttgataacactgtaagtcaacaccataatgaatctgataaggttgaaagttttattttttggaggggatttgatgttaagaaaactcacaaggcaccagacccaagtacagataatatgttgatgttgctctatcccttctaatgaagcattgtattggattttcacgaggaccggactacacaaaaaatcagtgtaaaaatcacaagtagaaatagttaaaaacacacaaatataggattaatcattacctgttttaatgagattggaaatgtgattcttccacattgctcaggagttttgacaatctcaattataatatctctccaagacctacaaacagaggcacaaaagataacaacagctctagctggccatgaagtttcactatcctcaactcttctcaaaatgtctaaaagcaattcaggtggcaaatttgcccactgagattgaggaattgaaggagttgaggatggtactgcagctgctgcttcatcaggaacaatggcagtttgtgaccttgttctacttctccaatgctttccttcacttactctttttgacatgttcccaatcccacctttcatctccctaagctcacgaactatgcttctaaaagacatttcccctttttttgtgggtattctgcaaaatcaaaataacaaatcacactaaaccataatccttaaaattcaaatcaaaaatgaaaaagataaagaacccatcaaagactgtgaatcagcttataaccctaaacccccttttttacccagatctcagaaaaacgaattacatcaaaatgtgtaagaaaaattgaatcttgatccaaaaagatttcttctttacactaattaaaacaacccaaatcactggaaaaagagaatctaaaagaaaaattagaaaatcaaacctgcccaaatcaactaggtgggaaaatgccgatgataagattaaaagaaaagcagtagaaagaaaggtgtgtagattcaagaatgatgatagaaaaccataatagacatggaaaatcagtagaagaagaatattaaaacttgaggttgcttaagtgtgaaagaaaaaggtagatcaaagggctaaactggatccagacggacataaatgacctacttgctgtgtgattatggataagaaagacataaaaaatgagttgtattttttatttattaaaaaagaaaataaagaaaagatatttgttgtgaatggggaatctaattaagtattgtacgtacgtcgtcaactgagttaaataagtaattgggttaaagtagcttagcttaggtatacgtagtcaatatctcaaagtgtgtagtttttggtatacgtgtcctttattccactttacggttgtctacttaaaaatacacacaatatctactctttagtctttacatagtaataaaacaaattttcattatttgtataagacaattctctcattatattttaacttttttttatattaataatagtatcattattacaatactaatatatttattggttttttttattaaaatacttataatatatttttatgaggtattactatttgacacctaatattagttatgtttttcatactatttattacattaaaatatttacaacttaatattaaaatacatcaacaataatataatatttgtaaagttctattttagcaagttagttgacaaaataatttttccatttatagtaagattgttgagcattcatattcagattcttaccttataaattcggtttttagtt

SEQ ID NO: 36219 - DNA, 1982 bp, Cannabis sativa
ttgtagatggatacccttttgagcctcccaaaatgcaattcacaactaaagtttggtaaggagtaaaacaatgagcaaagttcttttattggttcattgtgcagagtaggtaattttgtgtgcataataaggatatgtatggactctgatcactggattttgtgttttgctaatcaactgtagtgatgactgatagtattagtaagtgagttttccatttgggatggcagcattttctgagcaaaaccaatagtttgagttcgttctcaagatcaggtggactggttttcgattcgatattgataatgcttgatttctttttgttttctcctattgaaggcaccctaatatcagcagtcagagtggagctatctgcctggatgtcttgaaggaccaatggagtccagctctgacattgaagacagctctgctgtctgttcaagcattgctttctgctccacaacccgatgatcctcaagatgctgtggtagcacaacaggtgttaattactgatatactacaccctatgataatcttttgctcataatttttctctcccaattgattgatttttttattattttagtatggactcttgctgtgatacacccatttgtttttaacaagtctcatgatcttaatttatcgcatgctattttgtatcctattctctcttccaattgattgtactacttgttcattcagtatcccaaacataagtgaagatcaagcattcaagtttgtattgagttgccttgttacaagagtctttttcggttcgatgtcctcttgggtatcttggtagcaattgctatagttgctttgatatgcagtgatcttagtttaaaagaaaaatgaagaagcttgtatggagtttcctgaaatcatgccttgatacattttatcttgttattattatatctttttctaagaatatttcttgtaatctaaacatatcacatttttttttttgtggtgacattttacagtatcttaaacactatcagacctttgttggcactgctcgatactggacagaaagttttgcaaagtcatcatcacttggggttgaggaaaaggtagcttagttcaaatatcatagactttatctgccaaaatgtcatgatatataaaacttaactctcaaatattggatcgaaactaatgaaatcgaaatcttttgaaatcggttttatcttctatggttacaggtacaaaaacttgtagagatgggatttcctgaagcttcagtgagaagtacattggagtctgttggtggagatgagaacttggccctggaaaaactttgctctggttaagactttttcaagagctttaataggctgggaattatactaacaagaaagattatatctaaacttaaataactcttgtttttgaagtactgatgatattttatctgatttagctacatatgggcaaattattttctggacccttatatggttatttgatttgtagtacatggaagaagtgtcaatattaaatgcattattaacaatgttgaagatttgggatttctttttttttttctttttcttttgtgaataccaaaatgggggcccttggttgaacatggttttctgacagaaaactatgcatgcattaaattcaggaaaagaaaagaaaagaaaatgttgtctctgttaggttttgaatttttcttctgtttaataatacaatatttattttatatgtatatctaaagaggataacaggtaatcctatgttgatatgtatgggagtctccatgacaagatcttaactctaaagccaaaaatgacacacgttacagccaaaaaatgacagagcttacaggctagaagttggatgtttttctcttcttaaaaattgggatataatattatggaacaaatatcaagacatttccacaaacagaaaggtaaaaccagtactttaagataagagaacagaaaggaaatccactttatttatacttg

SEQ ID NO: 36220 - DNA, 1746 bp, Cannabis sativa
aaaaatcaacaacaaattaataaagagtacgacataaaaagaccgtattttttgtaaataaaatcaaaaaaattataaaaatatttaaaattccgtgaaatcgtatttttgtaattctgtgagccttcagccacgttcttcaactttttttatattgaaaacttgaaacagcagcctttggcaatcttcaatctttgtcatgatcatgcctttgccctttttctctttgagatttccaatcttcaacaaatcaaaagagtatttatatataaaccattaaaattggctcaacaccgtcacccttcttctcagcaaccatcattttccttttctttctttgcaacacaagagccaaggtggtcatccaatggctttctcctattcggcgcgaccacgattcccgctgcccgccagtaaccactccatcccgtccattgtcgttcaactttgtttgtcatcttcgatcgatatccaacgacgtccacaatcaaagatccacctccattctgactgctgcgtgtggaacaattcccatggtgtgccaccatcaacaccgaaaacaacatctcgtatgaccacagtatggtccaaaaatgctccactgacagtaccatacatggaagaggatcagattgcccgatctaagggtggtaaaattgcccgttccaaaatctctgatggagcaaagagcttctcctccaacttcagcgacctgcgattcactcttggcagtgcttccctgccatatcggatgagacccaaatcgatagctatgtgtgaagcttccttaggaatatccgatggattctcacttttcactaattcaacagggtcatcgttggggttatcaacctctgtagaagtggttttagatgaggaatccggcaattaatgcctctgtcgatgggcaacagcattcaaatatggcatctaattcctttaattgagccttaaaacgtcgtggaaacgaattcaacaagctcttcatcaatcatagtgacactgagattctctcaatgaaagtactaatgatacaattgtattgtattaggttgcattttttaatcaattttaattctaatagaaataatcttaattttctctcattttattcattaattctctatttgtaaaatgactttacatattcatactaattacgcaatactaataattactaattaatctctataccctttcatgtaagaccaccaatattacattatatgtgtactttcatagttattaaatttcacaacaaaattcatattttgataacattaattagttgctttggttttattatattaaaaaggatggattgcaaatgcaagagtcaaaaatatagtcgtaggccactatgtagaaatcgaatgtaaaaaattattgtgtaataataataataataataaaaaaaatagtgtaaaaaatacatattctacataaatataaaaaataaaaactgttaatttttttttaaaccatttggttgtaccaacgattcttgatattaatctcacaccttattgtggataatgtcccacatggaataaatggtagagaattgagctatataagaacatgaactactccactcattgccaattggttttgagatgcaaccccatgattctcaacatggtatcagaatccgatccgcacctataagtatcttgagggggaatattgtggacaatgtcccacgtgaaataaatggtaaagaattgagacatatataagaacatg

SEQ ID NO: 36221 - DNA, 2779 bp, Cannabis sativa
aattatgattggatatccgattctattggatcggttgggattggatcgatcggttgggattgaatcagatgactttctgcacacccctacttaaaatgtcaatgttgtagttgagatcattgtagataagctcacattggtaaaatacatttttattttgtttgcttccagagaaacttgtgttatgttttgttagttgccaaagcaactgagtactgagttaaagaaaaaacacaactttgaaccaataagattatatattactttggtaaattactgagggtgcattggcatggtggttggttggtgatagacaatagtcctctatttttcttttctattattttctatggaaggtttcttttccaaaggaattattgttcaaacattcagaaaagtaatccttttgtgtggatggttactttagcctgtatcctatttatggctgtttacaacaacccactatcttcataagcaaattatgcaaataaaagtatgattcttttggtcgttttgttctttttttttttttttttttttttcttgttttaacatgggaaaacagtgataagattaaatttcattttccatttagaaaattcataggtaaaacgtagtattaccaaaaatcactgcaagtgcagtgaccatttttaaaatgatgaaatctattaacatctctaacaacaaaatccctctcaacaatcttactaataagcttgaatgcctcatggcaatccgtacacattctcagattcttcattattctaatggtgaccccttttggtatatttagcaacgcaaaacccaaagccaatctctcactatgcaaaccaactatttcctccttggcttcctcttccacatcaacaaacaccaacccaatactgcctcctatgtaccctctttctttcattctactttccaattcccttaacaaattcaccacctcagtgccctgtttgcaagatgatatatctcctgcataaaacacatatgttgaatctttgatctcaatccaactgcatccgggttcttttcgaacctgattttgtttcattttggacctaatattatgagctttgtcccattcaccagccaatacataagtgtttgacaaagcaacatatgcacctgcaacttgctgattggactctataagttttttactggcttcaattgcaatgtctacccttccatgaagtcgactagctgaaagaagcgtgccccacacaagagcacctgagttttggtctaactggatggatttagctagttggtaggccttgtcaagttggccagttcgaccaagcatatcaacaacacatgtataatgctttggactaggcaatatcccatgcttgtcaaacatagaattcaggtgttgaaggccttcatcaactagtcctgcatgactgcaggcgtgcaatactccaacaaaggtgacatcattgggctttattcctctttcaatcatctctgaaaagagctcaagggacattttcccgagtccaaacttggcagctccaacaatcatcgaagtgtagggaattacagaagcgtttgtgattctcctaaagatcttatcagaataatcaagaattccacatttggcatacatgtcgacaagtgcacttgcaaccacctcgctcgaatcatggccaccgcgaattattgcaccatgtgcaactttcccagaaactaatcttcccaagcttgaacaagcactgactatactagccaacatgaaatgattcggacgacccaacatcaaattattgaattctctaaaaagttgtagagcttcatcacctcttgcattctgggcataagtagtgatcattgaagtccaagaaacgacatttccacaacccatcaagtcaaaaatctgtctagcaccgtcaacatcattgcacttaccgtacatatcaacaagcgaagaacaaacaacgaggttaaatcgaaagcctaaaacttggacacgggcatgtatttcttgaccggttttgaggttggataagaaggaacatgccttaattgcagtggcgaaagtgaactcatttggggtaaccgtacactcgtgcatctttgcaaacatagagagagcaatttcaggtcgccccacattgacatatccagagataagcgaggtccaagacacaacatttggttcggacatttcgtcgaacaggttgcgtgcatagtcgatcctgcggaacctaacatagcaattcaagagatggttggcagtgaaagtgtgagtaagcaagccaaacctgagaaagttggaatgtaagatagtagcggaaacgaaattggttgagttctgaaggttttggatgtgattttgggctttggtttggaaaaatgacacagaaatttggcgggaaggaagtggagggatgagggcagaaacgacatttcggttgaaaggcctcctcatctgtcatgcgatgtcgttttggggttatcaagtatttattaacacaaaccaaaggttcctcaatgccatttaatctagattaattatactcaaatatatatacagtgacaatttaaactaaagatctaccgtttgtaaaacagtgacacagatcattgtatataatattttacaatttataaatgtatttctttaatattagttgatggcacaaaattaatatcatcttcagaaaaagccgattttaccatatattattttttaattaattacaatagcaccatattttcatgtctatcagtgcatgcaaccacttagaaaatatgataaatatat

SEQ ID NO: 36222 - DNA, 6330 bp, Cannabis sativa
agagttaatgtaccctaatggtaacatagagatcaccaggttgatttccatcaggatctgccccaccactaccaaagaccttaatagtttcattgtcatctactcctgcaaatgataaacataagggagtcaagcattttctttgcaacaaaaacataatgaaaagatttcttaagctctaaatatttgacagtacaatgagtcaacatatgttggagccaaaaaccactgattacggtaaggttgaatacaattgtagcaaaattctcattgtaggtgtacctggcacaatatctaacttgactgatttgactccactcatcactcgttgaccactacaagatttgcacagtttctggtagaatacacaaataattaagtatggacatgtcaaagtttggcattatgctatcaaataaaacatgggatgaaaaacagatacttaaatattaacagcactgtatacaaatatacagatatataatatgtgtgtgtgtgtgtgtacaaacagcaatcccagcatactcaagatatctcctccctcgcacaaacattggaacatacacatgacaaaattgaaagacataatcagtgccaagaagatgaactccaaccatcacttcatatccccttccatttatttatttatttattttgaagcaatgaaatcatttaaaataatcatattgtcacacacacaaagctaaaaaatctaaatattataaatgaaatcaggatattttataaaaaacaatgggaaataagtttagcattataaacagcactatttagactataattttgattatgcaactacaaaacatgggaaacaaatagttttgcattataagcgaaaaaactttgaatacaattttgattatacaactaagaaacaatggcgtatatgtataaaaattttctagtaacaaatgaaaacaaagatgcttctacaatgcgacttcatcccactgaaatttataatgttgagaatacattgctcatatgtcgtttcagtcattaacaagaaacagaattttctaggctaccaggcccctcgcccggtacccaacttcattccattagaaactgatcatgtaagaaatagaaacatgtttgcaacatgaaaatttgaacactcatcctatcagagtttagtaagtattagcatgtggtaaagctcaagggcaataaacccctagtgattcgattttcttttgtaatactaatagcatattcaatgagtgagttgttctctacttccaaaaacacagtcaaaacagcaattcaagaaataccaatgaaaggagattattttcaggtgacaactagaagaaaaacagatcaattatttccagaacctacaaggctatggtgccaaaaaaaaaatgcaagataatacaagaaccataccgcaaacgtttttccagttccaccacactgagtacaagttgtttgcatcctaaatgggccggtttgcatgaatgtctgaataaggaaaattatgagttagttaacaagtacttgacatctttattttacatgaaaaccttaatatttattttcaagaaccaaccatgccagagcctctacagcgcttacaagattccggtctggttccaggtggcacaccactcccacctacatagagcaggataaacttaaacaaatgaacacttgaccaacaataaatcaaaagcaactagacctctagtacgtaaaattaatcatcataccacaagattcacaaggcatagcagcttgaaacgtcacagttttactgcatccttgcacagcttccatgaaagatagttcaatggaaacctacaaattatttaaaacaaatgaataagatgaacatcaaacatgacagctgtgtagcaagagtgatacatttaaataaaaaagagtataaaccaccttaacatcttgacccccaaaattctgtctgaaaatgttgaagatctgccagagcacagttatatcattgatgcatggtgcatcaaattaaacaaatttatcgttaaaaagttgcatgattaaaattatagtaagagtagtacactttaagtacaatcaaaaactcagaaagtagtccttacattatcatcaaaaatatctttgaatggattcctaaaatcattggggaaaccagagccttcttgctgctcaaacgctgcatggccaatctgcaacataaagcagagtaatgaaatagatattcgtgtaaatcaaattaacaacaagaagtgcaatacagagaaaatgcttgcataataatgatggaaacagtaaaacaaattaagtgaagaacgagttttacattttaagatattccaacaattaagtattaactcaacagagctctttccatatagcattctaccctttctcaactagacattggtacgcagcagaacctccctttaattagtttgttatcacatatatacaatgtgaactcatggtagctcaagggtacagtgaaattaaccaagcatcattttctgcactctagcaattcaaatgaaattttcctaacacgtgacaatgagaacaccaaagataccgcagaaaaacggtttattttgactcatgcattggagaggataaatgttattcagggctctcgttgggcattgcaatagggaggaagtagaatgaaccattctcattattggcttggctgtaacctgtaggaggtgtttccaatgtttattttaactctaagcttggtatctgtatactctagccccatcaactaaattttagtaaaattgagggcggcctataaaagcctagtcccatcaactggatttagaaagataagaagggtctttagagaaaactcaatcctcagtgagattcaacggtaactaatgcaggagaaagaaaaaatgaacacaaaactaataacagacattaaggatggtaaaaaagcaagagaagcttttcatctcaaaaggagaaatgtcaacaggtacagaatgtataagaactattccatttcagtagttaaatttcccattgaacacacacacacacacacacacacacagatttcctacttgaaaacctgccactgaaataaggtcaaaacaatctaccatatcaccggattcaactcaatcaaatgtatttcagaaaataagtaaatgaaaaaaacacatcggcaggtaacataaatatatgtattaagatgagtcacaccacacctcatcatattgtcgacgcttatcctcatctttcaaaacctgcacaaaaaagcttggttttagcataaactgattagaataaatttagcaagttcttcgtgcaggggacagaccacatatagcacttcctactcagtgtgtgcaaaagaaattgtgagactatcatttatttttgccaatgagaatttgtggttttggttatggagtgacataaaatacatgaaactgtgtagttatggctatcttattgcatagaattcttctgtccccaaattatacacctccttgacacaccacaacaaataaatgttgtataaatgtgtaattattgataaatatgagtacaaattttagtaagtagttgatttatcaaattttaaatggtgggacagagagacatatatttggagaatatatttttattctatcttgttgcctttttgaacgtacaaaaattctcacataggtttgccacattttttttccttagtgaggaaatcaagttcgttgccaatctttgggctttggcagatacagattcaagaatttcgattggataattccaggctggaaaaatactaagatcagcatattattttatttttctatgttttgaggatacaataactttaacatgtaattcattttttgtaatggtcttatacctaatttcatcaatatatataataagaaaaataattgaagataaaacgtaagtttacaacagaagtaatgacttggtttggaatgagaaggtagtctatcttgagagtattgttgcttttgctaaagggtatcttgatcaatggagagttgctcaaaactcaacctttgagtcgtcatggtctggtttacaggcgagtgatggggccgagcagtggacttcgccaccagagattagtatcaagatcaagatcgatgcaactttatttaaaagtgggcaaagctatggctttggtttgattcctagggagtcgaatggtctactcattgaaggttacacttgcttttccttgggccgtgtagaaacccgaacttgctgaggctgtgtgggagtaagagaagctttgagttggatcaaagaacatcgttgccagcatgtcatagtggagacagattgtttggttgttgtgcaagcacttcggagttctattcctatgatttctttatttgagtttgttatccgtgattgtaaaactctacttgttgaattggaaaatgtttcagtttattttgttaaacaatcagctaatatagtggctcatagttttgctagggcctctattttgtatcctaatcatcgtttcagtttgaactttgttccaaatgatttgttacctagtttggtaacagaggttagagtttaaataagaatgattttaccattcaaaataaatactacctcataagccttttgaacttcttgaaacttcttttcagcctcaggatcctctttatttgtatctggatgaagcttctttgcaagctggaaaacaacattaaaataactgatgaaaggagatgtagaaaggagtaactcaagctctgtgactaacaataaattttgttcttacatagattacaacagcagaactttaatagaaaaacaagaaacaagtatgagaaataacaccatgcaagattacatatttaatatttaagacaagaaaattacttcctccaccgaaacgataatattatttaaatcactttttcaattgtaagaagaacagtatactagagaagcaacactacatgttccctttgatcattacatatatacatattgaaaaatatacatatttatataataaaaaaaatatagaagcaatactacatgttccctttaatcattacataaataaatattgaaaaaaatatatataataaaaatataccatttgatcactacaacaaattaggtgattagagcaagatggaacaggctacaaacccattccatataatttctattaataataagaaaaacataccccataatatgctttctttatttcagatgcatttgcattcctattcactccaagaatatcataaaagtctcttgacgccatggaagctacaaagaaaaataaaaacgattaaaagggacaaatcgtgtaaatagtattgacaagagaacaaagagccacaaaatgcattctaaaaaccaaaaaatagatacaagctccacattctcctttcttttttgaagcactctatagatacatttatggatattacaataaaaaatggacatccacctcaagtgacaaattttccctattgcagatcacaattgtaagttgagaaaactaatttgtagagaaaatgtgaataaattattgcaagagaagaaaattgaatgaaacaaataaattcgtgcataatatgcatttcccattgatacaaaagaataaataacaatagtaaaagcttacaccgtaccagtgccgtgaaatgtccttgttgagccaaacttgccatttaaacctcccaatacgaaccagttcttataataaactacaaaaaccgtgagataacaatgacaagtaagcaactcaccaaaactgagcgagctcaggcattttacacttccaatgccaaaagacaatcaaaaaagaaacgccaagcttaaaactcaaacccacgtaagaacattctacgtaccattagaagtgtaatttctaaaaattctagatgggtttgctcccgttgtcttagaaccacatcggaatacagtctcgtacacctataaatttcaccaattttttttaaaaaaaaaaagaaaaaaaaatagaaattaaatccatggctaaaaggaaaggaatcttaaattcagagagattgaaaacgtacggagtttcgaggattggaacgacgagtgaggcagtggaggagcctaacgccgttcaatcgaaccatcggagaatgcttatctctctcgaagcttcttccaagaacttctgcaaaagtatggaggagttcttccgaggaagtttggaataagttaaaccctaaaaaaaccctaattggagaaagagaggctctcgaagattccagttatcgcagaaccacgcaacacccaaggggcttgaaggttttttttttttttttt

SEQ ID NO: 36223 - DNA, 2521 bp, Cannabis sativa
  modified_base (408)..(409): a, c, t, g, unknown or other
tcttgattattttatacctcttcaccatgttactttaaattacaactatattaaaatagttctatttattagttattataattcaaatacctactaaaatagttgtgacaaaaataatacttaaaaagattatttttgaacatttgaagaaaaagaaaaagtttagcatttaactaatttggataaaatattagtataaaataattcctaattgtaaagatacttgattttattattctttcgaaaacttttttattttatttaaccagataacttataaatggtatgcactgcatgttccaaaacattcttccctactaaattgtgagataaacacattaacatttgctatacagataaacacaaaatgtgagataaacaccaatttcttgagagagagagagaganngagagagagagagagagactgagttgggagttaggtttagtgttattgagatttattttcagcttacttgaactcgagcccaaagtgcagattcgaaatgttcactccatttctacctgcattttaagcataaaaaaacatccaaattaatttgactgagcaaaaggaaatattataaatcaaaatcacagttcataaacctcttacatccatctcagagtattcatttgcagagttttgctcctctgaatagctaagggactgaaacataattagcttagttagcatggttagcaatagcatattcaaatggcaaacatttaatttggaggagaccaagaccatattaaattattaatctacatgtaaatgattgaatttggctcacattcacaattgcttccacggattctttgatatggccatcattatttgaagccgatgtaagggatttccagttgtaagtaaaatctctatcttcatcaaactgcaattaataaatgaagatcataaaatgaaatgcaaaccaaaagaagtgaacttaataaatgatatatacacaatgatacatatatacataattgttcttatagaaaaatgatgacgattcttaaattctatcaaaatgatcaatgtttgccacaacagatcattagtgtaagtacctcaatggagatagcacaatcacgtgtcttcgtagaaagggtttccacacaagggaaaatcttaaccaagggataaaagaaattggcatattgtgaaattaggtaccgtgaactcgagatattcaaatgcctcagctcaaaaaaggggtcaggaagcatatcattatttctcagttcttcaggaaatccctgaaccataaaaaaagatgtataaacttagattgaattgaattgtagcaataaaacaaagtctatataacactatcaatattatattagtttacctctatatgaagagccatagacaatacttcacagtcacaaaagatttcaacaaagtttctcagcttaacaaaccaaaaccactctgttccatcaagataacctgtgtacaactcaatttttgcattgagtttcccagaacaatatctaattttaaacaaggtaataacggcgccagaatattcgaagaatcgaaggttgggtgtgttgaattcagctttgtgaagactaaaacatcttctcaccaccaaacttttgagattggaatgagaaatctgaacaccctccttctcctcaaccatgtgacaacactcaagattcaaatactcaagaaagggaatttgagaaagacattcctcaaattcatcagcggtatgaaatgtggtattctcaatgatcatactcttcaaaaatttacaatttttcaaaaatctaacacttccacgggaattcaaactcctaatgtaagtgaaagattggagattcatagcatcaatggagatatatttggctgtattaccaaacatatttgccaccaatactttgagtttagggcacgaaataagtaactcagtgaaacgaaagcaaaacacaacttctaattcttctaacaaaggaagactagataacagattctttaagctaccttcatctatacctacacaactcaaatgaagcttctttacagaagagattactggtaatgaattccctaatgataattcaaagcaattcattgacaaaacatcgagcgatttgcaggcagaaaacaacgaccataaagaatcattagacgagatcataccagaatatactttagagcgattttgaagttgtatgatttttacgttacggtttgtggctatggaaacaaattcaataaggcgaggaaagaatataccatctttaccgaggtcagaacagagagaaagcttttccatcttaagtgtatgatcgtcgcagtggttgagccagagtgccaatgtgcgttccacatagtcgtagaaatctgcttgtttgaaaggtagggtttgttcgtcaaattcgaagagtggagatgcaatccaagccgatcgccatagcttcgaggttagagaagctcgaattgcgtcttttggaggaagaagtttcaatatggtttgaatgagtggttccggaaggggat

SEQ ID NO: 36224 - DNA, 1742 bp, Cannabis sativa
  modified_base (55)..(72): a, c, t, g, unknown or other
catgcaacattaaatcttatttctaatctatattaataagtaaatttgattatannnnnnnnnnnnnnnnnnagggcataaaacccaacataatccaccatagatggtatgccaagaatggtgtcatccatccaggtcttaaaatgctccccgtgtcacccaaatgaataccacgtcatcctatgcagaatttgagatagcatttgccccctaagtcctcgtgaaaagtttttgctcgcacgtggacttattgcgccactaagttagtcatatgggtgacatttgtgtacagtcttcgtaccatatcgtgatccgatgtgatttgatgaaaggagtgcagatacaattttctaagtattttggcatttaatgtcttgtcttgaaaataaaaccttgattgggacaatgattgttattaagtaccgagtgcctaatatgtgtactcctcaatatgtgaggattatactttattgggaggaaatccaaaacttatattctaaattttagaattacctttctaaccgcccatataaggtgttaaaatgttcttttacactcttttagccatttttattttcaaaaaaaaaaaaaaaaaccatagcacaaaaactcctttatccctctacaatttttgaagaattcttacttgatttacagaagcgtcccaggcaatattagagaaatttgatattttcacacgtaccctattgaagaatcttacaattataaaagtatagataatattttaatttctcttttataatgttattttgcaaactgatactcttttgataattgatgtaaagtaacattttagtaaaattactttgtaaaaatttaattagaaaattttcattttttaacatcgatgaagagtacgatttggccttaaatttttagtaatcaatgtccataggcaatattagagcataaatgtttaatttatattccatgcagtaatgttaagcttaagaatattgttgtacaaggaaaaaatagtttattaatttcagcatacaaaaaagtcttttagtttataatatagaaaataagacttaaatagtttattgtacacacgactgttttttgttatacacggggtaaccaattggttgaatcttatttttttcaaatagtcataaataactataacatacacgatcataataaaaataaactaaaaaactcctttagatgtcgaaacagataaagggattaaaaatttaatagtattatatatcgtaagaaacatttacagtgcaccattgaaaaatagtgcaccaatgtaccacttattgtttcggcattaaaaaaaaaattaatctacttttttttttttcatgggtatgttgtatttatttaaaatattttacaaaattttgagatattcaaaataattttgaatgttagaaaaaaattataatatataaaatttaaattatataattttttataattaaaactataaataaaatataacaatgaaaactaggcatcgtgaattgcacgtgttagcttcatctagtgttaaataatataggtgacgtttggtaatacttttgctttctaattttttaatcataaaatgaaggtaaaattttgtttttaaaaaacaaaaatgtagtaaaatttttgttttttttaaaaaaaaatgtgctttgtaatcacttttatttttcaattttaaaataaaaacaaatgtgtgttctgtaaagttcattttcatatttattttttgattt

SEQ ID NO: 36225 - DNA, 2040 bp, Cannabis sativa
aaaaaaaaaaaaaaaaattgcttccactataaagtcaaaattaatactcataacattttcctttatatattatatgaatatatgattgtatatgaatttaaattagaattgcatatacatttaaattttccataacaatttatctctatgaatagaaataattaacaagccaaatcctctattaaaagggggagaagagtgtccttatcataaaattatattattgtaatgaaatgataatatttgatttgattttaatgaaataatactatatgagtcattaattcataaatttgatgacaaatataccaggaatattccacaatgtataatatatagctatagcaacaacttaaattcatacaataataaagaaaacacaaaatggaaaaaaattcaagtatgaaatctgcattgtacagagtgtccagatcattatgacctgaatctactctttcttaatttccatttcaatatacatatacagtatttacttgtcccttctgtatcaaactacttttgcaacatatggccattacgtacacgtgtccaactgggggataggccacgtgtaccacatgtaatgaatcttccataacgttaaattagccaatggtcacgatcaaagcatgatatgaaaatctgaccgccattaaattttctgcatatatgttcataccataaaagaaatagataaatgtaactatatataaaatctgaccaggttatttaactaattaaaacataaatataaaatgaaactctctgggttgttccactagagagatacagagttttgcttttctttcttcttaattattctttgatatatttttaaagaatattatttgaaaatggctttgggaattagggtttgtctgtttctggtgtactcattcaccttggctatggtttgtgccgtcttgttctccggcactgtacaatcgtacaaccgtccaccgccacgtaaagatatcagcgttgattacaacaaagacgattaccatgattcttctccacaacaggtatttctatataaatatttttttttcttgatttaactgtttcttgagtatattttgtttttcctttttatttatttattttttttttgataaagtgtaattggtatatggtttatgatgttagaaaagtttggttaacaaactcagtttcggtttcaaaagtaagattcagaaagtattgtatgattattgtcgttatttgtttttttttttttaattaattcaaatctgtcgtttatttgattttgcctcatttacaataatattttaaagctttaaaatagaaattttttaaaaatatttggataatttaactaaaaataggtaacatcaaatgttgtaaacatttgctttattttaatttttttaaaatttattatttatgttttaaatttataaaatattatttattattatttttttgagaaataatattatttattatttgaataaaatatattaaaatttaaaaaataaaattttggtgatttatttttaaaaaataaatgtatgatgtaatatataaattttgaaataaataaaaatataaaattttaataatttttattaaagtatagaataaaaaaaaaaattgatgccatttgttagctgtccacaattttgtttcattttgtagttatttatgggtgagcgtcattttttttggataggcatttagcgtaagcgtcaacttagatgcgcctatgttttagttttattaggcttgtacaaaaattttcgtaaatcgtttcacccgaataactcgtccaaaccaaattgacaaaaccgataaaaaatacaaaccgacataactcgacaaaatttcaaaccgtccaatcagttaattggcgtagggatgacaattatacccgcgggtacccgattaactttcggaggcgggagcaggtatgagtttcaagattcatacccgagtcgaaaacggagcgggagcgggggaatagatacccgccccgatatgatatatgtatatatttaaattttaaaatcataacta

SEQ ID NO: 36226 - DNA, 933 bp, Cannabis sativa
aatgtattctaaattatcgaataacttatacattaattctttgttcaataacttgataactttatatagtacttatatataatagattttagtgaccactttcttaattaacacataataggccttcattttcaaccctatatatagtggtagactatgaactaaatataggtcttaattaattaatatgatatagtttctaaatgtaattaacttgtgtatttcaaaattctatcaagaatcaaatcagatatagcaatgctatttattggtaaaacaatatctttgcatatgctcaatcgaatatatctttcatttgctataactttttcttttcatttgtcaaaatgtgcatttctcccatcttatttaacttccctttttaaggctactaatatctcatacatagctagccctagaatatagggtatatgcctttggcatatatagtttctatccgtactgattcatttattgaaaaattaaataaatataacttttagccaattaatcccttttcatatttttaggtatataggatttcaagaactctaaatgataatattaaggttatattgggatgggaatttgggttagtaaattcgtgcagcccaaactaatttgctttttctcatctaataataataggaatcagtttgtggtagttgatgacggttattatttgattatatataaagtaataattgtactaataatattattacacaccaagtgggtgcataatgaattggtggtgctgcactataaaaccaccaccatatatatgaagattatcttcttcaatagccttgatttttaatttagtttctaataaatttctctactataaaagaaggtcagaaaaaaaaaaggcttcatattaattaatcaatttggttttcttttccatttttcaaagtgaattttaatcat

SEQ ID NO: 36227 - DNA, 1372 bp, Cannabis sativa
  modified_base (946)..(953): a, c, t, g, unknown or other
ttgaaggaggagagaggcggtggggaaagctcacggaaattgaagaggtgggtgatgtagtgagagtcgaggacgcagaactgcggatcttgctgcatctccatgagaacctgaagcagagactcctctgagagaaggaagaatccgaggcgagagggctcgatgctgatcttggaaggagaatcgaccataaccttacggacagagatggtgacgtgacctttgtgggtgaagccaaacttctcgaagaggatcatggacctcgcgtcattggaaatggttagggttttgatctccgccatagcagcggagacgaggaggaggaagaggaagcagacggagggcattttcgccatttcgactttgggggttggagaacagaggaactgaggacgaagaagggcaaaaaagatagaaatggttttaggcctgtggagaattaggggtcaaaatgcaaataaaataaaataatggaaacgtggatcttaaggctctgcctttttttgagtcacccgagaatacccttgactttgtgaaaatctcagatctgcgctcttacggctggacgtttgttcgacgtcgttttcgttacttcaaacattgcaggcccagctcaaaaccagctgaaaagggctcattagaaggcaaggcccaaatgaaaatcttcggccttttagtttgggataattagataaaagaaattacactggcattttaaaagttcttatgataaatatggtacatttaagtttgaccaatttatatggtatttttttgtttttaggtttttttatggtatttgtttttaggtttctaaatcccatatttaatgtttttatttgtttatgaagttttatttgtcatcgatgccggaaaaatcactagagtttgttgtcggtaccgaaaaagtcgccggagtagcggtcggtaccggaaaagtcgtcgnnnnnnnngccggcgccggaaaattcgtcggaattggcattgtcgcccgaaaaatcactgaaaaatcaccaaaaaaccggtttcttgaagtctaagaaaccggtttcttagtgatttttccgttgacaatgccaattctgacgacttttctgacgctagtagctactccggcgacttttccggcactgacagtaaacttcagaaaagtcatcagaattgacatagtcgccggaaaaattaccaagaaactggtttttggtttcttgatgaagaaaccagttttttggtaatttttctgacgacaatagcaattctaacgaattttctggcattgataacaactttgacgactaatacaccggcagctactccggtgactttttcagtaccgacagtaaactctgggaaaaatcaccaagaaactggt

SEQ ID NO: 36228 - DNA, 3547 bp, Cannabis sativa
tttaatctttgtaaacaagccaagccaagatacaatatagaatagaaaaccattaaaagagtaataggatcctcttacatacaatgtgaggtaaaccatgaaatttgattactgaaaagacctctagtcttctagataggttatctacatcagaaaacagttgaaatacattgtagaagaagtctactcttttagttagtccaatcttcttagcaagtattcaacttgaacttccttagtcaatggcatgatccattctccatacagatcagcaactacacttggctttattttgtaaacaggatcggcggctccattgtcgtctatgttcaccggcatttcttgcccatatgttttggcttttctttctactctccttttcactgcctcctcaacggttgggtatgttagcaaagccataagcttttctttgtccttcaaaatcgaacaagattaatgaaaaactcgatgcactgagcgtgtttattttaataaggattcataggtttgtttatacctgttctttaatagcaacttcataggcctcgggagaggatcggaacttagcctctgctacgtattttccatagtgaattctcttggagagaacctgtcaccataaagcatgaaatttcatttgtcaaatctcttctgaactcatttttttagcaagcatgagaaaaaagtttcttctcagaatgaaacagtcaaatgaaatagtttcttctccacattgtttggtctacatttacattgacagggaattgattttccattagaaatcaatccattcagatgggaaaacgatttccattcagctcaaatgtacgctaaagcaaatacttatggcagaatgttttaagtattgtcaatccaattaacgacgatttgttaccatcaacaaactcaaattttcaacatgtttgtgaaagatcgaaaaatgaatctatactaaagcaaaacaaggctaataactagaataagcgagtcacatttacctgcaagcacgatgtatcacaaacagcagtggaaccacagttgccatcatcgccttccttgaccagcctcgggatgagatctctaaagtacatgtcccacactttgccatttatattgattgagtctgcactgtggtgtagaacctgtgttcaactcaggggggtcagtgttcaaagtataaagagttttaaaaaatgttacaaaccgaattcgatatctacctgcgggtattgcattggtggcaacaatggattaggtagatcatttggaaagaaaggatgctcatcaggactcttgtatctgccaacctgattcataacaaaaattcatgtttaaatataaaaaggtgacacaatttgatcaatctgtctttaatactctaatgaacatttttgagcgctctatgttcaagtaacattatcaatactgaaaggaatataatctacttccaatcaaaggagtagattccatatctatgaaacatgtttcccgctatccatattctcataactgcaatatctcaggaattgggcctaagttgtcattaataagttacaagactataaaatgtgagtcaattactcacttaaggattaagatcaagtctcaaacgatcattcagaaaaaccagcaatgtaagaaaatcatctcaatcattctttcaatcatacctgagcatgaagtttttcggtttctctaaccatgaattccaccagagatccattaaacccatccatggagaaagcactaggatcatatgcatctgcattgtaacaatattgtgttctttctaaaagactgtatattatgctatcctcttgcctaatcaaagagtatcttatggcctcaagggtcaagttgtcactatcatcagtcctttcctttgttgcaaaagacctaaacaaatcaaatttctcattacaatttaatctaagtacaaaacattcaacacaatcagttaaatgcactcaaacttgagtactttgcaataatgatttattgagccataaaagaacaatttgtcaatttaacaatggctatgataatagtttgaatcggttaaaacattaattccagttttttctataatataatgaatggtaataaaaggctttttgcccaatattgaaactgaaaatgaaaatgctgggacttgagataaattacagaaaattagagagatgaacaaactaaacatatatatacatatatatttatagaatttgcattttgcagacaatattaaccatttccaagttttgggttataaatgcaaacaacacagaagccaaatttttataaatacaaataagaaagactgctttttttttttctgtgctagatgtccaaatttgaagctacatgcaaaaactcataaagcaattaaagaactctcatcattatgtaacacattattgtatctatattcaatccagaatagatctaaaacaaaattcttgttagagattatgaaaataaccaacccaacaaaaaaaaaaaagaaaaaaaaaactccataaacacagaaaagtgaccaaaccagaagaattccacagctgcacaatgaaatccaaagcccaaaaaaaatcaacagtaaaaagaaaaaagggttgctatattaatacccattggtcatagcaaaagccggaaaggattgaagggtcttggtgggtaagcttttcgatttgaaagtgagaaaaaggttgggactttgccaagttttgagaccaaaaattgaactgggtcttgaattcgagccatgacaaggcctaattactgctggaaaagttgctcctataagcttggcctccatttgttgaaaataataataaaaatgaagttagaaaaaatactgaaaataagagagaagaagatgggttcttgaaggtaggtgaggctgacagagttgaaatgaaaaagtgggttggtgagagtgagaaaagaagagcttacgagttacgaccaccaaagggaaagagaaagagagagagacttatatagcagtggcctcttcccccctaagctttgcttctctctctctcttctttgttgttgtcgttgttgttggtgttaagacttaagaggtgggaggagttgaccacatattattatacactcacccaccaactccacaaagacttctaagggtgaagggtgtaaatgtaattgggaattatgagttctacttttataattagttagtaattttttataatttgcattaaattaaaataaatggaattcgatattttttttgacgcgatgaataaaattacacatgattaacgaaacagtaatctatagtcgtcggcggtacctcttcgaactcgaatattaaaataaatagaattcgatattaaattgcatcaataatgatattatatctcataacagtactagatatcgtaagtaacctttagcatttctcgtaaatgtaattctatattttatgagagatgctaaaagacactagtggtgtctaatatctttaatgtgttaatattactattaatgtaattaaatattagattttatataatttaattta

SEQ ID NO: 36229 - DNA, 1466 bp, Cannabis sativa
tggatgaaaatgagaatgagaaacaaatggaagtagaggaggagaggccagagagaaacatcgttaatggcggtggtgaagtaaatgttcttgtcaaagatgagattgttttggttactgggaaggacgctgaagaagccaaatacgctcctttgaaatcctttaaggaggcgaatctgcccagtgatgttcttcagtgctgccagaatttcgacagcccttctccgattcagtctcgggcatggccttttctattggacggtcgagattttatcgggattgctgcaactgggtcgggtgagttttcttcattgggtttcttggtttggagtttcttatgttatgtgtggtgaatcttttgtcattttcggttttaggtaagactttggcgtttggggtaccggcaataatgcatattatgaagaagcgggatggcaagttcttaagagggaggactccgctttgccttgtaatgtcacctacgagggagttagctcagcaagtatgtgttctttgatacaagtcatttatgggacataatgctttgatacatgtttttttgtttaaataaatattattgtgtttcgttgtgagtacttagttctaatgctagaaaatttcttcgatatataagatggtttgtacattagaatgtgatgagtttatgcatctttgaagagaagttgaattaacgtattcacttattattattgttatttgcatcttcgagtgaaaccaaacagtttttgcataagaaaagcttttggtggtgagataaagctgcttgagctttgtgtttagttacagattctaatgatggaatatcacggatgctacccagtttcatgttctttcagcacggagtatttagcatagttatcttgggttagaatattttcaatccttagatagtatagatactcttaatgatgtcaagttgaactattttgaatttgtctttttgtaaatacttggcttagatttttgtttgcgatttcgagttgatacgagcatcagcatcagctttagtatctttcccttattattcttttgctaattctacatgaactgtactttcttctcatgatacgttgagatttatttctgaaatttgatgatcttttggttttttgtgtgggtggcagattgcagatgttttatgtgatgcggggaagccttgtggtgttacttcagttgtcttgtatggagggacatccaaagaacgtcaaataactgctctgaagtctggtgttgtaagaaatgctgctcttttatcttttcatcttaagaagataatagtcatgttttagatgacttatcacactatcatttaagatgtatccttataaacttgtatgctgacctaggctggctgcaattgttaaatagttttagctttaatctggtttttgtgcacaaaagtagattgaaggctacacctatcttctttttcttcctgattctaa

SEQ ID NO: 36230 - DNA, 5507 bp, Cannabis sativa
  modified_base (1120)..(1124): a, c, t, g, unknown or other
  modified_base (1289)..(1315): a, c, t, g, unknown or other
atagtatgtcttgtttttgtcaaagaatctgcaaggccgccaattatttttgtcaaactatctgcaaacattgtcaattatttggctcggatttgtccctactgatttgcaatcaataaagatttacacttttattcaaaaataaataaataaataaaattactatttacattaaaagaaacaaaaaacactctttctcaaccaagcaaaaaatatctaattaaacctaataaagttttatgctttatcctttacatacatttcttctcaacaaatctcaatgattcatagttattgagtaaacaatgttggcctttcaattcaactcttaagcaaaaattatcaaacccaatagtaaattttcttcaaacgtgaatatttctttcccaatattttaattttctcggaaaccaaacaaccaccaagaaaattacagaaatcaaaattaaaatataaaggtcggaccttttttccagaatcgtcgacaaagaagactctgtagtctagagtttcaggttgaccttcctccttggtgagaatctgcggcttatgaatagctcgacaagtgaaggacctcttaggagtcgaagcaagccttctggtgaaatagaggctggttctgtaggaagcattctttgggagaaaaggagaagctttggagagaaagcatgaggttgtggaggcggctatcgcggtcgccatggatgaacgattgaactgagtttactgagtcgagttgaaacgagtctacactgtgagtgagtgagtgagtggctggtatagttataaatttataatatagtttgctttccttatttatttatttttgtaaggatttgctttccttatttcattaaattattattattttcacacttgtcgcacgtgcctaatgcctattgatgattggcttaacctttcagaactgtaaaaggattaattaataataaaaattacacgtataattaagactaattatgatttttgtcgcctaaactttaacatgtatcaaatcatgctttctggacttttttgaccggttaaaattttctctggactattaagattgttagatttaaagacttttatctaattttattcaattttactattttagtgnnnnnttatgtactaaaccatactccccagactttgacatctaccaaatcatacccctcgaactttgacttgtactaaatcatgtcctctgaactttcatccatgttaattttaaaattgaaaaatccttaaatgcaacaatctcaggagcatttttaacgaccttaaannnnnnnnnnnnnnnnnnnnnnnnnnntcaaagttcgggaaaaaaaaatcataattagcctataattaattaatttaagaaatcaagtccattaaaattatttaaaatcacttataaattttttaaaaaattcaaaacaaaatttttgaactttatttttccgtattgtaaatttttagtagcaatctttgaaaatttataaaagaaaaaatgggctaaattgtaaattttttgttttatatcgaataataaagttactattactaaatttttattgaaagatgttcgtacttctgtgatgattcaatgacattgatatttcaatagaatgcgttattagagttttcattcctatttctttaaatctcatgatttgttgattttactctttgtataatatatcatcatacaatgaattattatttaatttgtttctatttttctaaaaaaaaaaaaagataaaaaatatgtaccaaaatgtgtaaccattaatttattattgacttacaatggtcatatatatatttattaatttcaatattatataatataaaaattaaagttgatatggaagacaatctttaaataacaaacaataataaaagtttggctttgcatatcttaaaagttgatatgaagcaattaataataattattattggtcttgttaacaatgcactatctatacctaaataaatggagactatatctttgaagaaatcatattacatcacaatttctataaattaacaaataaaaaagtaaaaaaaaatcttttaaaatacaacaagaaacatttacttacattttttttaatgatttatcgaccaattaattcattgctcagcaaaacactcatctaaaaagaaaaaactacaaatcaaaatcaaaagaaatccttcaacttcaagcccaattccattaatcaatcaaaattgggagaccttccaaaataattttataaaatttagacaaaagtcataataatatagaagagaataaacaagaatgaatttcccattttaggcttggatcaactatatgttacaaaaaaataacaaaaaattagaaaaaggtcattccctccattcctaatcccaattccaattcctagtcctatcacatatttgataatttgagatcataaagaaatttccagtataatacttctgctttgctgatgtgattgctttcatgtacaccgaaaatagttagaaaaaaaaggaaaaaacacaaccctgtacattcattccaaggaaaaggcaccgcaaaatacttgccttttccgtcccaaaatttcgccgaaagaaagcatatccagctacccttctaccatcttattattatctctcccaacaattcggcatttgggaaccgcctttctaagcaccgacgtcccttgaaagatcatcatctggtattgtctcttgatcttgtttagctgcaacacagaagaaaatacacatatgactaaccgagtcaaccaaatatagcataacgatcaaaagaaaacagaggactcttttggattcacattctcacgtacctcgtcttgtgctaatttaccaaaaccgaactttttagtccaaatcgatactgcttcgtctgcagctggtagcacgagatctttcacgttcaagaaagcgagaaatcgctcgaaacatgaaaacagggtttggaagtaaccctaaacagaacataacaagttaggaaaacttctcattaagttaaattttattgagataacaaagtgttgaacaaacctgtccttggcattcggcgctggtagccaccaaaggcagctcagccacatctgatccatagattcggaatattccagcagagacaacacattgactgcattacaagaaatgttttcaaagttaaaatattgggaaaattgaatcaccataactaaattacattttcttttttctttcttctaagtttcttacttgaccgtcaaaatcgcacaatacatgcgactaaaatcttgccccatactgctctttctgtaatattaagataaacgatgaataagcattaagcaaacaaaaatcccaaacaactaaatagtctcaatttatataagtttacagcttagtgcttacccgtagagcattgctgggattagatcattatttgaagaatcagttatcggagcaaaacaatcctacagcagaaatgaaatacaacacaagaaataagcaactgtgatactaaaattcttggttgaagctgtaattaaataagaatcgacagcttaacatatgagaacaccatgatccgacatggtaccatcgagatacagaatcattaaataatgaaaaatagtaactaataaacactcacgtggaaaatagaaacggccttggaaagcaatgatgcagcttcatcatcggaagccatttttttcccattaagtattctccatttaatatcaagttcagtcccgctctctgaaccttccttcttctgcttcttgttaatgacattgataagagattctgggagcttctcttctccattagctagcaatttttgcaaagccgaatgaatcctctgacaatctctgcaacagaaccatgctccgaccggcaattcctggttgacaatcatttttaactttgagtaaagaaaatataatataacaaatatgatgatgaaaaataagaacagggaaaatgagggtcaaaccttaagatcttgcatttcatgctctttcaaacagccaacatgaaattctctttcacactgtggaaagaaaacaaagcacctcagttaaaactagaaagtaggaaaattagtttattttatttaaaaaatgagagaactatatacctggtcacaaaataggacggtgcgaggaccgaattctgatttgctaaaatcatgatctctgcacaagaaaaaaattatgcataaatactaaaaactagaagaaatgacatgatttgcaaaaacaaagaggaaaaaagatacgcatggcatgtcagcaataaaaagagtcaagtgcaatggtgttaaaccgagactagacactactatattattccacaaaaatagaaaatatgaagacacctgcataatgcgcatccaccgaaacccatttcttcagtattgaatatgcggatgcagcggttggcaatttgctgtataggatcaacacccgggacccttccagctgcaacggcattgggattacgctccaaacatttctcgcttacatgttgattttggcatattttacaataccaagtgccactaggaacaatttgttgattaatacactctgcaatggcacccccaaataaataaataaatgcaggtgacgaaaacttaaaagtaaaaataataaactagctcaaagagcagtaacctacgtccatgaaaagaccttggacaaccatcacagcacaaaaggtctcctccatcatgacagacatagcagagatcatcattatcatagttagagaattttcgattctttgatagtgacaatgacaattcatgaagagacaccccattggatgtgtatatgtgtaagtagctgccaaaaagaaaaagaggaaaggtaaatggctagacatgttctgaaacagatttttcaaacatgacactggcaacaagaggcggtgctaaattttagaattatttgacattatagaccggaaattgggagcaaactaccaaatagaatcaaagaaatactcacggctttcgtcgtgatgcccatccagcatgggcttcaaactgggaaggactgacctgtacatcaaaaataagaaatgtattaatatatatatatatacagatatatatttaattggtatcattaggagtatgaattcaagaggaagataaagtacctcagaattgcaacaactacacatgattccatagccctttttataacccaccaataatttctgcaaacaacaaacaaacacaaataaaattgacttgcacacaaaatgtcctaagaaaatgaaactaaacataaaactttattgaaacctctccacgggcataatatgctacttcagttccatctggcagaatatcatcctcaaaaaccaatctatgcagccgaagatccctatatgtcagaaaaaggactagaaatttagaagatacctcaattgtaaagattatcaaggaaaaacaccatatgtatgacaaacgaaggatggtaacaagtgtgtgtgtgtgtgtgtgt

SEQ ID NO: 36231 - DNA, 1333 bp, Cannabis sativa
gagaatgtttatatatataattattgagaatatttttgaatataattttagaattttataataatagtagacaaatttattgaatttacagttttaagattgctgatgaggagaacattgctacagtgaactcagtgaaaatgaaattctctccgtacagtgaaatttgcttttcgtactagtggtggtgcgggtggctcgtacgcctggtggtggcggtctgcgtccttgccatgggtaatgtgtggcaagggtttgcgtcagtacggcaagggaatgttaccctttgtccggaaaggctcagccttttgttccattttagggttttgaatcatagtagtttcccctttgacagagatattttgaaaaacgtttttctgggtgaagggtactctacttcttctgtgagtgtgcttgcaagcttttgtatggattcttttccacccctgtcttcttctcaacctttgagctctggtgttcgtgagtctccgttagaggaggtgatgagtatggttgaaaatgtatcggtggatgatttttccttggatttggtggcggacgatgaggctgctatgggtactatcaacaggtcgctggtgggtaaatactttgctaaacgcaaagtggggaatggtcgactgcggtctgtgttggctgagatgtggaatgtctctcctggttggtgtatgcaggagattcaagcaaagattttcatcttttgcttctcgaaggaatctgatgctctcaaggttgtgaacaagggtccttgggctccttgcggtgggttcctccttcttgctccgatgccgaaggacggaaaatggaaatcggcggacttgctccatgttaatatctgggcccgtatcatgagtgtcccttatcgttatttcacggatgagaacatggtcaagattgccaatcgggtgggctctttcctggaagctaataaggtacgagttaatggtgttattagaaacaatttcttgcattttcgggtgtgtttggaccttgctaaatctcttcttgcgggggtcagattggaagatgaaaatgggaaaaaggtttggagttatctgaaatatgaatggcttccctgttttgttataagtgtggtcttattggtcatgctgaggaggggtgttcagctaagaaacgaataatgattctggatgatggtagaagtgtgcctctttttggtccttggcttaaagtcggatcccgcttagagaacgggtttgatgttttgaaagctggagacttccaggaacgtactcaaatggaaaaagaggaagtagctgttggtgttgaacatggagagggttctggtgggtcg

SEQ ID NO: 36232 - DNA, 3108 bp, Cannabis sativa
atagttataacgtacatgaatatgaaaaaaaaaaactagactaaattttttttttctgaataccgaaacaagtaaagggtccgaaacaagtaaagggtgtatcagtacatcccttttaaggggtgcacttagaattaccttacattataattgggactacattataagatatcattatcaacaactaattatacacccttttcttaatgactttttatctacttataaactattttgttgcactttactacttgaattttgcaagttttgttagataactccttgcacattgcacaaaataatttgacactttacctcttaatacaacaccaaatacaaatgtagtataacacactctttctctctacaaatatatttataaatttagccaaagaatctagttaatcgagactaaaaatctcaataattaaatattcaaggctcttttgaaaatattgaaaataaaaaaattaatttggataaatactttttttaatattgtgttcggcaaaaattattaattggattctttattttattaaataataattttgaccataacttttttaaaataataaataataatgcacaaaatcaatttgatcaaaataaaatttaataataatttaaattaaaaatattataactaattacaaatcaaactccattcctattcattaataactcccaaaaaaaaatttaaaactatttaaaaataaatatgcacataccaaaactcaaataaaacaaaaatactaacagattttgatttttttaattaaatattaaaaaataagaacaaatattggaaattaaaaaaagaaaatctaaaatttatagcagaatagtgtaaactcagttgtttaaatccccagacatgacagaagggagagaagctcaaataggctataaatgagagagaaagagaatccttaaacaaactgatacccacttacctctctcacacacacacgtcttctctctctctttctctctctacccgaacggcagaatttacaggtgtccttctcttctctcatcacaatacctgcctctgttttcctctgtttctaatttctgtctcatcaaaacttattctttaccctttcttattttttcatattaattatatttctttttctgttcatattgccctggcttccgacttttctggtgattctttatgagctctcattgtttctagagtttaatgtatgcctctattcatcatttaatgccttttttgtaatccaagtttggattttctgatctgggttcttattacctggcattaatatgctaattactgacccctttaatcgttctcatgatttctatcatagattcgaccattatctgggttaaaacccagaaatcctaatcgcggattactcttcgattgttgaaattcctctcttcatcattttgtctattatgttttgtgtttttataattggtttattataaaatatcgtaagcaatgattagatatatgtatattgattttgttttatatatttgtttgtttcctctgttcattcattgtggtttcttgatgcggtcatactcttctgtacgattattaatattatttatattaaatttttgtctttttcttcctttaatgtcacgcaagctacaaattctatggttactccgaattaatctgaaaggttctgaaataacaatgcatcttatttaatcatttgttgctaaaaaagtctgattctttttcctattttctgtaatatttttgaagggtctcaattttctcaatctgactatcatcatcatctgttgggagaagtaagttttgtgacaaaactttggtatgtgaataagaatagtataatcagaactcatgataaggcttgaaaatggggtccgtacatatggaaaagaaatggttgtttcctctagctataagttctgtggtagccatagtagtcttggccactaccttgaacatgggtcttgtctctacgttaccttcaatcaatacgattctttcaatctttccatctcgattaacctctaatgaaacaagtccggttttcgcagagtcaaagcttaaccaatatcctccccctcctactattgtaacccctagatttgcctatctaatttctggctccaaaggtgatttagaaaagctttggagaactcttaaggctagttaccatcctttgaaccaatatgttcttcatttggaccttgaggctccggctgatgagaggctgcagctcgcttcaagggtccagaatgagaccctttttgctgaaattggtaatgttcatgtggttaccaaagctaatatggtaacttatagaggacctactatggtagctaacacacttcatgcatgtgctattcttctcaagaggagtaaagattgggattggtttatcaatcttagtgcttcagattacccccttgtgactcaagatggttagtctcctacaccttgactagtatggcatttgcttatcactttgtgggacatgttaatgttatgggatttgtgtgctaaaataagccagcttgtttgaatgtgcagaccttctttccactttttcaaatttggatcgaaatctgaatttcattgagcatacaagccagcttggttggaaggagtaagccctctctttttgtattaacatctgatacagaaacaaactcttagtaagaaattctctcttgtggtgaaacttttttttttttttgattgtatctgaattgtacagggataaacgagcaatgcctttgatcatagatcctggtctctatctgtcaaccaaaaaagatatattttgggttgccccaaggcgggcattgccatcagcatttaaactatttactggtaaatacctgacaaacttctatatctgtctttgttgcttgctttgattttgcatttgtttgatagattgcaaaacccttctgttttctatgcttaatattatgaacaaggattcaatttcatatagagttagataagttcaagttgaaaatcacaaaaactactgaccctggactattggtatattatgtgttaagtgattccagctatcagctaaatagtatagcgtccacctgttctctcttctt

SEQ ID NO: 36233 - DNA, 1673 bp, Cannabis sativa
aatatgtaatagggcttaccaaacagatctctagtgtcattttatcaacaagaacattgttcaagaaaaaacccacaatcatcttaattcaaataccacaatttccacacaaaaatgagccaaaatagaaataatctgctaataagaaaaacctacagcgaagaccataattcaaactttggaatagtcactgtcacactaaccgtccgctaagaaaagaaaatgatagaattgtacctccaaattgacaccaaaccgaaaaccttgtaactctttacgaaacttgagaaacagctccgatggcatcagattaatattgtacatctcatcccaggatgtgggttcttcgccattagagcccgactccatcttctgcaaaaataaaaataagataagtgtcgtctctagcaatacacaaatatatatatatatataatcgaagcatacaaagaaacccaataccaaaataataattaattaattaattacaaaagttgttcaatttttattttatttcgctctacgagctaaattccaagtgtactcagccgaataaacacgccccttttgagaaccagatgaatattttcattattcttgcaactaattaaacaaaagttatttgactcaaatcccaaatttttgacacgaaaaggagaaaaagaactatactcaaatggtgttggagtgagaaaactaacttaccagtagctgtcgtgtgagtgagagtacacagttagctgtcgtgtggtatagaatatgatctcttcgcccacggttaggtactgctgtgctgctgataacgattaactaatgaccaaggatagatgtcatctaatatatattaaaatttaacgaggaatgctactgtcaatcttttgttataattttttagtcaacttttacattcgaaaacacatgttaaaatatttttttttaatttttttttacgacggtgttcgttatgcttacaacatcatctctgtaaatttttaaaaaatctaattgtttacagtgccgaaaatacgtttaaagttttttgaacacgcattataatctggaatatcagaaactctgttttcggtcttgtaaactattcgaaatttttcaaaaatttatatggatgatactgtaactataacgaataacgctatggaaaaatttgagaaaaaatatttcagcatgtgattttagacatggaggttgactaagaaattgtaataagaggttgtaattagtactcctcaaatttaatttattcaaagttctttattattattattattattattattattattatatttgaaataaaaaaaagtatgagaagaatatttaacaaaggatgttcccggtaactatcatgtccactccaagattagtcttcaagatagttagctctcccctagaaaggagttccagttggctagttatccctcctagaatggtagatctagatagatgactccagctggctctatcctatccgaaagcctttcagcaagtgtccttagtccttaagtccaggagctcatatttgttctcgaaggctctaatacttaacctgacgtggggacttcgctcaaagaggagttggttaagttaggtatttttaactaacttaacaaccttgttttcttgcaaccactaattttaagatcttgatcctaggc

SEQ ID NO: 36234 - DNA, 2660 bp, Cannabis sativa
ctttccaaaacaaacttagaaaaatcttatctctatcggatacaattgactgtggcatgccatgaagcttaacaatttccttgataaagaccatggctactgtaggagctgaataggggtgtcggagaggaacaaagtggctatacttggtgaggcggtcgaccacaactagtatggaattgaacccatttgaagttggaaggccctcaatgaaatccatggaaatatcttcccaaacttgattaggaatgggcagtggctgtaacaaaccagcaggtgattgcactaaatacttgtgttgttggcagatcgagcattcagcaacaaacttttgtactgccttccgcattccttgccaataaaagtcgaatgctaatcgttgaaacgtcttgaacactcccgaatgtcccccaacattactgctgtgatattcatgtaaaaggagtggaatgaaactagaagaggctggtaacaccaaccggcccctaaacttgaggcatccatgaaccattgaataacctccaccatcttggccttgagctaaattctgaatcactttcgaaagcgtggggtctgctgcaatctgaacttgtaaatttgggatggatacaacattggggatcgagatggctgccagtgaggcttccccgttgacgcgagaaagggcatcggctgcccagttgtcgaaccccggtttatactgaatatcaaagtcataacccaatagcttagtcagccacttttggtgctccatagaaaccaatcgctgctccaacaaatatttcaaacttcgttgatcggtcctaaccaaaaatttgcgacccaaaagatagggacgccatttttgtattgctagcacaatggccattaattcttgctcataaactaacttcagacgagctcgaggggacaaaactttgctaaagaaggcaatggggcggctatgttgcattagaacagctccaagtcctgtacccgaggcatccgtttcaaggacgaaaggggctgtaaagtcaggcagcgccaacaccgacacattgcacatggcttgtttgagctgatcgaaagcttgttgtgcttcaactgaccaagcaaacgcatctttcttgagctggtctgttaggggtctagctatgctcccatacccttgaacaaatttacgatagtatccagtgagccccaaaaaacctcgcaactccttgatgttcttgagaattggccacgagaccattactgcaattttagccggatctgctgcaactccttgtgctgaaattacatggcccaaatactctattcgtggctgagcgaaggtgcacttcttccgatttgcatataattagtgactcataagtcgttccaacaccatatcaaggtggatcacatgggctgcaagattaggactatagacaagaatgtcataaaaaaaaaaacaatcacgcaatcacaacggaagtcgcggaatacctcattcattagtgcttggaaagtggctggggcatttgtcaacccgaatggcatcactaaaaactcgtaatgtccttcgtgagtgcggaaggctgttttctcaacatcttgtggtgccatgcggatctgatgataccccgatttcaagtcaatgttggaaaagattgtggccccatgtagttcatccaatagttcatctattactggaattggaaatttgtcggccactgtttcgcggttaagagcacggtaatccacacaaaaaggccagctgtcgtccttctttttaattagaaaaactgggctggaaaaagggcttgtactgttctggaaaatgcccgctcgaaacatttcccgaaccagcttctctatttctcccttttgtatttgtgcataacgataaggacgaacgaagataggttctgtccctggtttcaatgttatagagtgtgcccaagatcgtacgggtggaagcccaggaggcatgtcaaagattgccttgtgtttggtaagaagctgtgagatgggctccggtagtgattccaattcttgctcttccttgttactcaattcattcagttggacccaataaccttcgtctcctttctccacctgtaaaatcattgccttcaacgaaatgggagatttgcacaagctgggatcaccttgtaaagtaacccaagaacccgccatttcaaacttcatcaccatggttttccagttcacttgcatattcccaagtgtttccagccatttgataccgagaatgacatccgctccacccaactccagcggaaggaaatcggtaacaactcttatggcacccaagtcaagctcgacctgagcacaaataccctccgtgcaaaccttgcctcccgtacctaataaaattccataacacgaggtggctgaaatcggaagacccaccgctgtaactacttccatggacacaaaattatgggttgccccgctgtcgattaacaccgtaaccgtttggttgagaatacgtcccgccaatttcattgtgttggtagttgagataccaatgagagagttaagggagagggtggctaagatttcttcggtggtgttggtctcatcagagtcaggagataatggtaggatgtcttcacgcgtttctgtaacaccctaactagcataggcgtattacgtgattttaaacatactgtgca

SEQ ID NO: 36235 - DNA, 2124 bp, Cannabis sativa
tcttcttctaatttttttttttttgtacttttcttctttatggtcatcttctacttctcaatacaccataaactatcacatgtccacaacaagcacctccatcatcgcacctcaactttgaatcaaatcactgccactaatttttcccttcattttcttaaagtgaaaaaatcaaacattgaaaccatcaacaagctctaaattattctcacctctgcaagtagttgaaaactcacaaaataaaaaaataaattaagatttagacattcaaatgaaccacctctgcaccaaatatttttttcttagttacccatttttcataaagcacataatctcattttctttacaaccaagcaaatgggagagaaagaaggacaataaacacacacgcaatggggttctagtttttgccaatttagggaaaccaaaaaccatattgacaaaaccaacacctacaaaaaaaaaaaaagaaagaaaaacaaaatgaaccaatagatatggagatttctaccagataggcaaaatgggggcgattacgagagatagcgagagaaaaagatagaatatacctggatccattgtatgcacaatagtagagggacagggacaaagatcacatcaacttagttgaggtgctgtggagaagatgggtgtgagggccgaagactcgagcacagacgcaagacatagtctgacaggagtctgggttagaatttggtgattgcggtctgggcgattgttgtctacccaattggtaggttttggtcatggtgattggatttggattggggtttggctcattttattttggcgataggataaggggaagaagaatggagaacaaaagaaaggaagaagaaatatatttgtatttcctttattatgattaatgagccgaacaaaagtgagagaaatattttttttcatttatttttctcattgggttttttcatcatttgtttggaaatctaacaatggaatcttggaattctttttaacttaaaatcacataccatgttgtgggttggattgcgttattctcttggtcaatcagtttctatctctaagtcatcttgaatttttgtcgaaataggtaactatctaaaaaagagaaaaataaaattaataaatgtgtcatacttttttgatttgatgccctgccaacaaagactttttggacttctagttttggaataagttctttcgaaccattgtttataccgatacactacataacaaagtttgcgagggcctatcccttgatggaaagtataggatgatactaaatatcgaattggctgagctccatggcccactttaataattttctagagaattctagtttttgtatcacttggaggagagggtggtttgtcgataccttgtttacatgggcctgaaagtattgttgtagcttctgcgaggcgattagcaagaaataggacaacttatcaatcatgggatatctggactctatgcctagtagtcttttgcttaaatcatacactagaagttgtacatttcctttttctagcactaaggttgcacttatatgatgatccaaactaccaggtataggtacaatggctggcccttaactggtttggatagggcagaagcttttgctagatgttccttcatcttccagtaggcttcttcacactctgtagtccatttaaacttcttacatttgcataaaacattaaaaaatagtatgcacttgtcagttgattttgagacaaatctgttgagcgttgcgatccttcttgatagactttggtcgtctttatgctttttggaagacaacatgtccaggaaggctttgatctttttaggatgagcttcaattccccagaaaatgacgatgaaacccaagaatttccccgaagaaactccataggtttatttcttagggttgagcatcattttgtacttcaagatgatagcaaaggcttcttccagatcatttctatgctccctaaggttttggactttaccagcacgtcgtccatataaacctccatgatttccccaaagacacccttgaacatcttgtttaccagtctctgatacattgctatggcgttcttgggcccataaggcataacaacatagcagtacaca

SEQ ID NO: 36236 - DNA, 9988 bp, Cannabis sativa
  modified_base (9890)..(9897): a, c, t, g, unknown or other
ttgaaaaaatttctgtgtgacagtatttttgtaaaaattaacccgaattttagtatttttataaatttcccaaattatatgcataagaattgttaatgtacgtaatatttatctacactaataataatataagtgtttgaatgtattttcttaacggttctcaactaatgcattcattctcttcttttatgaatttataacatataatggttagtatcgaccctagactaagacaggttacgcccgtgcttagaatttacttattttaagggcttaaataaaaaatatacatatatttttttaatatttttaaaattactatttatttttattataagggtcccaaaaaaaattagttttccttcaaaccatttcaactcaatgcctaccttaataatgctataagattgagattaagattttgtttggatttattttaggaataatttcaaaaaatacaaaaacaacaaaaaaaaattacaaaaatacagtctgtacgaaatttttaacatttttactgatttttaaattttatttgtataaaatacagtcttttatgtatttttatattgtatcattgttaatttgttgttgatttttcgttatttgtatgttaattttttatgttgttttggtgttattttgttgttgttttcttgttactttcatgtggtttttttattattttttgtgtttttataaaatatcgtaatatacaaaaaaaaatatatattttatgtaaataccatttttttatattaagatataatgtgacatttggttggaaggaatgaaaacataagaatggaaatgggaatatgaatagaaatgaaatgtaataaaatttaaaatgcgtaaaaaaaaattgatgaaaaattattaaattttttctcatcatgcattggaatggtctttcctttcattttaaaatagaatagtcatccaccaaaatggtggaaaggtcactcaattggaatgtcatttcaacactttaatatgcaaccaaacaaaaaaaatagaatgaagattgtttcctttcctttccattctatttcattacctccaaccaaacgccacttaaaggaaaaactagtttaactaaagctaatccaagtaaccacttgaggttagctgaaatagtcataagagggtgcgtgtatgttggaggtcttgagtttgagtccttaaattatatattgtgtaataaataaacgcttaaatcaaaaaaagaaaaaaagaaaaaaaagccaatcgaagtacaagaaaaaaccaaaagatggtacaaagaaaatagtagttggaaaattcatttgtcatatagtactaaataaacaaacccaatatccaaatggagttactcaatctctcattcggtttagattaattataataaatataatacattaaaactacttaattaattagtttggatattaaaaatgtcttaaaacattaattatttggtcgtaatagtctgttctgttccttcctcagatttactaatagtaatgatttgaaggttgtgagagttgtcttttccactacaaattatttctgatgatatttgtttttggtcatcaataagggtttcttttgttgtagacttgtaatctttgctcttgccccacacaacaaggtacaatccaataattatgatagcagctccaattaccctgtaacaacatatacaattaaaaaaattatattcaaataaagttttgttaaaggagctaaaattatatattctaagttaaaactagtaatacaaaaagttttgataattttctaaaatgtcatatattcttaaaataagggcccaataattaacttttttttatctaaggcccaaataatttcagatgggccctatactcaaattttagaaaaatttacaaaaagtatctacaatagattttttttttatatatttttaccaatttataagaaaaataacattgttttcatgcctctacaatattcaggaccggccctaagttaaaatgggccataaaaaaaaaaattagacccttactataaggataaatggtttttttaaaaattattaaaaatatatatattttttaaaacgtattttttttatttgggcccctaaaatgagtgggccctaagcgcggacctagcacgcctatacttagggccgaccctgacaatattatactatgtttcttctatgtgagaatgtgtaaataatgtttttttaaaaacaaccgtaaaaaaataaaaaatgtaaagaaattctttttgggtatctctgaattttaccttccgagaaacatttgctcagccaatatgaaagcccccaagatagcaacaataaccatgcaaaggggactaaaagctgtcacaaaaacagggcctctgtctttcattataattccttgaatatagtaagctaatccagaacacaccacaccctgcatatacataataacatttaaaaaaaaataaaaatgatttgatctaatttgttttcatatgaacatgttcaattatattaaattaggttatttgtggtgaaaccttcttatattttaattttttacacttaaccctcttatatttatattcttctttgtaaatttaaggtgtcaactagatatcactgttaaataagtatatacaataatcattcagttgatatttaacattaatattttactgacgtctcaaatttataaaaaaaaaaaagtaaatataaaagggttttaccactgaaaaataaaaagatcagagagttaagtgtataaaaattaaaacataagagagtttcgctgccaattaagttatgttcttacactgtaaacagctgccattaattttgtgtcccattgaatagcccaaacagaagaatttcctctttccataaccaaagccacagcagttccttccaatgtgcctaataagcaaatccatgctgtgagggacaactcagcagggtatgtcttcagagtgattgccttgtggaacaagtaaacaaacaaacaaacaaaaaaccaatttcatttctctatgtatctttaatttaattattaggagatttgttgatcacatttttttctttttgtacctgcaaaaccatgaaacaagcccaactaaagcacccaattgtgatcatgagtgagcccttgatagaattagcaaggctaatcccgccgccgccttcgccgtgatgcccgccacttgttgttgctttagtccaaaagagatgtaagatgggacctttcatcaaagtcatcaccatagcccctgcaaccgttgctacggttcccaccacctttgcttgtgttcgaattgacttaatgttgagcttttctagcctaccctcgaaacaaaataataataataacatattacaactcgggacagagctagacttgaaatttaggggcctaaaaggataaattaaaattaaaagggccaaattataaattttagagaaaatgaggaaaaaatacaaaaatatgtatataatttcgtccctattttgtaataattttttaattaaatctgaaagatacccaagtatgcaagccaaaacaaaagttatggctggaagaatattagtcatagctgctgcaaatgttgctgttgtgtatttcattcccatgaaatacaagttttggtcaataactggtctgaaaaagtcaaattaaatacattattagaagaaaagaaaaaactcaatatagaaaataattaagtatagagaaaatgagaagagatgaagattattactcaagtaaactcaaagcaactaatttgatgaagataggaagtgtcatctttggccttacttttctgtttaagaaaaaaaaaaaaccaaaccccattttagtaaccttttattagtaacatttcttcgaaaatgaaaggggaaaaaaatgcgacatacttgtctagaaaaattgcgaaaggagcaatgatgatggtggcgacggcatggcgatagacaacgaggacatagttgctcattccttgatttaacgcggccttagagagaacatccattcctgcaaaaccgaattgcaagaacacaacaccaagaaatggctttgctttttcaaacaaagttttgccatcactactactcatcatcatgttcactaataatactcaaataatatatcttaattgtgatttaatttcctccctataaaaaatctagtagtacttgatgagcttagcttatagaatgaacttgtgtgtgtccttgtgtttatatagacaaaagaaaaatacattacgtgtggtatttatacactttgggatttaatgagagatatgcataattaatcaagtattaattatgattgttatttaattagttgatgtatgagtagttcttcaacttaattgatttgtttagagcacttaacaaatgtccttattatatggtgggcacctcaacttcacttataataagggttggtcctaaatataggccgtttaagctcgtgtttaggactcacatttttcaagaacctaaaataaaaaataaaatattgttagacttttattttagtaacaaatatttacagttaaattaattagagtgtatgtcacattatacaatagtatcagttcgagtattctgatatgttatgtgtcaataattgattgatgatgtatatgaaatgcatgggatttttgagcataattcattcaattatgtcgtcatatcatatggacaaaatttaataaagcctccattattggtatttctttcttttttatatttaaaacaaagaaagataaacaaagtgttagatgatagtgcctccattaaataaaatatttatgtatatattttgtaatattaattcatgagtagctttgcatggttcttagtggaataaaccctttatttatttactaataaatagattctcagataaaggattcctttgccagccataatttattttattcatatttattattatttcatactaaaatattaacttcatatatagtattatattataataaaacttttttaataggagaatgagagctaaaaagcaagtgcactaaaatttcttgttggaagatttgttacttcttttcataaatagtaatattatatttcatatattcttatactctttttttatatataaatatatatatatatatatgtgtaaatgttctaatttggatttgatatatgattcatcattaatttttattctacaaattagtatctaattattagaaaatcttaaaataggtgctctcattttaatcatgtcattattaagttaaatatagtgttattattattattattatatgtacctcgtttcattattaattaataatattccacttatcaatcgattaataatattgatcatcaagagattcttgaataactagcttagaatcatatcataccttggataagagaaagtaaaaatatgatttaaataatttgataatgttgatggaagtgacattatataagattgcattaacaaaaggtattaaaaattaaattaaggtcaaattactccactaatcttaatactatgttcatctagtgtacactatgtggatttaatttgtcccttgatttactttatggatacataaattatgatcaatttaatattattcaaagtcactaaaaggattaacacctttattaacgcaatttgacacctgcaaaagtatcgcaggcgaatttttgagcttccacgtctagaaatagtattaaggaataaattaaataatgatatatttgattgtttaagaaatcgaaagatataaagataagaattaacgattcaaacatttgagaagatttcagactagctaactagttggcgatactcaaaaattactactcaagaaaaatcggaaagaatgagaatagaatcaaagtgatgttctttttgcttgaacaaaaaaaggaagagtatatagtataatgtagacataatttggaatggtggtggtatccaaatatgatctggaacccatttttgtttgtgtgattgtagctagctagtagctaggtttaggagcttggtaggtccattaattcacttgaatttatagaatatatatagtagggcatacatttatttattaaatacataagatagggcaactttattgagatgtaggatatatgggtgacccgtattctaagtggaacccatatctttgtcttttttaaaaaaaaatgtctaacatcacctaaattcactacaagagaaaagactatcaggatcgactacaatagtcgttcctgaaagtctttaaagtcatcacatgtatttatcaaatacaacatgtcttttttgatgtttcgttttttgatatttcatccttatcatgaatgatattatattatcactattagtataatttaacatgaaattaacaattactagtaaagtgttattatatagtgttggatagtactgatacctgatattttttgtttttgaaatataaataggaatcatatagttattatatatcttaactaaactttaagcttataaagcattttagaggccaattgatgggaaggaattaagagaaagaatataaaatataagcaaagtaatatgtgtttgtgtgttaataaaggtgagacaaattaaaataataataaattaattaataatagtaaatatatagtataaaggaggtggtggcaacaaaagaggttatggtttggaaattagtgatatttgtgtatttgtatatataagtgattggtgacgcatcaaacatttacaaaatattatatattctcatcacaatgggtaatcttgtgggacataataataataataataataataataataatagccaatgagctagctatgatcaaatcaaccaaacataatcacaaatgatatataaataactttttcttaccgagattttaaaaaatggattataaaataaaaaagtttaagaaagaagtaaattaaaaaagaacatgtgattcgagtgttaatgaattctaattcatgggttgatgttatattaagttagaaaagttttaaaatattttttacaaaagaatcctaattctcaattcttctcccgagaaatcaattccgaacccttcacatgaaggtataatgttctatttataggaaagaatcgggtatgggaatattcaaatccggtagggtttttagagatcaactcctctgataggataaatacaatagttattgactttccgccacttgagtgagagtcaattcacgagaaaaggttggtctctacaagcaaaggtacgtttgaagatgtcaggctatgtgcaactgagtatgtaccgagaatatcagagaatatggcgtcgaacaaaatgtgatctcattttagtagcgtgtacactctgctcgtctgaagtaagggacaaactttgacactatagagcccaatgtctggaatctggatgattccacattggatggtgtccaggagatttataagcaactcctcaactacccatttctaggtatcctctcatgaagatgtctgaattggtttgggtactctttgcttttgcgttgaacagcttctttcaggttgggaggatccggatttatcaggttggagggttggactcacgtgcgaatttagatctagagcgtgacttggtcatctggttgaataataaacaagattgagttgaggtttaggctagcataaatgtgaactttgaaatttggacaacataactaattagtaattttctatgttttaattattaatgttttgaattaattatacttcatcacttattgttattgatttttattttcttttaatttctatacattctttgaccacatattaatacaagtgtggaatcctaatgtcaatttaatactctgaaatcgatcaaaataagtgagaccactctcaacttacatatatttataaaattaaatcacttaattcattattattaattaagaaactcattattaatttaattacacttaatcatcataaatcgcaatatagtattaggcagcactcattattatttactaattaattagtacttgttttatcacaaggtatacatatatatacataaaatatttttatgcatgattgcaatatgtatcattaattatacatattattattattttgacaagttgaagaagctagttggtgaggctttaatgaaatggccagtacagtttgtatgttagctgatttgtataaaatattaattaatgcttattttctataaatatatatatatatctatactatatattttcttataatacatatgaattaaatcatgtgtcactactacataataaccatttaccatgatattttaaagtgatattttctagttagagaaaaataacaaagacctcttcctttaaaatgttattttcaaaccaaaaggaaactataattttcaacaaaaaaataaataaataaagaaaaagaagaaataaagaaagatatacgtgtggatggagtactaattatagcattaattacataattagtaaaagaagcaacattaacattataaattatgaaaaatgctaaaagggacagtcgtgtataatactttttttagtgtcatattattattggtacaattaagtattaaattttatataatttaatataataatttttaaagattatcactaatcaatcattactagaaatcactggtaccccatataatatatctgtagaatttgttagcaatattctctaacagctatttagaacattgttattaggcattagtggtgcccaataatttttataggtgtgacgctctacggttggttagcaatattctctaacagctatttttttaagttatatgggacataatacttgattatactaaatagcaatatcagaccaaaaataatattaagaactaataatgtcttttaacaattctctattatttaggagctggtggcgatcgaaccacacgcaactcagaaagaaagatagaaagaaaaagcaaaagaattgaaaagttatgaaaatggccttttggattttgataaccacaccaatcatctttctcactcatcaatctattggtttgcattaaattgaaaaagaagaaccattgttatcattcttcttctctttctttcttcttcttcttcttttagtttttgttatgttcattgattattaatataaagaagaaaaaaaaaaatcctaaagtattgtcattgttgagtttaaatatattgtgccacaaaaatttctccaaactatatcaactattaaaaatgagtcccttgtgcaatatattattcattttaaagtatattgatatagcactaacgccatgttaatgcatcaaaacttccaaacaaaaaatatatatttgtatgtttagcaacaataaagttaattttggttagatttagttatttaaataaactatttctcagtgtcaaaaattaaaaaaataaacaaataaataaactatttctcaaattgcctttatgcatgtggttttataaccatattagtaaatccttgattacaaaagtaggtttttcagtaagatttatatatttatataaagaaaagtataatgtgatgtgatgaggtgatacattctgtatttattcttaattatttatctattttattagaattttagtatatttgtattttctttgattttcaataatttttatttgtgatttttgctaaatataaataattaaaaaaggggcaaaaactttataaaatcaataattcaggagaaaggaaaattatttctatgaaaacaataatttaggagaaaataaaagtatttgtcctttataataatagtaataaccaatacaaaaaatcttacttttagnnnnnnnnaaacttgtgactaaaagtgaaaaatttgtgactaattataaattgtgatttctatgttgtgactaagaggtccgtgaataaaagtattagt

SEQ ID NO: 36237 - DNA, 4560 bp, Cannabis sativa
  modified_base (305)..(325): a, c, t, g, unknown or other
taattaattaccctacttaattaataataattactacatagttacttccaaacgcacccttagttttacatgagtactcgctattctaccaaattttttcaacaaaggtataatagtgattctataggggcttagaattgtaaaacatattcatataaatgacataatagtaattacattgcaaaatacattgtaaatacatttaaaccaatagtcattacctattcatagtaaatatgaatgggtaattacattgcaaaatactgtacattgtaaatacattgtgtttggaagtaactgtgtannnnnnnnnnnnnnnnnnnnntagggtggtaattacacagtctaagtctagtaattacactatattttaaaatgcaaggtgtgtttggatataaagtggtaattacatatgaattcctaatatcttgtttgccaaaatagttagtaattacatggaaaaataatatttttttagtataggtaatgtttaacatggaaagtttttagtaattacacagtgtaattacattcaattctcatggcctcatgagaataaacatgccaaattatgtaattacctctaattacacacaaattcaattacattatggctttccaaacacactcttaaaacatattcatataaatgacttttttttttttttttagtaaaattcatataaatgacttagttgttaatagatagtaaatatgtattaacaactaatcaatataagatctcatactataacaaaataacacatttttcttcatagacaatgaattaggtcttctttttaactccataatctatcaatcaattcacatcgaatcttttaatcaattgaagtaaatttcaaaacaaaaaacagcacatttttctatacaaattagtactacccaataaattagttcatacatacaatacatacacattttataatttgcccaatattattttttgagttggggcaagaaagaaggcaaaatttgtgcagtgttgttgactggttaacaattcaaattcaaaaatcctaaagaaacataatctgacaggctggtgactcacagtcactcactgtccaattaaattcaaaggaattcaaatatatatatatttatctatatctatagaggagcgttggttaatgggccccactagaagagcaacggttcaaattcaaattatccctcttttttctcttcctctgttctaaaaaccctttctttttctcactttttttttctcaacaaccaaacaaactcttttcttattcttctctcaatttcgaaagaaattcgaagaagagaaattgacccttttgagtttcttcaaaggaaattgtgaagtggggtttgtttttccacgatgtcctctcagaatcgtcgttcgtctttttcttcatcgacgtcgtcttctttggctaaaagacatgcttcttcttcttcttcttcgcatttggttgaaaatgtgaagaaggtttcgggttcttctgtgttgggtgccccaaagaagagagcccctctctctaatttgaccaatcgaagtaataataataacaatgagtctcgtagtaatgcttcaaagacaactcttccttcggttcgtattttttttttctttttctttatttgaatttcttgtttgtggggttttactaatttttcataattcgatgagaaaacgaataaagatttgaacttgctatttgggtattgaaattttttgtttaatgtctctgtttaggtaccattgggaaccaagaaagtggaacctaataataatgtgggggtttctgggaacaagatgctcaaatcctcctcaaatgtcaaacctagttcaaaggttattacatctaaacaaaaacttgatgaagctcctcctcctcctcccatggccattacatgtactagtatggatgtttctccaactcaatcagaaaatctttctgtatctttggatgaaacaatgtctgtgtgtgattcttttaagagtccagaagtggaatatgttgcagttgattctattaacaagaagacatttagtaatctctacatttcagaacattccaagtcaacaggtttgtaccaatcatctctgcatttcattttacttgtattgtgatgttgttttttaagtactgaaatatgtcttttatctttaatgcagataacatttgtaatagagatgtgtctgtggagatggaaatagatgatgatcaaattgttgatgttgatagtaatttcatggatccccaattgtgtgctaccattgcttgtgatatttataagcatttgcgtgcatctgaggtttgaactctttcttcatgttgttagcattgtgcattgagcttatttcttatgctgagatctgttcaattcattggaatttcaggttaataaaaggccttcaacagatttcatggagaaagttcagaaagatgttactccaagcatgagggcaattctaatagattggcttgtagaggtagctagcttcaacaagtcatagattggtgtagattttacttgttatcttattaagtttgctgaaattccatttgtgattgatttcaggtgtctgaggagtacaggcttgtacctgatacattgtacttgacagttaattacatagacagatatctttctggaaatgttatgaatagacaacgattacagttgctcggtgtggcttgcatgatgattgcctcgtaagaaaaattctcactaatctcaagcacattacatgtactgaattgtttgtgttatgatattaacatgaaaattgattatgtttccagaaaatatgaggagatttgtgcaccccaagttgaagaattttgttatataactgataacacctacttcaaggatgaggtactgttatatcttttgttgtagtacttccatattcattcatactaatcttcttacctaaaaaacaacattaacataaaagcatttccttctgacaggttttggaaatggaatcttcagtgttgaattacttgaagtttgaaatgacagccccaacaactaaatgtttcttaaggtatatagcctaaaagcttttctctgtctttcatcacaagttatcttttcggtatttgttgtattaatggtggttggtttacaggagatttgttcgtgctgctcaaggaatcaatgaggtcccattaatgcaattcgagtgcttggctaactaccttgcagaattatctcttttagagtatagtatgctatcttaccctccatcaaagatagcagcatcagcaattttcttagccaattttataatcctcccatcaaagagaccttgggtatgtcttcatcaatccaatatgtaaagtttgtttctttttttattgaaaataaaatctcattagttttgtttccatgataacagaacaacaccttgcttcattacacacaataccaaccatcagacttgtgttcctgtattaaagatcttcatcgcctttgttcgaataacaacaactccagtttacttgccattagagagaaatacagtcaacataaggtaacaaatagtttttcacttgttataactgttatgatataattgtatctgaactaactagtcttcattgatttatgttacagtacaaatatgtagcaaagaagtatgtccctcctatgataccaacagagtattttcatgaccaaagccactagaactagatgttgatgttccaataaactgttgggcttacttttgtgttggtgaatctggtggcagctggggtggttgtggtctgattttttcatccattggatgaaactaatgttgtataatctactttttgttctcttgtctttaggatagtatgtgccaatagtttttctttttcttttttctccctgaaaatagcaacgggtagtttttcttagtgtgtagaaaactattggctttgttgtagctaactccatcaatgatttcagcccccagcaatggcacttttcactctcacactgttgtgattatggtttgagcattccataaagagttaatttatagtactatttcatttcatcatgtaatcataaccacttgatagattcaatagaataaatgagttgaaatcataataatatatcttttttcttcttcaaaaagtaaacaaaaataaaacagaaagaatccatcaataactttgacatttactaaattgtgctatcaaattttttaggctcttaaaatttttccacaaatattaagttggatttttaatcaaaataaacacgtgatagaaagaatccatcattaactatttagtacagctgtgtaaaatttgttggacctataagcatttggagaaattataattcaaaattttatcactattatgtaagcaatagaaataaaaaatataattcaaaatatttatggtacttttggtaacagtaataaaaatttggaaaaaaaaaaaacaatgtaattatttttttagaaaaatgtgtttagtaattttcattattattacttttttttatttaaggaatgagaatttattttaaggaaagatttaagttttt

SEQ ID NO: 36238 - DNA, 6743 bp, Cannabis sativa
ttttatgtgtgcaaagatgattgttattaatgagttgattattggatttgtggagaaagaggatttttcaaattatcatgtagcattgcatcccccaaaatgttttctttcacgcattaccattgttagggatatcacgaatctctacaatggggttattttttgctttcgctataagttcacaaagattccctcaccagtcaccgttgacacatgaacttccattatgtttgtcatagggttgtcaccaatagaacattacatttccgagttataaattctggtttcttgtgatatcttttgttttgggttagttcactacacttttccgtgctacatttgacgattgaatttacaaatgtgagagtgttattgcttaggcatcattttggtatgtgtaggtttcaaagtacaaacatgaatgccttcaaggctttcaaagcagctgtcccaattgaatggagtcctaatctttacatcaccctggtgagaggtatcccaggaactaggagacttcacaggcgtactttagaggcattacgtcttggcaagtgcaaccgaactgtcatgcgatggaacactcctactgtcaggggaatgcttcaacaggttttccattagtttccaattcctttgcttaaatttcttcaccagggtttgatttcttacgtttggcatgtctgtatatactactacaggtaaaaagattagttgttattgagacggaagagatgtacaaggcccggaaacaaaatctggcaaaccaccgagctttgcggcccccattggtcataagtcatctacctcctgcaagtagtcttcctccttctgcaagtagttcttcctaaggtcaggtctcagtttttaggagtgagtttattgtccaagaagacaatcttcctgtagtgcaatttctttgtactgccaatttccatctggttcgtatactatatttggcataagtaggaaatttgttgccgtcttaaataggtgtactcggagtaataaaattttgctcccgagaagtgaaatgcaattgggcacatctatttacctttatatttatagatactttcatatctggttttcttttatgaatgccttagtgtggttggttttcatgtgcatcgtgaacagtatttaattatgaattactaatctcattatcacattgtaacttaatcacacattgtctaataacggatacaaacaagaagaatgaatcaatactatatgacatggctctcttctattttccttttttttttctcctctggggtaagaaaataccacatctcaagggattaatgacttaacataatcagacataacatcatatatcaagagtgatattttcgggcccctccattgcatctatggtatttcctcatccaacttgtctgatgttacgtcatttgaggtcttaagctctttttccccgctgtcattaaggccaatgaaatgcatatctttgtactgatgtcttgatgcgaagactaggaaaactccaaaattgatcaatcccagaactgcaaggagccaatagaagttatctaacattcccttgttcaagttgctcctgagccaacttttgttggtcactttatccactattgaaaccaacaaactgctgacaaagaaccccatggagagtgaactgaggaacagtcctgtgctcatggacttcatcttttccggtgcttctctgatgaaaaactccagttgcccaacgtaagcaaaagcttctccggcccctaccagaaagaactgagggactagccagaaagcactgatcatagttttgttgtgaacggcttgttcccttcgttgtttttcaattattccagcagcaaccatagcaaccattgagaagacgagtccaatcccaaccctctggaggctagtgatacccatggggttgtgagtgagtttccgaactatggggacgaataatttttcgtttagggaagtaaagaggagaatggatatgaatagaaaagtagagaaagagcctgaagggataacaaaattcccaacatttcgtttcatgaaggtagcttgctcaatggtgaaagtagtcatttgggaatagattgtccaaaagaggatacaagttgaccatatggggatgagcttaagaaccatttttacctcttcaacttcagtaaccgtcgatactatccaatgattgtttttgttttcatcactggcattgaaattatccttttctacaattgcagctttgtccagacacctacatattaatttaaggaaaaaaaaaagaaaacaaattatcagtgcccatgaaagagtgaacgaaataattgagccgtaaaaaaattgaccatgtgctaatgttaagttgattgagagtgcattataaattgattaaaaatgacgtaattatgctcctttcttaaaaatcttagcatggcctttctttaacttgtttttaccacatgaaaattaattgaagcaaatatgcataatcatccacatgtatatatgagttgacaatgcagaactgaaagcatactagctaattttaactcaatcctgaatatatgaatatggggtcatattttcattggaaaaaaacatatgaatacttacttcaacttctctgtgtatggtactgtagcttctgagtacttgttcaaaaggcttggatgagaaggaaaaggatggctcctcttcttccaggccaataatatcaccctccatatgactgttaaagggctccctttaggtttcttaaaccgataaaatggtgtcccacatagcaaaataataaccgctattatcattgtccctgctgatatcccatagccccatcctcttccaacattatcttgaatataaaccagaacaattacagcaaacaaggaccctaaacttatcccaaaatagaatctgttgaagaagaaaaccatggccttctcctccttggggtctgaaatatcaaattgatctgacccgaaacccgaaacgtttgattttattccacctccaccgagtgctatggtgtacaaagcagcatagagcaacgcaagttggtttccatttgcctcaatacactgatgatggaaatttctgaagtcatcacaatgaggaggtctcatgctgggaatgattgttgccagagttaacataacaaccccctattgatttaaataacatgattaatttctcataatatgtttaagaaaacaactgctattcttggctcgaaagacttacaatagcagttatggttgctgagattgcaacggtcaggtaccgaccgaacttagcatcagctaagaaacctccaagaaggccaaggagattgagtgttcccatgaagttagtgactattgttgcagactttgctgatggaatatgcaagtactgaaccaagtaagtcacaagattcattgaaattcccataacacatatcctctcagagagttctacccctgcagagccatagtaatcaagaaacataacattagtttatgagcattaacaaccaaagagtttcaaagcttttataagtactcaagcttgttgaagtacctaagccaagccctgcagcaagccaccccccggtcttggacttatcagccagattccctcgataatcgtacacagttctatcacttccaccatctttctcaccatgagatgaaaccagaacctgtcaaaacgatcaagagaaagaaatttgaaaaagaaggaaaaaaaaactaagtcaaaacaagatagcaagtatatatttgaagtaacttaccatgttgttgagagaaggggaagagtgagtctactctactctagctgattagctagccaaatgggctgtaaagagtaatttgtggcaaagaaaaatgcagacaaggctaatggaggttgagatgtgaatgagagttggaaagtttttatataagagctaaaagttatcagctaaacatgcacaggcatagccctccacaactaattctagtggtggggattaataaagggtaaaagtaaacaactgatgatagattttcaattcaagtcgtgggagtttttggattggcaacacactttatgtggtttctatgcctagtaactgtaacaatcgaacaggttttgagaaagacaataaagctttccaaatttgattcctctctcttcaattatttttattaactatataacatacgacacttggacacaaagttatgccatgtgaaactgattatatagctcctctttgcggaaatttgtacagtattatggataatgagaagagtgaagctaatcctttaaatcacaaggacacttttggatgttcattatggcaaatcaaacagctatttataatagtgtcttggtgtggaatgtggggtcattgctctatagataacacaaacttttggggatatcccaattatacatgtattatgccatataatatatattaactttttctagttctgatatttttccttttctccacttcgaattgaaattttcatgaaagattcttatttggaatctggattaggtaatggaggatttaagctctttatgcctaatttgctggtacatgtctattgatgaaaatatcttatgtactattccaatcttcatggcactaaaatctgtcacatatccaccggacaaaacatactgtgatagatagaaagtaaatatatatttttttatttcttctttacagaccatataatggcatcttaaggatcttttttattctacctcctatgggcagtttattttttttttatctatttttttgactaggtaatgttaatatactcatcaatgattgatgggtcaaactagggtaccactactacactacactttgtttctgaacaatgattgataatattggtcggttcgatcaatatttatcttgaagatcaaaagtgcatcaaaattcagagtcacatagttatcactttacagtttagatataagaaatctctagaaagttttggccattattgaaacagagacgtacttctttgttgttatgaagtagcaacctaataaacttaccaagaagaaggataaatttaaatgataatttggtatacttctttgaaggggttgtgaatgtttccaaaaataagatggttaaggctttgtttggaaggttgattaacaaagtttggcctttggggaaaatcaatgggtgcttagttcaaccaattaataggagaattaataggccatgttgcatggttttacaaacataaataataatagccacacaaatactactactactactgcatgagaaaaagtggtccaaaatgaaggagttattgtttgattcttgtgaacctgaaacaaaaattaaagaaaaaaacaaattataagaatagagaaggtgccaataggtggcaagtagtaggacctataaggccaaaggagagaaagacgtgaaagaaagaagtcatctttatcatttttggatcttttcaacctataaattataaagacgcctctaatcaattttcaatttcacaatcaaattctgctgggtactagggacaaaacggaagatgtggtggtaatgctttttaggtatggtgatatgattttcttttagcctgctttgaaaaaaaaaatgatgataacaacatggctatatagactatagtgtatgttcatatataaaaatatgaaaaaaatcacacccattttatttctatgtatttgagagccatatatatatgattgtatggcatattagaacaatatgtaaaagtaacaaatgactttctcataatctttacatgcccagcaaaaaatattatctttacatagagatagtttgatgaagatttcatgttggttgcctagagacacttcattggatcaggatagctgggagagattaaaagtaaaaggaagtgattttgcaaaaagattttttagatgtgaattttataaaagaaagaaaaaaaaatatttgatttgtcttttgtttttatttcattctctttcaaataaataaataaataatattatcatttcataagagtggaagtggtcccatctaacatttatttagctcagtaaggtcactgtctaaggttcaaacatataaattacaaagtaaataaatgtggcaatgaacacaaaaccatgttgggaatacacattactttccttaaaagaattacatacataagttcttaatattgagcaaataataataatatatttaagatatatatggatttatacaaatttcaaatttgtaccctatattctgtacaaataagtgtttgaattctgtatttaaaaattattttttatatatcttttgtaaaaaaaaaatgaataggctattggacctgattttcctcaaactaatttttactatgaccgaaatattttgtcaaatttagaacttcttcaacactttctttttcaagatagacatcttagatctaattatatcaaaaaatattttaactaaaattggtccaatgacctattttaaccacaaaaattaatttaaatacacataattcaaacataataacgacctaaaatatacctattatatgtttttatgaggcagttcaataattgtggagaaaaagtactataatatgataatattaaaatttacttgtatagtattttatgaaagattctgctgtattcatttatttattttgcctaaacaaatataatagtatgattaattaaagaaattgagattttgatcatatatg

SEQ ID NO: 36239 - DNA, 5471 bp, Cannabis sativa
cacgctctgtagcgggactgaacgctgtactgatattcagcaaaggaaacaaaaagaaagaaagaaagaaacgctgtaccgacaaagcaaagagctctctcgttcgaaatgcgaagcttcaccaaactaaagtcatgcgccatggcagaaccttactcttcaaacctcaaaccgctcattcccacctcggaaacctcctcctcctcgcttcgctcaccaagactcttatcgtttccggaactcgttatctccccgaaccccattccattccgctatcggaatctctcctccaccaaatcctccgaagcaacgctctccaaccctccaacaagcttgaattcttcaaatggtgctccctctccgcaaattttaagcactcgcctctctcctattccatcattttccgcattctctgccgcactggctatctgcacgaggtcccggacttgctcgactctatgaagggagacggcgtcgttgtggattctgagaccttcaaagtcttactcgactcctttattcggtcgggtaatttcctttccgcgttgaaaatcttagacgtaatggaagaattaggagctagcttgaatacccaaatgtatgactctgttatcgtagctttagttaggaaaaatcaattgagtttggctttatctatgttctttaagcttctagacgatgaaacttatgtgcccagtttcattgcctgcaatgaattgctagttgctcttagaaaagcggatatgagagtagaattcaaacagttttttgataaactcagagagaagaatgggtttgtgatggatatttgggggtacaatatatgtatacacgcgtttgggtgttggggtgatttgggtacttctttgaagcttttcaaagaaatgaaggcttcaatggatcctgatttatgcacttataatagtcttcttcatgttctttgctttgttgggaaggtgaaagatgcattagctgtttgggaggaattgaaattttctggtcatgaaccagatgaattcacttacagaattattatccaaggatgttccaaatcttatcgaatagatgatgctacgaagatctttaatgagatgcaacacaatgggcttaggcctgatactgttgtgtacaattccctcattgatgggttgtttaaagcgaggaaggttaacgatgcctgccagctgtttgagaaaatgactcaggagggagtgagaacctcttcttggacttataatattttgattgatgggttgtttaggaatggaagggcccaagctggttacgctctattttgtgacttgaagaagaagggccaatttgtagatggagttacttacagcattgttgttctgcagctttgcaaggaaggtttgctagaggaagctcttgagttggttgaagaaatggaaagccgaggctttgttgttgatcttgttactataacctcactcttgattgagatttataagcagggtcggtgggattggacaaacaggctcatgaggcacattagagatggcaatttgctaccaaatgtgttaagatggaaaatggatatggaggctttgttgaaaaagccaccgaccaaaagaaaggattacacaccactgttttcatcagaaggtgaatttagcgagattatgaacattataaggtctgctgatgctaagatggaaccagagcttgttcaagatactgccaaagtcaaagatgaggagaacattcccaatgatgttgatcagtggtcatcctccccatatatggatcacttgaccgatcaagtgttatcgaatgaccttttctctcagctattttcactatctaggggaaagcgagttcaatcaaaggaggctgcgtcttttgatatcaatatggtcaatactttcttgtctatctttttggccaagggaaatctcagtttagcttgcaagttgtttgagatttttactgatatgggtgtcaaccctgtaagctacacttataactctttaatgacttcatttgtcaagaaggggtattttgatgaagcgtgggacattctcaatgaaatgggggagaaggtttgtccagctgatatagcaacatacaatttgataatacaaggccttggaaagatgggaagagcagatctagctagtgctgttctggaaaagcttatagaacagggtggttatcttgatgtagttatgtataacacattgatcaatgcgctaggaaaggctggccggattgaagaagtaaacaaattctttgagcagatgagagctagtggaattagtccggatgttgtcacttacaacacactaattgaagttcacaccaaggcaggccgattgaaggaagcttataaatttttaaagatgatgttggatgcaggctgcattccgaaccatgtcacggacaccactttggattttctgggaagggaaatcgagaaacagaggctcgaaaaggcttcaatcatgcacaataaccatgattgaaactgcattttctttgtatctttttaaattaattaggattgtatctttttaaattaggaactttactcaaatagttgaggaaagttgggaaagtagaaaaaatgtaggccatttagcttagatcagaaaacaaagtggctatcacatcaaaggggatttggttttcttcgatattcttgtttgaaggagagggaaatagaagagaagagaagaaaatataaaagaaaagggggcgaccgtttcttacttttaatacacattccatttttttaggaaaaaaaatatatatttcatggcttaagatctttcttagtaataacaactaagtttatttcatttatgcttctactttcaactctcatgaaatgcatcatttttacaatattgatctttaaatctacgattcttttcttaatttatttgttccttttgttttatgttgaacaaaattagtccccatgcttgatatgggcgcttttgcactaaccaacattcaaatataataatatatgatgcggttttcagatcttattgttattgctttgtagtgaacataagtacataacaatgatattttaaaaacatgaatttggatgcatgtagtagaaaacaagtaataaagatactgttacaagtgtatgtatgtagtgatgagaagtaattaatgttttggataataatgtttaaatgactaacactcactcatatagctacatcaacaaacattcttggtaaagtatgattattctctactctgtcgcctcctatagctttcatctaaactaaaggtgtgtataccagacagaacatctaattcttaagcagcagggatctgcttctttcttctgctacctgttcattgaagaccaaaatcaaattagaggaaacaattgaagagaaaaatgaatgattaactttggttaaaacttaccggaagagctcttgctccagagtgcttggccgtctatagtggttaagtggtggtcatcgaggcgtttccaagttttaatggacttcacacctccccaaccaccctcttcaagtttctccaatgttgctacaaccaccctagccctccttgaccatccagccttcccataagcatggtatccgaatcctccagcgtagcaaaggtgaatatcagttaacttgccacaaaagtcattcaaatgatcatggcctgtgaaaactgccttaacatccccagctccaaccatggttgtgaagaagccagaattcacagatgcagagctaatgccttcctgtctcacccctgtgaagtttgatttgtcaaaactagcaaattccggtaatgggatatgaaagtatgcaagccccggtgcaggtcctttctggggttgtggcttgcttacataagctttctgcaaagcaatgaattgattaaattcaatacagttcaactgatattagaagaaggttttcagtgaataaaacagtaaggcaagttaccctaagctttgaagaagtacgttcgaaccagaactgttgggaagccttgatccaaccatagccagggatggagggaactgtagagtaatctccactgtccaagaagtaaagattgagaacagatttattctcaaaactagagcctttgactccaccaacctcaacattatagttcccaaaaccatcaataaacttggcttctggagggttaacttgagacaaagtgttctttaacccaactatgtgtttcattaccccttctcttgaaagagtggattcctggtcatggtttcccaaaattgcagtccatgggatgttggaggctattgcaggggcaaatgcagcatttagagacttaacagcatcagtggcatcaaatccgaatatattatcccctgttacacaatataaatatagagaaaagagaatgagttaattgggtaagtgggtattaactaggcagagctaataatttcaagaaaaccaagcaagctacagacttttacagtcactaactgaacaacccacctacccaactagctattaattatcatccaaaagtgggttcccaattttcatagccagcaagcaagttttctcatctaaaaatctaactaacaactacaaaccctattaagaaattagtaaaggtaaaaagaagaagagaatattaccagtgaaaacaatgagattgggtttctcggcgagaatcatgcggtggatgaaggcggaggtgttgagatcagagcaacccttgacctggtttgggagcacatcaagacaaggacttgactttccatcggcaaagtgcatatcggccacttgcaatatcttaaacacaccattggacccaaatctgagcttcttttgctgatgggttttgttcggttccgcagctaaagcaccggtcggaagcagagacaaggaaactattaacaacaccacaaacgttgtattaaggttgtagccagacgctaacaacgttaagcttgttgtcatctctgtgttttttccacacacacacactcctttgctttgccactacttaattactcagtttgtttctttgcttatatcaacgatttttttacgtacttttctttgtgtttttttgtgaccaatcgaacaaaatgtcacggtctcgtgagacacgttatttatagctgtctagttatatttcaatttcgtgtatttactacctctatttaattcgacaagaactagaaaaatattataaaacaattaatttcatatgtatttgtatattaaaattatttagagcataattttgatactcttgtgaacattttagcagatcctctccatccactgattctgtatatgctcgtccaaacttcattttagttcacgtgacgttacaagtctcgttcgaattttatgccaaataaaacaaagaattaatttctttaaaaataaataataacgggctttatttattaaaaaaatcatatttggatattattttttttctaaattttcaaaaatatatttttt

SEQ ID NO: 36240 - DNA, 16449 bp, Cannabis sativa
ctttatattttctttttaattttctttttaaatttattttttaaatttatttacgccccatttatttacgcccccctcactttaaattctgggtccgccactgaccaagaatactataggtacaaccgcatagattgatatttttcacacacacaaataataacataccaagtgctaaaaaaactattacttttagtgacgatttcatagtcatcacaacaaaaaattacttgtgattaaaacataatatttaaatacatattatcactaatttagttctagtcacaataaacattattactaaaattaaatttagtcacaacaaattataatttttatgactaatacttttagtcagagaccttttaatcacaacataaaaatactgatttataattaatgacaaatattgaatattgaataataattatcatcatttctctgaaatttgaaattaagtaaacataaaaatattgaatgtcttcccaactttctgatgatatgtatatatacatatatacatgtctgttggacatatgtaagtaataggtgatggtgtcagaaagtaatattggaagagagagatctaaatatggtactattagattgaatatttcacgggtgatcatattcatcgattcacccattgcccttgcttggatcttatttattatgtgtatatatatatatatatatgtacgaaattagctctactctatcatgaataatggcatatagctaagccacgcatatacatacacatacacacatgtataaattaatatgtacacacaaccaattcgtacatcttcaatttgatttttaacttttaactatatgcatatatataatataacatgcagtacatgcacaacgggggaaacatgatattaccaattaatataaagaggtaattaataataactttctctctcaaaaaaaaaaaaaaagaaaaaactatcaaagagcatttatggtgttgatgtgtatatattatgtgtagcatacagaagatgggccatatatctatatatatatagctatatatataggtacttgatcaacttcaatatatgtattatttgggttttcatagctatagctaacttacgtctaccttattagttataattatataattaccttatgcaagctaccttccaaatgcttctgcaataataaataactacatatttagatgaaaatgatcatatatatttaaaatactttatatatattatgtgtgttgtataggcacaaaatacgaaaccctaattaaaaatgtattgctatataaattacctaaaaggtgtagttggatgttgttgttatcagtattcacgtggctgtgtagtacatacatatatgtgtgtgtatgaagtcataacttaattattactccacacaataactaatattgcagtgaacacatattaatattaaataataaatactagatctctctagattacttacaactactactgaatactgatcagatatacatatatttatatatatatatatatatatataaataactatatagtagttctcactaatatatgatttgctcttccttgaaaaaaatatgatttgctcaaaatatttaaaactccatcaaattattaataagatcgagtcatatgatcttcgctaattttccgaatacagcttattttcttttataatatactcatgtaacatatataatgtgaagagtttttatttttttttatacatatattattacgaaaagtattattataatataagtcacactaaaattttgtgaaaaatggactaattcagattttggaattaaaaatcaaaataattataacgggttggaagaccaatattgtatcttgtgtgtagtgtaatttgccttaggaatcccacattttgcactggcctcaaataattcacgcctaaaagtaatattagaggcgacaaaatagtcgcctgaaaataagggcgacgaatttctatttttttacttttaggggcgatattgtcacccctaatacccataaagttacccctaaaatgtgttgttagaattgttgcatttgacttttaggagcgacaatatcacccctaaaagttattaaattaaataaatatattttttatattacttgaaatattaatttttaatttattaaaaataattataataacaaataaaattaaaaataataattaatatgaaatacaaatttattcattaatatagtagcacaataacataataaaattaaatagttcttacaaaaattagtaactaaaataacttaaagaaaacaaaaaatgattataattagttcttacaaaaaaatagtagtcttttggttctataactgtgataaaaagtcatttgatctctcgttcttattgaactttggatgactcggtagctggtgctgtgatgtctgaggtggttgtagcggctgtgatgtctgaagtgattgtagcggttgtgatgtatgggatagctgtagcagctaagatgtatgtggtagttgtagcgactgtgatatcggtgcccccatcatctattgatatgggtgggctggttgagcctgctgtgatggcgtaggttgctgtgatgatccacccatatcagtcgaacccggaaagaaagcagaaggatgctactatgaaattcctccgtagatgtatggatgtgtgtacggtggtccatacatgtaagggtaagacggtggagggtgtgatggttgtggaaaaggttgtggtggatgctgagactgtgatgtcgaagatgtatgcatgtcaggttgtgccactgaatgttgagaatgtgcatgggaaccttgacacatgtgagtctgagacggttgaggcactggagtggagtacttactcttaagcatattaaacattgctaactttgcagggtccatattttatgggtcaagatgtacccttcaatttgcggccaattccacgaacgtgaccccgccactaaccatacgtctcttcgaagaagctgacgtaatcagatgatgaccaagaatcaaaatctgtctgagaacaagttgctcgagcttcttctaaccgctcctatattaaatcaataaattataacaatatgacactaacattgggaaaatataaagattaagttacaaaaatttacataatcttgttttgcatattcctataatttatgaagtaattaaacattagagattatacaatttaatataacttaactataattatatttgaacttactaattcatggtgcctctgagccaaggatattgttccttgggttgaaacatatgtcatatgttctcggtttttcttattttgttcagatcgagtaagaaaagctaggctagtaaaaaattcaccctgcctttgccattgttccagagtcatatcaattggatgatattttagtgtttcctcgtaatcctcaggttttgaataaaaacgtttgaaatgcttgtgtcgactaattttttttttgttctgtatctattagcacactcggtgtcgaaacatctcaaaaaaatttcaacatacggattctcgtcaatttgatagtaaaattacataaaaaaaaatattaagtatattaacaaattatttacctgaattcttccaagcacttgatccttgtactgttgggacactgcattccaatctttgtaatgggtaggacacatagcagcaatgtaatcgctcaaaacgcatgctctactcccgttatcttctgtgaaattggacagtagactaatggcaatggctcttttgcctctctccttcttttcttcgattcttcacgaattgatggaccacgaccctttcttcgagtatcttatattttgaataagaaaaaaaaaactataacgaacatataattttttttattttttaaaatattagtataaatataaatgagtcgtcctcgcatgcacactacaacaaaaattataattaggggcgaacctattatcagcggggacggtccgcccctaataatgggattattaccggcgcaatcctagaaggatcagggggatcttctccgttactatctccaccatgctaaaaagctacatctgttgacatattgatactaaatacaaaaaatttattaaaactatttatgaatattgtatttttaaaaatattatagatgttatacttctaaaaatatttattacatagtcgaataaataatttattacaaaactacatctaaacagaataatcattatcatatttggtaattaaatttttattacacgggacacatcatcaatatcattatcaacactaagatcaacaagcaagtcttcttcctctgctacttcttcaatatcttctatcgtatcatcttaagtagttattgggagtataggctcattgtgtacaataaatggtggatgatcagattgttgcacaagtaatggtccaagatccacaaatagttcaaaattaaataagtttgtgttatgtacatcaacatcattaatcacattaagagcatccatgtacattaccaattggttgtgtgtatgaatttcttaaggtatttatattctatcctaatacaatcgccaaatcctatatatcataggattttataatgtgaattaattcgggttttgaaattaacaataataaaaaaatcacattaaaatttataaatgatcttttacccttttcatagtgaaaattcgcctaactttttactatatttccaagagtgtactctactagtattctttgtcttttaatcagtttattttttggtacaaggattgaaactattttaagacttcgggtctttttttcgagtgaagcaaaatccaccttgtattgtagtggaatgtgaaagtgaagtgcatcgcttaattgatgcttttgggttttaaagaagttcattaccattttgatatttgaggattccaatatgtgtaaaaaaaatatatgctcaagaataactcttattaattcggtgtttatttttatacatacatattggagtcaaatcttttttatactaaaaaaaatcccagaggaaattaatactatatttcgagtattcttgtggcatgaaaaagcatagctttactcctaattgctagggatcaaatttgaaagtctaagaaggctggagtactcaaattcaaaaatactttggcctggaataaagcagcaatagaaaaatatgtttgagaaatttcaacaaaaaatatgatattttggtatagtaaatcgattgtgtctatataaaagagcagaattggatgaaagtggttgcagtgaaggatgagattaaaaaataagttaatgagcaacaattcataataataaagtatatgattcactaggggtatgctctcatttggccagattctgacaaattataatagagcaaggaggtttggggtagattcaatcttcccaaatattgctttatattttggttggttgttcaaaattgcttaaaaactaggaacaggttgaagcgcataaatttggtgcaagattgctcttgactgttgtgtgaacgagatcggaatcggctgttcactaattctttgattgtgttgttagtaggaaggttctaatggaaattaaggtgacgtttggttggaggtaatgaaatggaatggagtggaaaggaaacaattttcattccattcttttgtttggttgcattttaaaatattgaaatggcattccaatggaatattctttctactattttggtagaatgactattccattttaaaagaaatgaaagaccattctaatgtaacaagagaaaaaatttaatgattttttaatcaattttttttatgcattttaaattttattccattccattgatcctattcctattctcattcctatttttattcctatattttcattcctcccaaccaaacaccacctaaaaactggcttgactggaatgtattggctgcctctcagcagttgattcgttgggtagatcgagctaagttaagtttaagaaacttatcttttctacttgtattggtataccatatttgaaagctaagaatgaagctttttggtgatctttgaaagtaactacaataaatattcttgtaaagaagatattgataattataaaatgtagagtattatttgtttgaccaaaaaatattagcaaacatgataaagaattaatggtttgagaaattatagtttcacttgattcatacagctatagttttggtcaggcctctagttttacaaaagtgataataagatgtaagtgtggttcattggaatacaaatctctcattttccaaaatattatatttatatgtaccgaactttaattaatatattcattatatttaaacaaattaattaagtatatgtattgtgtagatgtatatttatgaagtaattaagtatataaggaagcagctcaggttcaaataagttaatgattatggtaagtatgggggtgggggacattacatatatatggattcatgggaatggaataaaagtcaacattgtacataattaagaaaacaataagtagtagtgatacaaaattaaacatattggatatttattataataccaaaccatacactagcataccccaagatatgtgtcgtgtatgtttcaggagcacaaactatacatgattgatgctacctcatactatgtgcacacgatttacaacaccagcacagccatatatattacatatatatatatatatatctataaatatatatttattatatgatgaaagatggtatacatatttaatttatgtatatttacttggaggtattaatagtttatgtttgtaaaatagtaattttgttttgttaccttatcagtttatttgattaaagattactacagtcgcacacacactataaaaaattggtacttttagagataacttttagttacaaaataaattttttgtgactaaatgagacttttagtcacaacaaacttgtgactaaaacatagtatttaattacaagttgtcactaatttaattctagtcacaacaaatattgtgactaaaaatatatttattcacaacaaattgtaatttttgtgactattacttttacccacggacctttttagacttttagtcacaacacaataataataatttagaattagctacaacttttttatttttaatcacaaatttgactaaaagtaagatttttgatagtgacaatttttatttttttttagtttttataattaaaaaaaaatctttctaataaaggtgtttgtatgcaaaaatattttttttcttttttaatttgaagttctttttagtagaaattaattaataagacttgtagcttccctcgaaaagatttcagaataatttaaatacttaagatctttgttttaataatattaagcacttcgaaaaacttttcacttaaaacaaatctttatacagtaataattcgataaaaaaataaattaatttatttatcttatacttttagctataaacaaaagtaaaaagctaagctaaatagaacttatctctaaccaatcattgtaacaagaccaataagcattttataaagagcattgcaataaaacatcactagtgcccaacaacaccagtacttaagagtggcactttcttattaattagcgatatattataaaagttattgtattaaattatataaaatctaatacttaattatatatactattagcgatatcacaccttaaaacgtgctaagcacaactacttatattttcttaacgttctcttttataaatatgtttggtatttaaaaccatctacaaattataatgtagttacaaataatgagtaaataatgttatatatttaacacaacttttgtggttaaaaagaaaaacacaacttttgtagctacgattgaatgcatataatagcctttgaatatgtaaattgataggaaaagtaattgttattaatgataattaatataattaaagtcactcattagtgtttgatgacattattgtatataaaacatgtatatttgttaatattgtaatacttgtgataaattaataacacaacttttagaaaactattgaaaaaatattttatgataaaagtactaaaaaataacaatgcttcacaaaaatttgacattttaaatgcataaatctaatggtaatacgggtcctacttttttataggacacaagctcacgaggcacgagtacgagtacaacacataaatatgggtttggatacaaaaaaaataaataaatttaagcatgacacgacataataaacttaaaaattatgacacataaatatgaataatctaacttgagaacacaacacattaaaaatcttataatatgataatagtaataataataatttgagtatttattagtaaatattaaaattttaataatttttttatataattttttataatatattattgaaaagctataaaaaaaaataattgaaactataaaaaaacacatataacacttactaattatctcattaatttaatgcaaaataaaatgtgaacaagtaaaatgcaaattagagcccgtataagaaaataggatgtcatgagtaaagtacggtttgaatccgaacacaacatgacatgatttgtatttttttaagtatgcatggcacgatacaacacaacttatattttaaaatgtactaaaaaaatatgagtcgagccactcgaggacgcacgtaaacacttcatcctacaaaaatattgctaaaaattaaaataataataaaaaaaagatttgagtactaaattatgcatttagtatgaggattcatcttggtggtaatgagaatatcaaactcaacccatatttagtaaattcaattttaatgagttaattagagcttgtgtttccaattgagtctgattttttataagtttaattaataatgatcataatgttaacttcctccacttaatctaattaaacaccctctctctctaactatacttatttcaagttcaactcacataacatacatcctataggtatttatgacaccaattttctcatgtaagaaatgaaatgacccattttccttttctttcactttttgttttataacttttgtttttctcgttgaacaccctgcatagtgcacccatacgtggaaagcacaaaaccctagtttttgtcgaacacatccatccgtacgtaattttcaaaaccacacatctttactagttaattaactaactaattaatctccaaatgcatggtttatatatatatatatatataaataatcaaagttctctagtattgataaaggccagggacatattagtcatcagcaacatttttaatacaattaaccctagctataataatcatcatgaaaaaattgcagtttgatttagctaaaccaccaagttttaattataatttggcttttcgcaaaaacgaccctattacataattaatgtaaggttcttttcttttctttaatttctcaagagaagtagtagtagtagagagagagagagaagggtgtgtgtgtgtgtgtgtgtgtttgtcgatattattaattatatataaatagacaaagaaagaaaagagagctataaatggaagaaagaagtgatacaagtgttattatattataggatataaacaatacactttggccttgtttaggaacaagggttttccgaaagctgatctccttaactgcccggagtaggaaccccaaaagagaggtctgtgccctgtgattcatcattttaagaaataaatattatatatattatatatttactgttcggtgatcatcatcatcaccatatatacagatctgatttatctatatatatatatataaatatgcattggtcattactcttttagatctgttcttttatgaacatgtatagtactgatcttattttgtatatatatatagttaattagcttacacatacaaaagaatcttccttttcttttcctggagatcgatctgcatgttttttacccccttcttttcttaatttattaactttatatatttcatgatcagatcacccatttgcttaattagtttttcactctcatatacttaagttcttcatataaatatcttcaagtagtagcttcaaatattacttcaagctattgtttcttctcatttaaaaataattacttttcttcttattatttcagtggtatatattaatttattaggttcaatataatatatatacatattatgtgtctgtaggttctctctctctctctcaaatatatatttttggactcgatcttatattacttgttcatgataaatcgattaataatgtacctgcagattcccatatatatttgcaattgttcttcataaatatgatttatctacttactatattatctacttattattatctcaattaattagaccttaatgtagtaaaaggtgagtctttaattcatgatgatcaccgtgtgtgttatatactttgcaatgccgattttttttagttttaattaattaaaatctttattattaatccgaagttcttggccgggccgcgattctacttttattcttttcacaaaatcataaatatatatatatattaattcattaaccttcatacatacaaatctagctttgaaaattgagatctgacgtttcatgatggtgatgatgatgatactaatatcaaaccaactaattaaactattatataccaaacattattaattaaaataattttgttgtggtcattttgctgtagagatcttcattttttttttttgtagggtaattgttcttgttcttagtatacataatcttgatctgcaaataatatacatttataatattattcttaatttttatgatacattatatatatatatatatatatatataaatgtgttgtctttttctttcaaaataaatgctttgcaatctcctaattagaaaataaatcaattaattattattatattgtttcaggttattaattaattaattaattaaacaaaatggggagagggaagatagagataaagaggattgagaacacaacaaatcgacaagtgacattctgcaagagaagaaatggactgttaaagaaagcttatgagttatctgttctctgtgatgctgaggttgccctcattgtcttctccagtcgtggtcgtctctatgagtactccaacaacaagtaagtatatatatattattaatttttataggcctttatataaatttactgtatactcatgatacaaaaatcctttcttttagttgatgatatttattcaaaaaaaaaaaattgatcgttagatatatacatatatatacaccttaataacatgatcattataattattttgcagagaaccccaatattaaagtcttcatttttataattgagaataatatatctatatatatagtctgagtctgacaagaagttgtacctattttagctttcttcactaattattatttctacccttgatagttgatatgacctttttgtttaaaagaaaaaaaataatattattttctcaaaatataatttggtatacaaattgtagacttgttaagtagaagaaaattcctattttttttcaaatctaattttagaattgatcattatatataatattattatagaaatcctcagctattatagcaaactcaaggtatatatgaatatagacatgtgtgtttgtgtgtgcatttatgtaacatatatatatgggtcaaaattgttggattatgatcaagatctcttgatcataatcatatcattcaccatcatcactctaaaatgtggactcaccacaaaatttgaaattaacttgctatactgccaacctagctaggagctagctatacatacaatatataaatatatatataatatttataggatagctcaaaaagcaatatttgcaccaatttaggttttgcttttatttgaaaagaatcctcttgccgggtgtcttttcatgttctcactttgtcataattttcagtgaacttgtaataataattcatgagaatctgtgaagcaaggcttagctatatatatatattaaaatatttttaaatatattactggctgctatatatatggccagtagtttctctaagctaatccaatatttctcttcctgtgtttgtgggacaaatcaaggttcactcacttccctcaccaaatttagccacttagaaaaattcttattataactttcagtttttttttaatatatatattctcataaagtggatatatatcctcagtaattcttttttttttttaacttttcttctgtcaaaattttgatatataactaaaaattacataaaatgagactaaacagatcgaataatgaacaaaaatgcaaagcaaggagatcttagttcagttcaaacacacagtactcttgcaccaatttgggacttaattattcatctgccagaatcagccattgcttgatttcttttacgttttttctttttttaatgataacaaaagaagtgtgtcattaattttcagtaaaaaaaaaaaagtaagacaagccagtatgagagtatgagtatgagcatcctatagattattattattattattaataaaggagattttatttatgaattctgagtctttcctctttgaatgtttataagatatacttgcgttcattggcttctttcgccatgtttagctttagaataagtactatataatagcagccatagagaaatgtaattttcatgatattattggtatttttttactgtacatattagaaagaaaaaaaaatccctttgcctaaaaataaataataaagccagtcctttccctcttttcttccaaatttaagaaaaaaaaatgatctcattattataattttctattactttgtgttataatatatatggtgtcaattttttgcacatcaaatcacaaagatggacccttctcaaacatatacatgcatgggtcgtgtgtatatactatggagagtcttttaatatttcctaaacttttggttttctttaatatttcctaatgggtttggtacacttgtcaatcaataggccagggaaaataattataaagtaaatagtaagaaacatatggacatgaaagagtactagtgtatagataattaaatgcaatatatataattatatatttatcgatcgtattgcttcaagatacactggcctacaagaataaaagggatacgtacaaggtttcttttactatatatcttttctatgtcgatttattttaagtcaacctagtattcctttattgtttgtgtgagttgtactattacacattatttctaaagtgttgtccagctagctatacagagatgtgagtttaattttgaaaaacacacacattatatttatttagttacgtactaattttttgtttatatgtttgtgatatcagatctattaattaattaaacatatgtttttatgatcatatataagagtataaatcaataatttttaaataataagactaatttttctgtactagtgggatctttgtgtgaatggatttgtcattataaacatttttatttagatatatatatatttataaatgtttattacatccaatcgtttaatatttagttactttaaaacttgtcacactgaactcatcacgtactgtaattaagacttgagttgatcagtacttgaaaaactctttagtgcatgctttatgtttaatctgatttttggacattatctgattaatatgtcccatcgcatgatcactagctttaaaatttaaatatgtgtccaccaaaatgaaaaagatatatttataataagtgcttatttaatttcaactaccccttaatttatatgtaacgtacttgtcagtaacttatacgatatatataattctcattattgagatagtttttaatagttttattaattattacatgcttaattgagagtttataaattaatttgagaattacaggcacattaatcttttttccattttgacaaaagtgcgtgtggacgtactagttttttttctatttggcatcattgagagctatccaatataatatctttttagttgatttattgggtgtagcacctatgcatatatagtctcatcaccatcaatataatatatatatatatatataataaatggattaatattaataatgaaggtttattaaataattaaaacggtttttattttatattttgtactgtagcagcataagatcaaccatagaaaggtacaagaaggcatgttcagatagcacaggtgcaacttctattacagagataaatgcccaggtaattaaattatctaattaatatacctgattacatataatacatgtattattggatttatatatcctcatttagaaactgataatatatattttatgcagtactaccaacaagaatcggcaaaactgagacaacagatacaaatgctgcagaattccaataggtaatatatataaatatatgtatgaataccattgtcatcacaatctaatatttggttttgtaatgctgaagtaatgatgacacaactcaaacagtgaaatacataattgacatatgagacaaaaggttaaaaaagaaaacctatatagctagcaactaattgtgtatgataatattagatatatacatatacatatatatggaatgaattttctctctttttattaaaaaaagggaatttgtttcataatctattaattttttttttttttttttgagaaatcagtttattatattgcaacaaaccattatatatgtacattctaacagcaccccaatccaaaatctagtgtattgctatactatacacaaatcaccttattacaaggtttcaaaccattctaaatcaactttaaataatttctttggtaaaaaatttaattttaccgctaatgtaatattgactaatttttttaatcaaatttagctaaattttacagcatttaatgaagatgtcttatatatgttttattttatgtattttaattaatattgaatgtaatttaataagtttgtattctgatttttactattaaacttaaatcagctcaatcttaattatttaatggttatatatggagatcatggattgcttactctcacaggccaaaattcactccataaattcacaacgtaaactaattaaaaacacattcttccattcaaagctgatgaaatgattgcaaattaaataaaagaaacaaagaaaagaaaaaggaaaatggtcaaaatttctaaaagttgtgcgtgcaacaaatatttatatatttacattaatatataaataaaaatagtcaaaatttatgtaattattaatcaaagttaaatatatatatataggtaagttagcagcagtggaagtgtgagtgtgagtgttacatatatacatatatatatatatatatataagtaaatgcatgtatgtgttccatattgtgtgcaggcacttgatgggagattctttaagttcactttctgtgaaagaactaaaacagctagagactagactcgaaagaggaatcaccagaatcaggtccaagaaggtaattatatattcctaattcataaaatattaatcataatataatctcctttatgtaatgtatatgtgtgtgtgtatacatacacagctttcatatctttttaacaccctttttgttttttttctgttccgtacgtgttccctggaaaaacagcatgaaatgttactggcagatattgagtacctgcagaaaagggtaaaatagtcttattacacaacacctttctttctaattaattcaatgtatttaattataggtataataattaaacttattcctcaaaattaatcatatatgatttgataattgatccatgtaccctgaatattattattaggaaatggacttggaaaacgaaaacatttgtcttcgaagtaaggtaataatatcaattagcaagctcaattaacttttgctgaaatatgcttttgtctactttcgtcagtattagtattgtttctttttaacgtgccataaaatatataagatggcatggtcatgataaatatacttatatattgagtatttataaaatatttaatctaattaaattcgtacgatttaattaaattcaatttataaagtgtggatattcacatttgtgcagattaaattcaatcgaaaaattcaaaatttacacgtgcgaattaaatattaattaatatatatctaaaagtaaccaattaaattcaattcacacatacttatatatattttttaaaaagttatatatacaattaatattttaatgcaaaaaaaaaaaaaaaaagttaaaaatctaatacatatgata

SEQ ID NO: 36241 - DNA, 4120 bp, Cannabis sativa
  modified_base (700)..(707): a, c, t, g, unknown or other
agatatgttacgtgcctgtgtgttggattttgaaggctcttagagcaagtacctgccactgagaaagttttcatacaacaacagttatcagaatactatagggatggcttcctacgagatactgtatggtaggaagtgcagatctccaattcactgggatgaaattggagaaaaaaaaatacctaggtctagaatcagtgcaaccgactaatttaggtatagaaaagatcaaggccagaatgctttccttttaaagtaggtaaaagagctatgtagatttgaagcgtagaaatgtagaatttctggtaggagatcatgtattcctatgggtgtctccgatgaaggggatcagacgttttgggaaaaagggaaaattttaccctaagattatagggcctttcgagattctcgagaaggttagactggtggcatatcgtctggccttacctccagcacttttagcagtccacaatgtgttatatgcttctatgttacggaagtatgttttctgatcctactcatatgctgagttatgagaacctagagcttcaaccagatatatcgtacgaagaacaaccagttcagatcttagacataaaagataaagtccttcagaacaagaccatagctttggtcaaggtactctggagaaacagtaaggtggaggaagccaccttggagttgttcaggttagatttcnnnnnnnnaatccttttaacggggggataattataaagaccgcttaattttaatatagaattagtagatagttagggcttaattatgaaattagatttctaaatatgatttatgaatttatggagatttatttgaattcggggtgtattatttatgctatatataaaattttatgttttatgcccagcaacattggaatgcagtgtttggccaatagaatcacattttagtattttagtagtagccgggaaacttagataggcattgagaatgtcgagaatagttgacgttttagaaatgaccaaaatacccctaagtagtaagattaccttttggcttaggcaagggcaagatgatcttttaccatttttatacttttgtcttgtagtggtgtgttttttgttgaataatcagattataggaagcatatatgttagataagtattagatttattagttttatttagttagaaaattagataagtttatttttctctctctcttttcaactcacactctctctctttcgaaccctcaagaggcagcaagggaatctagttttttagcttcaattcagagaattctaacaaggatttagtgtttcaattcaaggtataaccccttagcacccttctctttaattttcctaagttctaagctagcttttgtgcttgattttggagttagggttgttatagttgtgttttgcttttgtttgagtattttgaggttatattggtgtttgttgagctgttttggtgttgtttggtggcttgagattgtgtttgagcaaggtttaagtttaagaactcaagctttgctctctaatggtggatttcgattctaggtgtattggttggttttgttgcttggattacgtttgttgtaacctaaataggtgttgtagaagttattgtgaagtttaggatcaaattgtggtgttttaaaggttttgggtgtttcctgtactaaaccggtcgaccggttcagtgggacctgtaggaacctgaattctagttggtccccaagaaccccacagaatcggtcttccagttagggaaccaatctgccagttgggacagttttgggaaccctagtttttctcattttttgcaatgtttagggtattgccatgttattcatcgatagggaaacttttagtttcgattttaagtccccaaaaagtgatttagcatgtcactaatcagttttttgaataatgtgatttagcggcttgtaaatcgttgagtagctgttacactcaggttggccggtacacctgaattcaaaaatgaggtaagattagtaaatgatatgcatatgtgattacatgtttagagtacatgtttattaagcttgttagattacatcgatagcagaatcagtatacgtagagttatattggataccgatagatgtatgtttggctcagatactgatcgatggtatcacatcggtacggctagagtatgactagcgtaccgagtataggctgatattatcgtcgatagtactgtcatatgaacgttctagactcagtaccatattggacacggggataggattatggttggatgtatgggcacctgattataatccgagttatagttatgttattgtttatgcttttattactgaatctgtcgactcacagatattatttgcatgtgtaggtaagggcaaggctaaggttgagcagctatgagagcgagcggatgaagattttacatgtcggagcaattaagcctagagcatacgatctttggaatagctagacatattttgtatagtcgctaggtgacaacttttatatctagtacttgaaacggttgtaaatattttatacacgggatctcagttatatatatattatttggtatttgtaagtattaaataaagttttaattaatcacgttttttaataaactcgtgttgattagtaatgagctggacaattaagttaaatcacgataacacgcctaaactagtagggtgttacacaaacacccattctggagttcccaaagtaaacttgggtgcatagctagggacccctcccaggtcgacttggcatgaaggaggactactcaattccaagatattttctttcttgccatgtgtcgaacattgatgtccacatcattagagctacttttggtgtaaacagttgtggactaaaaaaggaagaaatcaattttataaaatataaacatttaaaatcatacaatctaaaattaaaatagtactgaaaataaaaataaaaagattataaatttaaaaataataaatcacaaacctattaaatagggggcacattggtggtgatggttttcaaatctcgtgtaatggtttgttgttctaaggaggcattacggtggtggacaaaggtgggttggcgaactaaaaggctaaagaggaaaaaacaggtggaggagggatgaaggcagagaaaaaattggaggagaaaaagagaaatgggtgttatcagagcaatttatttgtatttatataaatctattatcagtgggaccccgctagtattagtgggtcctgtcagtaataagtaaacggtcataaaaaaattcgtattagcaacggactccactggtaatagtctatcgctaatagttacatgctaatagtatttgaattaaatgaacgatatttttcctgcacaatctgaaccatgctaatagcaacggaggggtctgctggtataaattaattttcaccgctattgtatttaataattattataaatttttgattttaatgataatggtaaatggtagattaattaataggaatatttgcggtatatatattattttatgtttttaattttatatatttatatactacatttttttttacggattaaatagcatatgttgtatttttgttgtagactagaaatttttttttttttttgagacaaagaaggctgcagaggaggaaggaacaagaacaacaagcagccaaagaggaagaagaggtacttcctctagctaacttctcttgacctgagagcttctcttgcaagattatgagcgtccatattaaattgtcgaggaaggaactgcaacgaagcaccagggaaatttgagaagagcaatcgaatccgagacactaaaccagaaagtgcagaattgtcctgccaggctccatttacttttgagactaaattcaaacaatcggagaaaactacttgtggagaaaattgtgagtcaatgcaccacttgagactctgcaaaagagcttggccttcagagaaaataggagagacagcaccaggcaggcgatggtaatgagaagctaacacagtctgaaatccacacttgaagacaaaaccagttccagttaggccattctgatggtctacagctgcatctacaaaaagagcaggtgtatcaggtgacaa

SEQ ID NO: 36242 - DNA, 9912 bp, Cannabis sativa
caaattcggtgatgacgtggaaccgaaaattcggttacggtctagtcggtttcgatttttcagtttttatgaacacccctattcaagacaataacattttagttcaggacattatccattcgtttaaaatgaagaaagggaatgaagaccttattgcgattacaattaatctcgtaaaggcctacgtcaaattgagttgccaatttattgatcatgtgctctgaagctttaaggctccagatattttttacaactaggtctatcattgtatatcaatgactttcctcaacatttgtctcaatggatgtacactgggtaacgtttctcctgagtgtggcaatggacaaggggaccctctctctttttatctcttcatctaggcaacagacattttctctctttcggaggatgctttagataaaggagggatttagggaatcaagctgagtaagaatgggtcttgactttttcatcttttccttacaaatgatcttatcattgtgggtagagcgaatactgctgaagcaaaaggatatcgggagtgtcttgagaaatttttcacttagtaaggccaacgtataaaaaaacttaagatttccttctttttatcaataacactagtgaaggaatgaagagaggtattaaagaagttatgggtattgatggaattattagaaatattaattacttggggttcttgcgctcttcagattttaacaaaaagatgttgattttaacttttgtttggataaccttgtgtccaaactttgaggttggaaagtgaaaattctttctaaagaagtgaagtttaagaagttttatcgtcaaaaaattaatttttggggttaagtgtgacaaatcgtataattcaagtagttttactgtcaatatcatttgctagtacaacttttgaaaaacaaacaaaagagagtaagtttaatatatatatatatatattatctcctctcttcaccgatattaccacttgggtactatcattatctttggaattcataactctgaacttcaatgattactgttgtgttattctaattataatttattactattaaacaaaaatatttacctaaataaaaaagattggattacatttttttcaaaagtaatatttttaatatttaatatatatttatatatttttttgctaagaattatctaatacaattttgagatggggaaattacgcaccaataaaaaggaaaaaaatcctttaaaaaatttaatatggtaaaaaaagttattttgggtattcttttgataatttggttaatatgtgggtaagcataactaattgtgtgtctaaaatttttattaggacatatttcttaatacaatatattttaaaatataaattatcatctaaaaggaccttagaagctctttggttgtggaccatgtgtgggcctcaactaaccatgtgtggacctcagccagtgtcttcaagaaagtgggtgcaagtgcaacgcaacttgatctctgaaagtagaattgagaatagttcaataagattgatactagtattaaacagtttcaaaattttcaaagtctgtttacgggatctcgtgtttgggcccaacaatcttaggtgagggtagctcttagtgaagttcttaagcaaaaagctttatattagtaataaaagtctcgtgtttcttagatcaaagagggagataaatgctaaaaattcttctttatgtcgactaccattagaaaatgtagaaatgctatcgtgagtatcataaataagaatggtaatttggttacgaccagatgtgagattggaaagaatttatgaattttgttggtggtattttctcaaattcaacccatggccctttggaaagtttggacaacctcatcaatgatcacatctccgcccttgaacaattcgaaatagtgggtatctcgtgtcatgtagagatcagaaaaatgctttttactatgggcagcttgaaaacattgagaccagaaaaaatgtcaattctctttgttaaacactattagaatacagttggttttgatttctgtgaagttatggtggatttcttctagttgggacgatgtataagggtatcaatgcaactaatattgttctcgttttgaaggtacccaatccaaagaaggtctcacaattcagacctatttctctctataatgtggtttataaggttatctcaaaattattgtaaatagaattagactaatcctccccaaactaatctgccccactcgagcggctttcgttcctggtagaaatattcaaaacaataacgctttagtttaggaaattatccactcgttttaactgaagaaaaggaatgaaggcctttttgcgattaaaattgatctcgtaaaggcctacgataaatttagttgacaatttatttatcatgtgctctaaagctttaaggctccatatattttttttttcaactaggtctatcagtgtatatcaatgactttcctcaatatttatctagatggaggtatagtgggtaacatttctcctaagtgtggcattagataagaggatcctctttctccttatctctcatattttcgaggatgctttagataaagaatggattgagggaatcaagctgagtaagaataagcctcaaatttcccattttttctttgcaaatgatcttattcttgtgggtagaacgaatattgttgaagcaaaaggataatgggagtgccttgagaaattttgcacctagtcaggccaacactaatgaaggaatgaagagatgtattaaagaggttctaaggattgatggaattatttggattattaactatttggagctccagctcttcaaatctcaacaaaaggatgttaattttaactttgttttgaataaccttgtgtccaaacactaaggttggaaagtgaaaaccttttctaaagcaagcttgactattatgatcgaatcagttgggctttctctcctagtgtacaccatgcaaacgaagaaactctccaagagacttgcttctaatgttgatggcatacttagagacttttggtgggactgcgagaaggggaactggggcctctacttgaaagagtggaacagattgtgtctccccaaatcctgtggtggcttgggatttttgaacaatggatatgaaccaggctttcttggaaaaatgggaatggattgtgatcaatgagaatcaatcattttgttgtaaggtccttaaagccaaatacctaaaaggtaaacatttcatgaatttctcttacgagagttctgattcttgtttttggaaaaatgtagtaaaaggccaaaacaatttgaaagaaaggtgcttgtaagatgatcactgatgtgaaagatacgaatatttggggagatccgtaggtattccacaacaaatagtttcgtacaaatttcgtggccagtcaacccaatggacttgaatgggttgctgatctgatattagacaatggagattgggatctcattaaactctactccctctttgactctgagacagtttataatatgttgaatgggagtaagactattggccaagaaatagattgatggatttggactaatgagcctaatggcaccttctctagcaagtcatcttacttggtccaagctttagaccgtgctctttcttgtgatggtgcccccttcctgtggaacaaactgtggaatagcaaagtgttggagtgtcataaggttttttggtagaacattttctcgaatgcatattgaagacaccttatgccctttgtgtggggcgggtgaagagactatggaaaacctattcctccattgtaacttagctttctatttgtggagacctttcccttagggcattatactggttattgattcatatgctcgtgtttgggatttaatttaatttctttggggcctgaattcgtggggtgtcaatgtagatgagttgttcctctatgcttcgattatggtggatacgatatggctgaccagtatatgataaggtacataataattatttgagtagcatcaaacagtaaaattgaatatatcactcattgttatgcagattataactcatgtttgtttccatatccttcaactgttggatctctcctttggtctccatcctaagaagattggatcaagactaattgtgatgttaaagtggggattggggcaatgtgtgtggcagtgttggctagaaatcacttgagaacggtgttgtgggttactatcaacatgttacttcactgatccccttattggcaaagttgcaacttgttttctaaccctagagacgacaatttttttgaagcaccattttgtgatgatataaagagattctaatacagttattaaatccccgaaggagacccattttgcttggagtattgataactacatacatcaatgtattagactctttattttatttttcaattgtaatttttcttttatttttaaattttataattttgcggtttattgtgtggctaattgagtttttgctcaaaatttaacttgtatatataattctagcaaatatcatctcttataactataagatctaagtctatctttatatataaaagggttaatttaaaaaaaattaaaaaagagttatatgacacatattttgtcgttatcctactatgtacgtcgtttttgttgtgtaagtttcccattagatcatttgtacatattgcaatgtcgttattataaatggtattgattctctctctctactcaacactcaacactcaagagtggtccttacaaaatttggtttctttcaaacttttcacatacattaataagtaaaatatcttaaacctatagttagaagccaactaataattaaactaccaaactaaatatataatataaataaacttaatcctcctcacctgtactgttgataattgttcatatagtactaatgttctcacccaatatttggtctctcacctaaaattttacaaaccaatcaaacacaataatatagtagtttcattactttattttcaaacaaatacaatatattaataacacttggacaaaagagattatttggtgaatttgtgctaacattgccaaaatacatgtgatttacattaatgtggctcagttttaacctatctttgattggaaatctattatgaccaattcccaacattaaaatataaaaatatcttgattataagatccattactattataattcacaatatccatggttcttttcatgtgggtttggaacctaataagtcaataaaattgattatttttattcttttctttatttcttggtttaggccacgactaattaggttagagtgacaaactttgtggttgaccacttattttgaatgccctgttttttcacaggcttttgtttgttgagtattttaaggtaattattattataattatgaatatatatagattggatgtggctaaaatatacacagcaatatgtataggcctcaccaactagctaaggcaactagttaattatttgtatggttgctgagccaaagtccaacataataatttaacaccttatattaaaaaaaatttaaccaaatatatatatatatatacatccctttttcaaatattgaagacgtggccattttttgtatccatgattgtaaggctattattcatttcataaaagagtagagctgcccaaattaaagacacccctccaccaagcagtagtagtatgtatgtatgtgataagatctcaatggaccaccaatgcttcattatttattttaataaccaattaagtatataataactataaggtttattaatatatataagtaatccaagtgtttttttaactatggttatatagttataacttatacatacatggttcttggagtttcatatcaatatgtatataagatgaaaatagatacaatgacacttataactataaatggcaaattaagacaaacataatttttggtacagtacgaaaatgtacacacacatatatatatatgtatatgtatatgtacgtatatgatcatcaaataaagaccatccctttctctcttatctgcttggagatgaggtgaatctatcattgtgctttattggcccttcacttagattatctgaggataacaatattcaacttctacacctttctttttcattttgtattgtttatatatgtgtatatatatagatagaaaaaaaaaaacataaaataaaaaacccatctcaaatatttcccccctggtgtgactaccttattcaatattattatatatatattcctctcatctttgcactttttgggctaaaattttgtttgttttctctcaaaatcattattagtattttgttttgtcttctgttaattgtactctactggaagaaaaagaaaaaaatgtaccacaaaaatattggtcacccttgtttgcattgccatccccaaagctatattagaatggtatttctttttatctctatatttatattataatatctaaatttgtacatatatatatatacataagttaattaatttatagctatataataatgttatgttattacaggttcaacatcttattgagagatgtatgctgcttcatatgactcgtgaccaatgcataagagctttagctcaccatgcaagcattggacctcttgttacacttactggtatgaatacatatatataatatataaatatatgtatatgtatatgaatcatcatcaccattaatttctcatttcatgtctttaattataaatttgttctctggtaattgggatttaattatatgtgatcagtttggagagaacttcaaaaggagaatagggagttcttccatgcatattaccattctatttctcccaaacccttgacaagtaagacctcagtatatatgtatatatatgtgtgtaatgtattatctcatatagttataattatgaggagttcatcatgatcatgaatattattacctcacttgaaaaaaaagacttgtaatcattggttggtttgcatgatcatttatacattaatcatttcattttttttatgagttggcatttttttaaaatatattttcaggtagatatatcaaaagggcaccaagattcgcaaaattgaaaaagtagtaccagtggatgtgatcaagtatagctactagaatatttgaaccccttttatgaggcaaaatttatatatattaatttatatataaatagagagagattaactatagatagctgctacaaattgtatttaaaaattatgtagtttcttttcttaatgatatgataatcttttaatgaaaaatgaatattgtttattgatatgccaagtctaatcttgatagtattttttatgatgatgaacacaagaaaaagttttttgtttaacaaattgatgaaaacctctcaaaactgttgaatcatcacatttttgaaagctagtttacttctttcaatgactgacacattgacactttaactaaaaattaactccattcctaattaagtgcatctacattactcatcattatgattaacccaattttaattattggctccctctaaatagaaagtcttgcttgtaatggaaaattagatcaaatcaaccccttcaacaatggttgtatttttcttttcatatttgtatgtagagatatctttgatgccctttttttgaaagaaaactttgccatcttcatcaacctgaaaattatcacaccacaaagccatgcacccatttcagtgccatatattactacaagaagatgtagtgcacatcactaattaaacacacccttttaagttgtgaatttataatatataatgaggtagttaaaaagcaataaatacatggtcaaaatatttggagggcaatttatttaaattactgtcccttattaattttcaatgagaaatgttactacaaaaatttactaaaagtaaattttttggtgcatatttgttattctattattatgttaaagtagtgaatctaatttttacaatgctaagtgattcgggaacgaaattaatgaagtaataataattcagggacgaaaatcctagtactataataatagtctttgttaccttattattgacatcatgagaatcccatgttgaattattctcctcctctttctgattacagctctctccatcttctatgtactgagttggaggaaaatgagcccactaaatacatgaaaaaaatacacaagtcaagtagatatctttctatagattattaagatatgtttctttttattttggttcaaaaaacttacatttttagcagctgcactaaacgcttccttatgagccatatttggattttcagctttgagccttttaatctcttctctgctttacaattaagatcatataatcaaagttccaagttttgagatttgttgtttttttaagccttaaaacttattatattaattacctgataaagctgttgtatgctgagggagctctttgtcttttttcaggagctatacatatatatatatatacatacaaaaaacaatgttaaagttttcactttcaaatttgtgacaatcttaaattgaaaatattgttgtacataatgggcttattacgtttgttaacaatttgattcacagagacactatctccttcttcattgtcagaagaaaccacagggctgcacgtgtcaatggcattttgtgcctctatttcttctaaatctacctcttctttttgctacaaatacacaaaaagtcacacaaaacaaaaatatatggtacaagtgagagtgagtagttaatataggttggtactagagctagaaagaaagatcataatagaaaaagacaagtactaaagtattgacctcatgatgagtttggcttagtgaagctaagagttgaagtggaacaaatgaggctttcatcatattgactgagagaagagttgtgcaatgcccacatcttactgtcaccaccattgataagctactacatggaacactaacctatatatatatatatataagacattagattagtaagaaaaaaaccccccaaaagaaacaaaatgtaatagtagttgtaccagtagaatagtggtgcagaaaccacattgtacataacaaatctgttcagagagattgaaaagttggtttaaggttgacatgttgaatggggattttgtttttgtgattaggcttgtgttgtagaaggaagaaaggtttgaataagtctttaaagggaagatggtatttataaatattgagagttgaaaccaatcttattaaatggaaatcgaatttctgataaagtaaaattatgaaacaacactcacaacaattttttagtctaaacttctacttttgaggttaggctgccttctatgtcagtaagtaaaacaatcaaatggtgcttgtttgcttcatatgtaattgtctctctttaattgactctctctcatatttttgagccctttttttatgttgcatgaaagtgaaagtgcagaaattttgtcatttggggattgagggcatgattctagaagggtgcatgaaaagggtaaagaggcatcttagaatttgtttttcttgaaacagagtttgtaaaattgacatcatagtgattcacctcatttttctgagctatctttgtttagtaaaacttcctcctattacctttcattttaactcactctcatttcatccatgtgctttcaggtcagttcaaggccaagctgtctctctcttataatatagctcaggctcaaggtccccccacttagacatatgtatcaaaaatggaagtaaagctttgtaatcagtataatcactaaggacagttttaactaatataatttgacccattaagatcttcattct

SEQ ID NO: 36243 - DNA, 3414 bp, Cannabis sativa
tattcagaccttctctctcctctcgcccttcttactctcgcatggtttatgctctagactcgacgtcggtcttcccattaccaaacggcgacatgtgcattacgaaaaagaacgaccaccctctgaaacctccactcgtacaagccttgcttgactcgagtcgccaacaaggagaacgattcagtcaaagccgcgtctcaaaaccttcaattgatttccagacgagatttcgttaccgctttggacagtgaaagatatggttaaacttgggaggtataagagaacaaaacccctcaatggatcgggcttgaagatcatcggaatcgcgtgttgaagtttgccggaatccatggagtttcgagaagcagtgctgttcatcaatcccacattttctcacttgatggagatagttttaaaagcatggtttgccattagcaggagaattttacttgctaaattgaaaatcaaagcaccatataatggaaaattgaagaaacttaaacttattgaaaattacttttaataacccccgccctttttttatgttatgtgaattctttaaaaaaaaaatgcattgtaatttcctgtcaattggttagtttatacaacacaaataacagattgaggaaaagagaaaatgagtgtgtattgataatttgatacccaggaatttgagagcttggttctctcccacttgggactaattactccataccttacaaagatctcactgctgcattttattctaacctcctagagtattgtgctccacagtcacactgtaaacaagctcccctagcctactcaaacccaactcacataatttttccttagctagccgattactcccctattgcacctttaccatttcctttcttggaccttcaagcataaacataagtgaaagaggatctatcacatttttgaatggtctaactatgaaaagtatttattcttgcatatatttgaaaatgtaggcccttttggtaggtaagttccgacacacatgaaaggcataacaatttgggcactaattccgagggaggcttgttgaaatggacaaaactgtgaagatttgttaatgatttttgcaagagacacgtatgtgtacttgtagatagaaccaaaatctgaaaacggccactgagccttctccattgaaataccatccaagaaaatacaagaaataaaagatggggacattcaagaatctcttaggcttcccaatgtttacaaaataatccacatcctatgcactcctctcctttttatttattcattcttattgtacccatcctcattctcttgactaacaaattaccttgccatttgtccgctaacataaacattacagccagctgtcccttaacctgtgtcctaacatttttgtactacatgcaagctctgtatgtgacatacaaactatgaagtgactgtgtttcttctgttcctcttcttttgcacttgggataagtatattgacgcttgaagatatgtttatttttgcagcccaacatttgaagtttcactgctctttgcagaaatggttcagcatggacttcgttgcatcacattctgcaaaacacgtaaacaatgtgaacttgtcttagagtgcacgtaagaactgtataaattttatgagtttgatgcttgttgacattatctatgggccttttgggttgtgccttctttttttttttcctcagtatttattgtgagttttgagtgttaggatatgtaaacaatgaaataaaatttccacggtttttataggcgtgatattcttcggaagtctaaagtgacaagccatctggttgattctatatgtgcatatcgtgctggctacattgctcaggtcagtgaatgtactcgaggcatgttacatttgtataatggcgttagcacaatatatggggcctaaggagctcatctactgtgtttactcccaagtgcatatcctttttcttgcttagaattctaaattgtgcatcacccaacgacactaaattgtgttgaaaatggtgaatggaattgtgtatttcattcatgtaaataacatatatttatacaatttatatatatattttttatgtatatttatacaatattagagaaactaaattaggaaagtaggagagaaaataagaaatgaaataagaacaattgaccctgttttctagttaatttacagctaatattctaactgttcaaaagttgctcatcattactgaacactagctttgaagttatttttgcaagaacatcttgtattttacccagaaagtaaaatttaataaaatatttagttgtaaatcttaaattcagcattgcaggaatttagtgttgctggaaaataaagttgtagaaagacttgaaaaatcaataaacagaattaatttagagcaagtggagggatgggtttgaaagtgcatttcctaaatgcaagtgacacattaaaatgtaagaaataaaagtttgtattaatatgtgcctctcttcatagattgaaagttaccacaagagataaaaggtggagtcattcaaaacttgtgaaagcatacttggtttgggaagttcggtcattttctcctaggaatgtttagaaattttgttagaatcacattaaagacttgagattgagtactctatttactagtaggtatcagatgatggatataaaatttggttagacttaatcgatttgcgtaaattttgagaaattttatgagacaagacttaaacagaaagtgtgactgcttgtggaatattctgtgcatatttgtatactttgcatttgagagaacaagatgagaaataagatgacaggtgggaggtggaatttggtttttttcaaatgaactaaagttcgtttgttaaatgcatgctcacatacagagtatttttctttaattcctaaggagggggattttcaaatatctagcattctaaaaatgacaggtggcaacattttttgctacctattctgtactagcttagtgatttgtactaaacttctgtttcatttcagcatacattcaaccaatactactttacacatacagttggtacgtttgaggggtatgcctcgaggcgcgtcgcggaacgaggcgttcaaaaaacgcctctaaggcttggcctcagtcactgtccatgaggcttacgcctcggccttgtgaggcgtacgccttgggtcttaagcctctgaggcgtgtgaggcttacgcctcagctaattgagttgttttgggccttttttaaatagtttcattgggcttttcttgaagagtttcagtgtgccttttttaaagagtttagtgagcttttttaaaacttttcttgggctattttgagtttcattttgtaaattttgaaagcgcaaaactaaataaaaaaccctaaacattcatcactttcc

SEQ ID NO: 36244 - DNA, 4647 bp, Cannabis sativa
tttgctccaacataactgcattcactatcactagcttaccttgtttgtattcaataactataattggaatccagttcttaaataatttaaatttattaatcaaatgtcaaatatatattatttttatgtatgtgtagagagagagagagagaattaaagaccctatagtactgcaatagcacagagaaatgccttaccaacatattatctatcttatcgagaagattaacaatctgctgaacctcctcggcagccttgagaccaggatccttcaaagcagcagcttcaaagccagtgagggccctctcatagttctccagatatttgtgtacctgttagagactcaaaatgattattgaacaaaaaaaaaatggcaattaagcaataatttgcaattttcacctcaagaatgaagtactttaaccataaatgtgctcttttcttttgtaagaaaaacattaatcaaaagagagaaaaaaaggtaatcaacacaagccattacacatgttaagttagtagaaaaccacttcacaaaacttgaaagcactatctttaatttaatctcaaatgaaaagcatgatagctgtgaaatttacattctcatatgagttaatactaaaatgagaactcagagtttatgatcacggaaacaaagaatattaaagaaagattttcttgacagatattcctcaaaatgataaacacctcataagagattagaagagctacaacccaggtagacaagagaccaaatttacattgttgcttgacttctctagcctatgctctaactctcactctcacaacactaaacggtccacaaatttcctcatttagaaaggatcgtagcacatttgagtctttcatggcggtcttaatattttcattactaattgcattaaattgtatccttcttatggtgaaaattaaaaatgcactatcttcataatttcctgcttaacaagcaataaggaaaatatatgaacttacagtggcacagttaaaatataagtctggattggactccattctttcatccttctcctgcatgaatcatcatgacaaaacaagtcttacagaaatgaaaaatcaagaagctcaaatgcagtaccaaaataccacaaggaatccatatgcagtaacaaaatggaatcccaggaacagttcttactctgcacacttacagcattttggtatgcctttaaagactgccgaagtttgctgtaatcccaagcaccagtcatgacaaaactagtaaaatatgcatttccaagattatctgtaaatgtgcttgttatattagatatagcagaacgaatagatatgtaagcataataacaattttagaagtgacattttattgattaaataataaattcttacaccaagaatttccatccttaacatctaaagatatagcagccttggcatgttgaatgctttcctctacaagttcttcctgattctcactacctagaaaagttcaagtaaagttgcatggtttcatgaaagcaaaggtatatgccaaatagaattatcacattgcatggaaaaacagacactcccatagaatcttataactatgaacgagaaaaaaaaaaagagtaataattgtgtccacaaagacatcatcctccaatgcaagaaaagattaaaccaacgaagaggatttgaaagtgatagaatgaaagttagtaaagttaaacgaatgtagagaaaggcaaggcacatcatcattacttcttctcccatttgttagacccttaatctgattcacctatgctaggaggggaaaagggcaagttgtggcttgagggtagtttggacagggttgttgagaatcctggtgagtatatttgtaatttcagagttagttagacaacaagaatataagttggtcggggaatgagaatgaggtatgcagaaattcagtgttgagtatttgcatcgggagagtataggtctcctgaatacctacaagcttcggtactgtgaagttctttccattaatatcttcaggtttttctgtcctatggtgctacagctccattgtgcagggtacatcacctctttttagtgcattgtttgcctatcattgacaactaatatttactgtaatagttctagtttctcaaatatcaagcatataagatgagaaactaatgagtcaaagctttggtataggaatagactaaacaatatcccttcacaatggataagcaattacctgattagtaatgagtatagcacgaaaaacgaatacaaaactaccacaacttaccttgagccatttttctatcaagcatcgacaattgacaaaggatctttttgttaggaccctgcatgagacacaaagcaagtatcaatcatttaggcacattcccagtaggtctcatagtatgaagagatgaagacaattgtcttcctagtaagaagagacaactacaatagtcttacaaacaatgaccttgctcaatgcaagagtaaaacaattctttgctgcagataaatctcccttcttccaaatacaattacctaaacacagccaagcatctgcaagcgatggattcaacttaacctgaaaaaggtaagaaataaattcataaaattgagactcagcaaaactactcaaatacgacaagtgatggagctaaagtttgttcttgcttacagcttttgagagatggtcctctgcttctttactatagtcagaaaatacatctagtatctttcccttcaaatactcatatgttgctcgttgactaggaagttttctttcttctataagtggtacataatatttgacaagaagaaaataataataataaaaaaaaaaaagcaaataaataaatggtacccaaaaaataaagaaattggcaataaataaaaacaaattttatggaaatatccttcatctcatattatgaatagaatgtgcacatcttcaaattttacagtactcaaactcagcaagaataacagcccaccacaagtaaaataaatacgtacatacatcccccgtgaacaaactagcattaaagtgagactcgctaacttttgcttcacatatccatcatgaacacactaaacatttctcaaccaagtgatgaaatgttatttgttttcaagagacccacgaacagtttccttgaaacataccatcaaattaaacagtccaattcaaaaacttcaattgggtttcatgttattcgacttgaaatgagctttcgaacagcaacaactataagttggcaataaaggtgagtgtggcccagttttcagtaaagtacaaattcatgaatgttgaatcatttttacaaaatcactatccaaaataggtaagctggttctttatttcaaaaccccagaaagtatttgcagcaaattggtgaataagaacgatgacaaccaacaactgttataagcaaacaaaccacaaaatagacaaaacccagcaatcaaaatgaaaaaataaataagtaaaacgagattaggttttagtgaaataaattaccagaagggatagaatcgagaaggttgagagcgagatcggagtgaagctgaagcttagagattttgtcatctggatttgggggaaagtacgtatctcggagatggtagagatcatcggctgctgtggtggctttggccagtggatcttctctcttcggttcgccgctcatggctctacacttccaagtttcggacacacaccaccacgagtgaagtggggagcagtaatgtaacgcaatggaccaatagctatgttagagttagactagtgtctcttgtcactttctcaactcctcgagggcattcaaggattagtttggtcccttttttcatatactaggcgtatgtcacatccaaatgtatgtgtgaatattaatatgaagttttatatgtagttatttatatttatatatttttaatgatcaattaattattttatttatatatttaaaaaaattgtaaaattaaatattaaaattattttttaaatcaaacatattaaatgagaaaagatgttttatattagtttaagcaaacaaaaattttcaaaaaaaaaaaatcaaaactaataagacatttttaaaaaaaattttgattagtttaagagtacttataaaaattaaaaaatttacagcataaatacttgatttattgagtttggtgctaataaatactcaaatttaaaaaataccacaaaaatacttgaaagttcattttctacttttccgtcaatactcattttgagtgctccgttaattcttttcaagagtgtcacatgttgatagtttattggtctacctaatcattttgattaaaaataatttaagtaaatttaatttattaaaaaaaaaaacctaaaacacattgtatttatttcatttttcattatcgcatctgtgcgtctaaaagacttttcaaacacactaaatcttatttagtcgaatttttttttattattaatcaactatttgattcttttttttttttcatcatgagttctatgtaccaccgttctttatgaggaaaaaaaaagcttaaaattccaaaatgactcaatctatcttgaagaacattaataacactaaaaaaatccatattccatatcatattcaaatatggaaaaaaaaaaaaaaa

SEQ ID NO: 36245 - DNA, 7010 bp, Cannabis sativa
  modified_base (1230)..(1239): a, c, t, g, unknown or other
tgataactaatcagattgtaaaaagttttatttagggcataaaacacagcagaaacaatataaaattataaataaattaaattataaggtaaatattaaaagatttaaaattttatagttggtttaaattataatttaagtggatctgatttgtgacggcccatacagtaagtagtctttaggttttgagcccattacacaatgaaacctctataaatagaagtgttttgtgcttagcctcccaatccaattttatgaaccactttgtttaccaagaagataaaattgaaaggtaagtttatatatgaagatcattctatgttgttatggttgtccataattttgtatgaaaaaatatgcacaatgaaatcttatatgattcattggtatgacctacatcatgtttttgcacatatatagatgaagatcaacataaaatcataatttttccttagtacaagggcttggatactgtttaggtgaaaattcaagatccaaaagatccaattatcaagatgatttgggttgttcatatcatacatattcaatttcttgctggtttgacatgcctaatcgatttacattagggcttggtaagagaagtccaatttttgtcacaatatcacaaaactattttagtgtatttgttttcacccattaatctttatatataaagaggttacaataattgagtgtattatattaatttgtatataaacaaatgatttttggatatagatttgtaaatctatatataatttgatagagaaatgcatatttcaccaaaatgggtataaatcgggaatagactctcttttcatcgagtcttttcttttctatacaataatttctgggttttccctcttcatattctttacccaaacttattttattcacaaaattcagacaaaaaccctcaaaaccctaaactctttctctctctctctcccagcaacagctccagctggttcctccggccaacccacctgcccggtttcatatctatcaggtaccttgcgttacttctttttctttttttcttacttgctgtatatgttttgattcgaaatttagaaatgtagcactgagcttggatttttgtgattgaacaagaaatcactatataaattgttttgctagagtttgtttcccgaaggaataaaaaggttatgtttatttgttattaaatcgaaaacttttagctgttgataaatatttatatatatatannnnnnnnnntatatttatatatatatatgtttgcttgcaagatcattgtcccatgaaatcaaatcctttaaggaataagccttataaaccatagttgagactaggctccccacataaccaacaataacttgagactagaaactataacaattgttatatacctactcagtagggacttggaagtggaaactataacaattgttatatagatacccaaacaattgttatgtagcaacccaattgggaaactaagcaatggttacatagggatccaggaggaacttgaaccttagacatgtggtagtaaaccatatggcccaatatttgagcttataataccacaattctgaaggatttggagaaatttataagcgtttataaatccttggtaggtttagaataacttataaaagatgattaaaattagatgattatattttgcgtttcggttgttttggatgtagtctcctattgagacctgtctccttgcatgatgcacacaatatgtagcatcgtttatgtaatattgcaccaataatgttgtatattggcgcaatattgcatgaagagtgcgaagagaccagtcccaaaaggtgactacatcctatccttgttatgcatttatagagtagagtatattgggaaatggttactttagctatcaaattaagttatcttgtataattgaattttgttccattgagatttctcttttcacaactttttatcttttcccataattttctgttgcacataaatatattgcttatgtggttgagacctttttttccttccttgtctcatttgatcttagtggacaatatattcttggaaaattctctaggagtcctctacaaagaagaccactttgttttcggcacatggagaagctataaccctaatttgtttataagcggtgtgcattacagtcgtagcagacccccaccaattttggcaaataccaaaatcatcgttcaaagagattttttcacacattttaataaaattatgaataattcaaagccaattttgactttgtgtccgaaatttggtgtgagtcttactataacaaccatataaccatattaaaaaaggttagaattataacattttatttgccaaaaacatttcatgggaaccactaaagaactgccctatattcttatggacctatctccacccaccaatgtaagccttaagaaacaaatatctttaaaatatatgttctttctagtttaaatatgtggttcaagggtttcaaatttttagcagacaagatggaaataaagtttcagtctttggggttaaaattaaattagcattataatattctgggaaatttgactttgaaatacttcataacaagattcaatgtcatatttcatctgtttcttgattgagtacttaattaattactaaaatcactatgatgctttttcttttgggttaattgttaatttaccaaattagttgtagtttcctgtatagtttgtggcagtttagcttgtaattttgtaagtagcatatgggtgaaaaacatactgctgttatcattccgaagctcaacttttttattgtaccacctggagtgtagttgatttgttattttgtgattagcaaattgttattttctaattttatgaactaagtcatcacaaggcattaaaaatgacaatacacttgatttataaaatttaattaagattaatatatacatcaggattaggaagtgaaatctggattttttctcatgtattttcatcttctcagtattatgtggagacaaggagagtttggattttacatttttttttttggtatttaagtgtgattgatcgaaattggagaagcctatttctcttttgaatgagtttgcgggttgcctatgagcagtgattttgctagtgtgtgcctttatctctgattggtttatggcacctattatcatataaattaaatgagtggagcatgcatttcatatgactgtaaaagcataaagtatttttgaaatggttttattatgcttcgcttaaatgtttgcattttgaagctatttatattcatacaagtgatgttgagccgcaacatggttttatgcttgtgttttttgaagctttagggtactccataagcagttaatattcttggtatggcattggctacactatactagacctcacctttttgtcaaccaatcaaccaattgatggaggtagaagcttacaaagaaaatgaagaaagcatgccaggcactgaagaggattcacaagttttaaagccggtatgccaggattcagctggtgagggtctgccctatggtcctgcgaattggccgaagcctggagataattggggttggcgggtgggaaagagaattgctcgaagtgggttctttctcgataggtatctgtatcttcccaagcgtctttgcaaaagtgaggcgtccggtcgtaagttcggttttgctagcaagctttcagttgaacgctatattcgagaaaaatttcctggggtagatcttgatgctttttttgcatcattcagttggaaaatcccttcacaatcatcatcattgacaaatggtcagctttaattccgttcttgctggtttctacagatttattgacttctgcattgttttatgtctctgaaatatgatgcagtttgacattcttcttctccacaatatccaaacatttttttgctttaacacataatagtttggttttttaagataattgattgtctaaatttaacactagtattgttttaccacttacaccgctattaagtgaattaatggtgtcaactgttggaaagtaagtctttgaaggctgttagagactaagtaatagtctttgaaggctgctagagacaaagttctgaccattagatttagtatgttatggtcatctgttccatccaatccatcatgtaatatcacaattgtgaaagttgaatcatgccatttttcagggacacattcttcatcccacacactaccctgcacaaaagtttaccatatggtcatagcaaattggtagcttgaggatttgctgactgcacaccacttctgaagttgtaaaatggactctaaactaaatattaatttgatttctttttatacttggttctcccgctgaaccctttattctttgggtgttaggaaacatttagcatattgctagataggtcaccttaaggaatcaaaatatgttctgtaatcttccacaattcacaagttatttatgattttgcatttttcacatgtttggtgtttcatcatgcatatgatattgtttctcgagccctttctctgtgagggtcccttttttaacacatgtgctagatgatgtttactgtgtaaggtaacttgttgccaaaattcctgaatgattaactggttatcttttataataacaggtaatgcaccatggagcaatgtacttctaccttctgaagagcatacagatgacttggattctaactctgatacaggaggttgtaaggctagaaataagatgtgcaacagtctagtagagcaagtagaaaattcttccgtagcagtcatgccttgtgacatctgctgcactgaatctcgattttgtcgtgattgctgttgtattttgtgttgtaagactgtagattatacctatgaaggctacagtttcatcaagtgtgaagcagctgtgggagagagttatatttgtgggcatattgcacatattgactgtgctgtacgatgttacatggcggggaaggtaggaggaagcattgggttggatgccgagtactattgtcgacgttgtgatgcaaagacagatttgattccacatgttacaaggctattgcaaacatgtgaatcaattaattctcgagatgatattgatagaattttaaaagttggtgtctccattttgcatggatcgcggaaaactagtgcaaagaggttgttaaatcgtattcagttggctattggaaaggtagatttgttattctttaggtataatagaaagtgtagctgtctatttaaagccttgctcaccatttagttttggcatcagcttgaacacgagactcatattgaggacatctggaagctggaagacaattcatcagctaattctgaaggtaatttcttaaaattcttatacgactgtattcgtcttaattatatttataccagtgcatgagtttttccagtttcatgtccttgtgtatgaagtatcatcaggtaaaacggtaggaaatggtctcaaaattatttctctctcttcatccagacaaattaaagtttttttttcccttttctttagcttagcatacaatttgtcatggaattctagaaagttgtatctttgtgtatgaacgcattgcacactggattaacatacaaactcacgcgccttctcgtcacccataattctttgctctcaacctaagatcacggatagggtcatgtcacatgtgctgccataatggagtttaaaacactgatgtttgtatcacaaagtaatatatgtttttccattgcttatagatacctctaataatgaagatgctgcactggatgttgttaaccagcaagaccctctgaatattattcaaacagacattcagtcttttaattggaaaactgaatctctcaaactagaagaagagattgatcaagttttgcaggccttgagaaagtcacaggagatcgaatatgaaatggccgaggagaggctttatactcagaagaattgtctatctaatttgttccagcaacttgagattgagaggtctgcattgacacgtcatgtatcatcaactgacgaggatgacttgctcactgctgtcttcaaccgagtgaatcagataaaacgagaactcataaaactcaaggaaatggaaaaggtagcaagtggatttggaagaactgatagaggcattttggaggaacactatggtttggaaattgaggggtgaagtgttgtgaatcctatatatgcaatttcgcgggttggatggttatcaaattttggcccagaactgtctcaaaattttatttttcaaaatatccaagctcttaggtttccgataccttcacggttaagggctatgagttgtgaatcttaatggtgaacaaaaccaaagagtgaaaatctggtgaagagctgtggattgcatggcatgatgtgttttcttcttttgaactaggcaaatggggtacggtactacttactaatatgttgaggctgtggattttcagtactttgaaagaattaaacccgagggttaagaaaatgcttggacaggttaccaggactttgtcgagtgtggatgagcatggctcatcaattttgtctccctactgctatgtgagtaagtcctctgcaattttcaatccagaggtaacagtagagaacgttttgttttgtggtgttgtattgttcaaaaattatggacgacattatttcaaatttttgtgtcacttcccatttgttgagtagtcatctcaatttgaagcctcacttatatttctaaccattatttgtttacttttttatttttttgaagtcagtcgtgattggaaaaatacatatgttttgaaaaatgttaaaggggaccagaaatgtttaacattctcttatgtgtcaatattgctattggttcaattaagtatcagaccctatataatttaatataataacttttaggaagtatcactaaccaggtaacatgtctagaggtgctaggtactgttggtatccaataacaatgtttatatgtttttg

SEQ ID NO: 36246 - DNA, 11835 bp, Cannabis sativa
gatgatagaaatcagaagtgatccggcgattgctttaacattcttaaataatacaatccgaagagtataaggagacatcatcattatgataaaacacccaaaagagagcaaatgttaggttttatcaaatgattgatccttcctgttattccatttacttcagaatcttaattcatttggtatagtcttttagcgaacttttattatattgcgactcgaactctggaaagactcgaacagactcaaataccaccccatgaaccttatcaaatgtttataattttgttacttattcatggcaataacataaaccctctgaattctacctcaactaacgaatgatctttgttattctaactgaaaagaggaaacaacaagtttgaaaaccaaaaactagaaattgtctaataaaaattgctatgaggatcaaagtaccagaaaatgccgattgatcattgtggtacttccaacattctgtttctgaacataagagatcatacaggcacgcaactgatcctacaaatgtaacatgttaaatttcaattcactcactgcacatacattttctgccataacagcaaaaatgtacagccacaaacaatatgaaaaaccctttaacatccagagggaatacatcaatcatatcatgctaacataaataagagctatatactagagaacacacaaacaccaaaagaaagctaaacaagagcattcatttccataattcacatttatttgggatataaaatcattgtttgatcaataaatataacctttaatttatcataaagcaaatacctgaaacatcagttggaccaggattatcttgctgggtaaaagtctccagcctctccattcattcaaaaccaaaccatgaaacagctttataatcttataatagccattttagcatctccctcttccaattatccaaagagaaacaaatcttttaaattattcaacagaattcaagcctctttatcccaaatacctacattattaaaacaaatcaattaagaaaactaaagattacagccacaaattgttgtttatcataaaaatgcaaatgggttttttcttacagatcaaaaaatctctctttttttgtcttctacatcaaaagaaattggccataaaggaagaaaacaaaatcacaacaaacattgggaaaaccccagaattaaaattcaattattaaaaagaaaaaagcattcttacagattaagggatgagttttgacatattgatttgttggcaagaaaaagatcaaatcttgagaattacactataaaattgtacagagaagacaaatatacaaaattaaaattcaggggaattagatgatgcagatgagaagaatctgcatttttggttttatttaatttttaaatttaattaatttattattaaatttatgagcatttgcatatatagtgagtgccatcaaaagggggtggtcggatgttaaggggatgacgaagttaagggaacactcaatcacgccgtgggccccacgcgctcttaccatctttaatttttattattatttaataattatactcgtatacattgtccactttttgtaatgtaatgttgactttcatgtaataatacatttttaaagattataaacacatttgtttttcttcataatattaaaaaatatgaactatagttagttcatgaaaaggacaacatcttaattgtggagacaataatccataaacctttattttattttttttgctaaataataaatatttgaggtgtgtttggaaataattgtgtagttactaggtaatgtaattattaaaatagtaattgtattatttagtaattatattttattttaaagagtattgctattagtgtctaatattatttataggtggcgttctatgattggttaataatatttcttaaaagttatttttttcaaattatatgagactcgatacataattacattaatagcgatataataacaaggacatgttacatactactcatgtcttttagtatttttatattttaaaatataaaatggtgtttggtttgttgtaatggaatgttaattgtaatagtaaatattagtaatggttatgtttgttttggaaattgattacaatattaaagaatattgaactcaaaattattttgttttattttgtgtgaatgtgtaataaagcatgtagtaaattaacaaaaatatcttagtgaaagtaaatatatgtgtattaaatttatttgatttgatttaattattattatttaaattacatttttttattaaaatttgtgatgtaatgaccattacattactttaacattgtaatattgtaattctcgttagattggaaaagcattacatacacaaaatgacaactcaaatattgtaacggtgactttatttctattataaagtattaccagcttctccctggacaggcacttattgtgtctctgcagctttcaatctggattcaacaactcatgaagataggagaaatacttcctccaagtaagtccaatttaactttgttgagttacttgaacttgtcctacaccaacctgtcaggaagagttccaacgaacacccaattacaaagttttaatccttcaagctttattggcaactcattgtatggacctccaaagagaaaggtattccaagacaacaacaaatggtgaatatggtggtgaaggtgaagaggaagctgatcagaatactggtttcgattgggaatatagtagtgggatttggtgtgggatttttgggtgtcattgctcctttcttgttctgtagaatttggagagtagcttacttttggttttttcaggagtatttgtggtacaaaatcttggattgcttcatcaaaatgaagtacttgaaaaagtaaccatttgttttttttttttggctaattaaaatttttgtacttttgacatgtatcaaatcatgctcattgaatttttctaaccgttaaaaatttccactaaactattgagattatcgaattaaaggacttttgtccaatttcattcaattgtactaatttagtgattatttatgtacttaatcatgttccccaaattttaatatctactaaatctcgcctctcaaacttgacatgtgtcaaatgatacccctagtctttcacccatgttataatttccttattaaaattagacaaaagttcttattaacaatctcaatagttcaggagtatttttaacgaccaaaaaaattcaggaggcataatttggtacatgtcaaaattcgaaagacaaaaattctaattagccttattttcttatgttcaaataatgtagtatgataaagtggcgtgcatgtaatagtaacaataatagtagtaatgtaagattatcatctttcacatgtctcttaattttatggttggtagttaagttttaacttcattctattttaaagtaataaatttatggatacacaaattatacccaagattacagatagacaacatattttaaaagttcatgaaaacccttaagaaattacattgtatacctactttactttacttgttttaatttttaccttcactttcatattctttaaaatatacccacttttataaataatatccatcatttaaattaatataaaatatatactagacttaagtaaaaaataagagtatattgagcaactcattcataaaagtggatatattttaataaaatataatatgagagtattttttatttatgaataccaaaaagagatattcctcggagaaaaagagcataaataggaaagaaaaaagcgagagaaaaaattgctttttagattgagatcctcacttaaggtggaagaaaacgtggttacagagagatatagataacaaaaataacctttaaaaacaaaaacaaccacctcataggataatttatcaaaacaaaatatttccccattctctgctcaaatctaaaatggagagttcctcaaaatacttatttataggtccaagttgctacccaaaacttaaccttttcccacattttctctgctgaactttctgtatcctaaaaaattctaataacttctctcactccagattccccacataacagccaacactgctgatctccaatgttttgacagtctcttgctccctcctattattaccttgctctcaatcatttgatatcctcttcatggcataacccaattaatcccgacttctccaaatagtctggaccgtagtgtctcagaaaaattacggtccaggagtaaatgatcgatggactccccgctagctttacaacacacacaccagcctggagagattgcaatgaaaggtcttttttttgcgttctgtcatggacattcaacttccccaaagctgctaaactttagatggaacacaactcttccacaaagcctttgtccatgcaacatagttatgttgttgtcctgaagtgaatgacgagaaagccgataacatactactacatgagtaaaagagcaaagacaaagcgaacataaagtataaatcatgttatcaccattatagatacatcaaatcatgcaaaggtaccacctttagattcatgaaaattgtttcaaaagttcagtttcatacctgatccttctctagaagcaactgctgcaatgtcgcaattcttcaattttgtcccggagtctggataaattgggaagataagtaacatacactatgaagaaactttgtagaatttaagttaaatgctcactgcttgagaccagtctcagcaattccagatgtcagaagctgtaatggaattccataagtttggtgtaaccagtaattataactatgtgtatctagccatatgttctcatttaagatcatggatttcaaacttctgaatgagagagaggtctcgggaggaatttgttggattgagaagattaccttgcttgcactttgcagtatctgtagttgagttagccaaaatatcacatgtattgggccaaccactgtttgcacatatctagtacagggagtgcatttggtgcatgtaacgcctgcaaattgaattgaaaagcacaacaccaaaatcaaacacaaattatgtcacgtaataagcagaacataccaaatgaattactctcctaagctacaacacttgtcatcaaaccatttcacacaggacattgagaatcctccatcaactaagccagaatcaccagctacaaatacacctaatcacttacatggaactgatagcaatggaaattaaggaatacctgatgagctacatactgaacatcagctacacttccactgcgagaagcaatctggaatgcactttttagacgaccacaaaccacacaagcaagaactttcctgtacattgaaaacaaaacacagaatgtaatctaataatgacagaacgatgtacttgagggagcataaatttgcatattccttttgtaacaacaacaacaataataatacttcaccacaccaagcaccttcccaaaaacaaatctgtttggacttcacaaggacttcaccaacagccaaaattcttcatatgacaactagatgacaacccatctcccaatcttgtatcccacattatcgtgagttctgtacttaatctttataagcttgtaccaaagacaccataggcatttcgtaaaagtgttattatacccaatccctaggcccccttttatctttggcttacaaacttgttcacttgaaacctaatgttcccctccactaaatctccccctttttaaaaaaaattatcatctattaaatgtcatctcaataaccgaaattggtgatctaaaaattgacaaacaatgctcttgtaagttcatgttcatcaaatggtctctctagccaataggacatgacccgtgttatacacttccactaaaccattacagaaaacaaaatctccactgattgattcaagtgtattctgttttcataaacaggatactagaagtgtctgcatgtttcacacatatataaactctgtatccatgaatcagtagttaacagcacatggatccttacctcttctcaaaaaaataaaaaaaaatgaaaaaagtatatggatccttacctgtggctactagtcaacatgtcaatgagacgatcagggcgttctttgtgtttgttagcatatacatttatagcagctcccagtacctacacagcccaagggtaacttcagcgtaacagctcataaaaacaattacatttctagcatatacaaatatttgtcaaatacttcaccaatcggttacattttctacacatttaggcctgttgataaatacacctctattcttttgcaatcatttcatttactagaccaactaaaaaattgtattgtccttcctcaaaagaaaaaaaaaattgtattgccccttagctaatggtgtccacaatacttaaaagtttccatattacctgatcccaatcatcatcgtcaatagtccctttgatgtttctaaagaattctgtcaactggcttcctttttttctctcagcaagtgatgcagccacaccagcatatatatccacagctgcaacaaaagagaggagactaggtttataaacagtagcagcagtacgtgataaaaaaaaaaacttgaattaacataacgtaaactttgttggctaccaggaaggttgaattcataaatcacttggaaagccaagtcaaaattcttttccacaagagactctgcaattttgcatctcctcctgcaaaggaaagagcacataaatctcatcatatcataatatcacagagaaaaccttggtgaccaggaaagaggatacttaagcaacagtaccaaaaactaagaaataggagcaactaaataaatatgtgcaccagctcaccccctctcccccctcataaaaagaagaaagaagggcaaaagtatcagcattctgacaaaaagtagcattatatggaaacttttcttgtatatacattatgtaagcacattaaattttcttgtattacatgcattatagtctatgttcaactaatcagttaagatgaagtcacaggacatcctcataacaggatagatactagaaaaatatttcgatagcatatgaaagccttatagcttcatatgacacgtctacagtgcatcctttaagaaagggtgtactcccttcatattatcagtacctacgtgtactcccttaattgtagttatataagacatcttgcaaatttttaaaaactccataataatttatgatgttgaaaatgcgttcaaacaatttatttcacatgtgaataaaacaaaacatgcatacaagcaatagactgtttctaatccaaatcccaaaaatttatataatgtcctaaataactaggatgtgtaccgtcttacagaaatattggaattacaactattcacattctaaaaacacaatggggatggggatggggatgcaccgttgtacccctttttggggtgcactttagaatttcctactattatataagaaacaaacttttatcaatgatattattttataaaagaaaaaaaaatcaaggagcgataagttatcggactatcctcaagaaaaagcaaatatacaaactaaagcaaaaagaagaaggaaaatgaaactgaagagttttccagccaagagttttttttttttactgaatcagccaagagtaattaaaggaagcagaaaatctactttagaagccttgtgctgttcctaatccacagtagccttgttttattttctcattaatacaagaattgttttatttaaaataataaaaacagaaaatcgtttatttctcccaacaagtagcacatccaactctattccatagaagatacagtttcttttaatttgttttcctccacaaaatactcattgactaaacaacattgtgtcatcaaacacttgtctcaatctattacccaaaatctttgcaattatcttatataagcttgttacaagaataatatttatgaaattcttatatggtttatataaaataaaaatattgataagtaaatataagctctgagaatatattttctaaaactcaattgaatataatcggctcacatactaccaagtaatgatgaaatggtttattaaataagaatggcacacctgaatgtctccggatcatttgggttaccaaagagtgagtatagccattgcggtccatcagcatcattgtaggacttcaccacttcaacctacaggggcatttgcatgaacaatgtataaaaccaatgaatatataaagatgttataattcgtgaagaaaaaggaagccgattgaatatgcgtgaagcttggacattttgatctcatcataaagatagatcagggccaagtataaataaaatacacccaacttatgaaagcatgcatgagaaaatgagcaaggtacatgatgaacagttagaaaatttgattcgtgccatttacctgaattgaaacccgagcagaaaacttcacaagcccttcttcagtaagcttctcagatgcactttttcccctgacaccctttgtgacaagcttagtagaatcacctttatatcgagcagacaacccttcatcaaaatgcatctacaaccaaaaaattattttacgcatatgaatatataatattatttgttgcttatgaaacttttttttcgagtgtcatgttcttcacgagaattttttttctaataaaataagggaataagagaaaccaactaagtcaaagcagtaacagctaaactcacaaaacccaaaatacttaaaaaaacggacataacagtaaaaaaaaaaacttgaaggggataaaattacctctagaaatccatatcccttgacaaacattattcataagattgcaataagcatgatgatttagcaatgatctacaccaagaaccatcaaggcaacctcataattctaatccagattctaaattttatcagtccgcatatcagttttcccaacctaatgaacagcattccattcccttacccaccttaaaggacactaactaaacctggaatatttacaccattttaccttaccaaacaaaggtcatcttgtaactatgtaagaaaaaaaatatccaaaagtaacaacaggttataccttagcatgttccaaatgttttatagcctcctctagaaaagcagaatttaagaacaactgaatgcaacaaagtccagcagcaacatggtctttcttgataacctgaacaattaaacaacttctaagtagtcacacattgaaaaaaatgaaaaaaaaatattgcactgacatgaagacccaagtaccagtaagataaatagtggtttaaaaaaagcaacaacaacaacaacgaggaaaaagtttactttattcacagcatctgtgacaattaaaaaaaatccacctgaacatatttttatttttttggaagggaggagtgtgtgtggagaaggaaaacataaggattgctagttaacatgaaaggtgtgaaaagccaaatttgatctaaaacctgcaagtcaaaaactacctgaaaatactagggtctagctcaaagagtagggtgtgttttgtgtgtaagaggttcgggttcgtatctcagctgggtaactactaactaatttttatcccaaaaacatttacctgaaattggtacagaaaattgaaatgcttatgcgtttcacagtatagacaaatccgggcaagcactgcagctgtatactggctcactgcttcgtcttgtggctctgtagctgccattcttgctgatatcacttcctctaaaacaggcattgcgccataactaacacacagatcacacagctcatcaatagtcccataatcagtcgccaaattatcttgtctttgaggggatgaagaagatgttgcaacccccaccgttgatggttgaggaggaagagggacagcatttggggggaaaaacaacatgcaggcatcattgaattgaccatgcctaaacataaattcaagcaatttctgccgtgcatactgccaaaaaaaaaaacattagaagtttgcatatagagttatatccaatatccttaagttcaaaaaaagctaatcgatagagataatttattatttgggtttctcggttttgaaggaagatttctggttctcctgttctttatttatcaaacaaacatcaatttagtacacaaaaattgcttgcagtgataaatgtttaaagcaaaagtaacacaaaaattaatttgcatgaatcttcttaaagaacacaccaaccaacaaaaagaggcgggtttctcttttaaattggtttagatagttctaggttattagttaaacacaattggtaaataataaaaactacaaccatagagcacaattttataatctatcaacattttaagagtctgtcaagatgaatgaaacaaccaaactaaaacagtcaaagtgatagggaaaaaaggcatggttaaaagcaagatgccaaactcaaaaagattaatttaagcatgtaaaatatgtgaaatcttacttcttgcaaatagttcacacactcgttatatcgattgtagtccaagttgctgcgaggtccatcttcaaattctgaaccatatgtagaattatcatttgcacattctggaaacagccttgatttttcagagcgtggaaaagtggatggcatgtacagcacattgagatacgaatccgctgaaagagaatcatccaagattgttggagcactcttggccaaatgctcatacctgaagaagtattggtcacacattagattcggtgcaacaatcagggtcttttcctttcttttgtactttttgtaaaggagaaagaagttgaccagcattcttaaagtataaggtaaagcctaattactcaatgactagattatatttttaaagtccacagcacaaggtactaagtgcatagaataagccaaggtgacagtgttatactcaaaagatacctactcttattccagtaaagtgacatattaacagagtaatcagatctagaaagtaaaaaaaacctaaagaaagtctaaattgattacaagaaacaccaaccttttttgattgtcaaaataattcatttggataaatattctagcaatccctcaaatttttgttttatttagtttttaagttttggttccatttttgttaattgagtttttcaaaaagaaaattatatttcacggttttttaaaaagatgttaaagaggattttagattttataaataaaattgattttataaattattaaatagatatctcagcaataatactaaattttggttacgcatggcaacattaataactacgtcatcacttagcagttggtacaaacgaatgcaatcaactgcaaagagccgtcgaaaaaatttaatataagtacaattactaagcaaagatttggataattgccacaattaagaagaggaaaaaaaatacctaactagcctggtttagtaactattgcttataacttaatattaaaaagataaaactaatcaaaaatgatctagaagctgtaaatcatcttacattgaacgaacagataacatatccaccggaggacctccttcaattgtatttacgatttcagtaataacaggttcaggatcccccttatacaattggaaagcttgcctgaaaccatagaaggaagtaatgaattatagatctagcataaactcttctaaagaaatgaggaaaagagagaggaacattgagaatctagaatggttatcattcccccatcttcctaaatgttgataaataagcttaaacattttatgca

SEQ ID NO: 36247 - DNA, 4719 bp, Cannabis sativa
tttttttacatttaaaaatagaaaatagttctgaaaaaagaaaaagaaaaaaaaaacatttgggttctgtagattataccaatgacttttgccctatcttattcttatgatatgtgatgtaattctcactctccttttattgacttgaacgaaaatattctattgttatgcatgagtaacgttattcatatgtacgtatccaagatctccaagatcaacctaaaattgttttcttctaaatgatatatttacttcattccttgcttaattagaagacaaccatagtatttccaagttgctaatgtcataaacagaagagaacttccaaaaaaggaaaaaaaaaaagaccaaaacctattctgtctggtaactaactcccactaggaaactgaatgtctcctatttctagagggagttgatttagcttcttctggattggcagagcctaaactctccgaggaatcggagccactattttcgccttgtgcccctttgctcgaaaagagctttgcaaagatcttctttgatttaagtagccctctcattttacttatagtagctttgtccaccccacttttaacatcaccaccattcctctcatttccatttccaccaactccattgcttaacctcaatgaggctagctcccccctaagggccttgagctcctcagccgtggccactgcatcccagtcttcctctgtgtttgttgtcgcggaccttgaactcccgtgtgaggtgttgctgtttaaatccttgatgcctttaggcaagtcaggagtgctgctgccagatgatgcagcagccctcacctgctcgaaaaagagtacttgcacaaccacgcgtagtgggagtctctcattttgtacggcgtgcatgcaagcatcaacagatagctttctgcagtccatcagtttgcatatccttttcctctcacttttggtgatccctggatgttcctgcatttaaatagttatgttaaacaccatgaatcatatagtaatcgaaacagcaaatacttttcaagctcttaccttgaggaacatgtcaatagctcgatatatgccatcatgggcaggccgagagatacctgataccatctcagcaagaccaagaaactttgacaatggtaaatttggatcctttgcgatttcagctagatatccatcaatcaacttagcaaccatcaactttgaagcatcagataaaatcccaggctgcatcctctggaggtgatcgccgtcttccagtgattcaatctcagtgttttgatcttgccttaagaactcctcgactattctctgcacagcagcaacgtcatacaatgcagtgtcctcttccggtgctcgtatcaaaatgtcatttacagatgcctcctcaagttgctgccctattcttctcacaagctcttctttgactatatctctagagtccaaaagactcgctgctttcagcaactttagcaggaaactacacgagacactgcctctttcggctggtaacaaacaaactattgcgtctactgttgactgatattttaccacatctccagactggataatacccctgcttaaaccaggcatatttctgtaagcataagccttcaaggcttctccaattacttcataagacaatagtgatttgtttttaatatttgttatgactcgcttgtacagatcaatttcaagctcacacaaatcttcaacccaccaatcctttggcacaggacgctttatgccaccattcaaattcggttcactaccattttcctcatagatctttttcctgttataggtgtatgaccagtcaactttcgatacatcaacacaggccttggtagctacagactcaacacagcggccaaccaatttcaggtcctcagacattggtaagagaggttgtgtagtctgaagaactatgattgagtccttccagctgcggaaaatgctagagctaaggaagacatctatcttgtaaatgagatttcctttttcaatagtctcatgcattcctaagtattctgccccacatcttgctgcgacgacattgtggggattgagggtaacggtcataccataacaaaatttagcacagatctcaaaggcttcagcgccaccaggaatgtccgaaatgtcaactccctcggtgctttcatcactagctgttgcaaccaacttctgcaagtagacactctttgataaaagaggaaactgcaaatgaaattttcagtccatcagcaacactaaatatgtgttactcaactcgaaatgagaaacaagtgtgtggctttagtataaattagctgaagaaattgttttaaatcaaaactgtttcaaacaagaaaatacatgggcaaagttataggaaggtactcatttcatcatgatataccacagaaacacaaagacgtgcatttgtatcggtcacgatacagtataaagctttagataatagatcatcataccttatgcagattaaactttacatccccaacaactacagtgatgtctgtagccaactcacttggcacatacctgcacatgtgtaaaagattgttcagtactgcttgtgtggagtattttacattcaccaccgcacataggtaaaataacattgttaagacaaagcaagaagttgtaatgttccatcaccaccattctaacaggtaatgaataacacaccaaacttatccccaaaaaatttatcaaaagccagtagattctgcccaccagctggtgcagtacaatgattttttttaacatctaaatgactatggatgaaatgacaagagttggtaagagtaagaaaacaatatgatagcaattatcatagaattgttgtctttactcattctcccaactgcaataactatagtccaaaacagaatctttaatagctcattttatttaataataatgaaatggataatgggagaaaaacaaagaacaatgagaaaaggcaaagtaactagcttatatattgatagccactgaataaaaccagaaaagcaaaaacatgtgatatatgtttagattggaagggtgcatcaatacaagatcttcaaaatcaatggaggaaaagaaaaaacataatacatagataaaatagaaaagagtgcataagatctctcacctgacatttttcccttcattctgaaaagagtccggcttcgatccaagtttcataaacttcatattgggaaagctaaagatctggtgctaaaagaaacaaacttttcccactactcaactaagttaaatcaaagacttgcttgaaacaccactcattccttaatacaaaagtgcatactttgatttgaagagaagttagttctcagattgtgtaagatgtggaccagagattctcactatataatcaacttcctgagattaagaaaataaatcaaataagtaggatctcaaagatggtaaatgatatatgctattattcaaggcaagaccgaatcttgacagcaaccaaggctgagaaagtcttaagaaagaaatgtgaaagaggagataggttgttgtggcaatatttaagaaagaaaagaaaatgattctcttgaatggcaagagagccaagaaaagagtgtgtttccttggtcggcggcaaagcccacggagctcgggctcaccaagtcagcacaggagacaatgccaacagactcataacactaaactattcaaaaaaaccagagacacccacaagcacaaatctgactccaccacactcccccactatttgtttatctttctatttctgattatttgtttctttgttttccttctcttaaaaaaagagaaaagaaataactaaaagattcatgccacaaaccccttcaaaggctttagcttcaagttccaaaccaaacacattacatacatatctaattttttttttatatattttcaattttcatttttttttaaaccgttgaaattagaaaagctgcaaccgaaaacagcatcttggtatcagttgaagaaaccaccaaaacggtagacaacaagcatctccctttattttattttatttttgggcaaaagtataggaatatatgagagataggatctcaattacaaagcaagttacattattcaagcatttaacttcaactacccaaacagcaaaatcactaacaacactaaatgtaaaatcttgagaatctaccagaatataaagtatcaaatcaaatataatattgaactaagatcaccatattatgctgtatagtgagaaaaccacatgataataaatataaatttaccacattattgagaagaaaacagaaagacaagccccaaaatccactctccgcgtaaaacccatcaaaacccaagaaccattactcaaatctagagaattacaaaatggaaatcccaacttgtaacatgtagtaccaatagcaaaaaagaaaaccctttttctctttcttacaagtttgatcaaatataaaccccaagaccaaacctagactgatatttaaaaataaaaaacaagatagaaaatttatatgagaacaaattgcaaagtttaactcacccactagtactcacaccaccattgccagcatttggggttgaaaaaatcagaagaagattggttgaacagtgagacaactacaagtctacaaaagccagtagcagacccattggcttgaaaagaaaagaaaagaaaatagtttaagaaaaatgaatacaaaacaaacccagttga

SEQ ID NO: 36248 - DNA, 2866 bp, Cannabis sativa
gtgtctcgcacgtagttttttgctagtatatatatatgtgtgtgtacagacaaatatttataccaaatattgtggggatatgacattcggtggactaagacgtatggaagcttttatgaagatgtgtgatgctggagtaactcagtctgaaatgactgaggctaccattcaagtttgttctcctaattaattactactttgttttactatatatattcttgtggttatgagaatagaatgatgaaggtgactcactcatttcaaatatatatgttcagtcagtattgtgatttaattttggatctttctttgttttttcatttttatattgtaatatacaaaaatgcgtaatattatgttttgtaaaatatatgtattaatttctaaaaactgttacgaaattaattgcagaatgaaaaagaattatatattgattgaaaatgaatagaataaagaaccaattagagagtatatataatataacaggaaggaaaggaactaactaacggcccggccctgtgcatagggcccatctgagggtccaatatttttttttctttttaaaattatattgttttttgctgtttttaaaaaataccacattttttctaacataagagctcaaaaataatttttttttttctgtgccccactttgtttcaggccggcttaacaaccaactaacctactaaacggactaacttgctaactaactaacaactcagctcaaagagaagagatatacatagcaggagcacctaatagaactaattgaaataaccgtgacataacgatgtaaaatctgttatccccctcaacaaggatttatcttaggtatggtatttaatttatttaaaaaaaaatgtagtatataagtatatgaaacaaaaagcataaagtctttgccttgcaaatatcctttttagtttttattatacatttcaggatctgttcaatagagtttgaaataaatcaaattgtatactgtttatcacttataatatgttacaataggttctcaaaaactattaatatatatacaatatataattaacgtgtttaggtgattagtgtgtaaagttatattttattaagtgtttttgggtgaataattataattaaattattcattttcataaatttatgttgtatggaaatatttaatttaattttatgttagttttcaaattttgatcaaaataataatataaaatggtgaatgatgaaaagcccaatcaaaagcccgacatagaagtgtaatacggtccaataggcccaaattaggtctagctagcgggcctgaaatgaaattgcccagcttaaatggcctttgattgatgtaatttattggtgaaacattaaattgtataattaattagacatatatcacttttttaactaaagaaaataattcaaaaattcttcaacgtaaatagtagtctttctaagtttttttttttttgacaaatctttttaaggtttctaatgacggtacatttgttatttatgaataatataatgtatattagatataaatataataaataagtgtgttaaaatcaaaatttcaattttgtagcataattttgggttgtaaacaatgtaattaatgatttgtaactatttgtaactcctaaaataatctaacattaattatgtatataaaaaaaaaaaaacttattacacaacttaatttgaaaattttaatgctaaagacgttagaaatgtttgggaagagtttgaaaattgaaagaagtttataacgaggctcataaacgggctaaagttaacttaatagtctatttttttttttctttttaaagatacatatatttttattaattttaaaaaatgcaacatttttttttctaaataaaaattcaaaaatatttattttcttataacctactaaatttcataaccgaccatgtctattaattttttactttttaaacatgtcgtttcaagcttctttgggagctttaacaataaattaaggatctctgaaaactatgaaatatgtaaaacttgaatattaaatggtgatatcaaaatactaaaaataaataatttggtgcacatatgtggaccctaaactttttctatctagagagcaccaagttagaaaaacatgaaagatttgattctttgataaagctatttttatttgagagttctttagtgcatagagaaaagggagaaagtaaatttttgaacaattttcttatatcttattcaagttttgtaatcctcaatactctacacttaagattatgtaagtgtttccttcttcttgttcttattattatcttgttgttatgttggagcatgtactacggtgggctatagagttgtgtctacacaagatatttagaatgtaaattttttgatatttctattttatgttagatatataagatttttttttttttttttgtgtctaaaattgtaattttcaaaagaagagaagatatttttggtgggtgtcttgcattgcacatctataaatatacattatttctattactttataacaccttttcgaaagaaagatataattatattttgaacaatattattatttatcattgcaaatatatatatatatatattattatttatgagtaagtttttctcttttttttttcagaaatatttatgagtaagttgataaaagtgtgcatcaatctaaaggagcatctcaaaatcacaatgagttaccaattttatttggaatgtgaagtcaattaaagctgtaaaataattactatggaagataagataaatattaaaaacataaattgtatccaacattatttcaaaaaataatcatattattattattgtagtttactatcaatctcac

SEQ ID NO: 36249 - DNA, 12920 bp, Cannabis sativa
  modified_base (12255)..(12266): a, c, t, g, unknown or other
acaaaaactccaagtaatccattagttctttaaccaattcacaatgattaatcaaactaattatttcatcatcgatagaattttaaatttgaaggagcaagcaagcatctcatggagtcatatttttcttgaatcatctttttttttttaggatcatcagtcaagtgatcatctttgtcaatactcctcaaatatagtcaaatcgtcttactccattccaaataattcgaaccaatcaatttatggtccatgattttagaaatcacgagataacatcgaaaacaactatcgatttcgaatatgattttatttctaccataatctctagaaaaacaattgaaagagaaaagaaagaaagcgaacactaaaaaatgaacacaaacacgagaaagaaaaaagtattaaaccacaaaatgagaagaaccattggagcccgatgcaaggaggacgaggaagggccaggagcgtgacggacgttgaccttcaccaaaaaagaggtcagacgcgccctcatacgccggcgcgtgagagtcgcggcggcggcaattggcagcgcgtggggcccacgcacggtgaatttggccgtcagacttcaaggttttgtaagtcagcggctgggcaatccgtttatgtgggcggtgagaaagaactcgcactctaactagggtttccgaaaaaggaaccctaatctcttttttttcatgaaccctaatttcgaatttcgaatcacaattctaagtattactctgatatcatgtagaaaatagtgaatagaattgtgtattgtattccatagaataatatatatttatatacaaagttaggagactaaagaggaagttaataaatacaattaacactaatttttacagctaatattctaacagtatgaaatattcttttgatcaaatgcacatctttgtgttagttatacaagattgacttgttatattgataaacaaattcaactatatatacaaaatcaggtcagcaatggttctgtagttatgtctcaaactgagatttgtccccacttgcagaacatggacttcccatttcaaactagtaaagtcatattggtaaacgagttcaactatatatacaaaatcaggtcagcaatgattttgtaactatgtctcaaactgagatttgttcccacttgcagaacatcgacttcccatttcaaactagtaaagtcatattcgccgtaaagtggccagagcacctcaatctaggaacctatttttttctttaaaaaaatacttaggcaaaatgattggcatcaacaatactttagacattattacaccaaaactgtatctaacagtactttgaatgtacttcctgtacgtacagattataaataaagaagatgcaacaaaatggttccgaaagagtacacatctgtctagtcaaatggagcagcaggtaaatgttacagattacatgtaaggcaaaaatctcacctgtgtaaagctgatattggagtccacataaacatctgccccatctctagcaaatataggatctttggcaacctacaggacccaaagcaaggaagtctcctgatcaagcttgaataatagattcaacatagcccaaaaatactatgcatttcaagggatggggttggggaattgtggatgaaaaataatgataagcattccaaataattataaggaaaagattgtagactttaaaaagaatattttaaacgtgacataaagggtcattttgtcaaatagttttatattttaaatgtggcagaattcttttgaacaagaacaataggctcatttaccctctggagggaaaataataaaaagcagtttgcaaagaattaagagtgcatcttccagtgcattggacccacttatgcatcaaaatttagatatttactcgttgatccctcaaaccatataaagttgagagagggatagccaagtcaaaatagcaaggatggatctaattgcttgacctataatatgatctgctaataaaaaggtgaaccgcactaaacgtaagagagaggcacgagcatctctgtattggctttttcattttctccccctttatttttgtaattgcatgttaaaattctctaatgatgattccattaatagaagcattggagcgcttgacagcaaatctgccaacaattctcctctattacatgattaaataatctcttaaaatcagggatttaaataaaaacctgaaatcaaatcagcaacgagacttcagatcttagagatcctttttccttttattgtatgaataaaggtaaaaaaaatataaagaaatctcctagtgataaattcggcagtcaacaatagcagatgaaactgcagcaaacagtcttaaagtatttgtaattgtaagaaaatgaaagaaataaaaccaaaccttcagtttaatgtataaggtaccaggttcacttccttgaccaccagtgtttccagcccctggtacacgtatagtatctccagaatctatacctgatccaaaagaaaacataattgttggaggcagtggttataaacaacaatgaagataaaaaatcaaaaggaaatttaattgttggaggtagtggttataaacagcaatgaagaattgaagataaacaaatcaatgaacaaaatctataaatacaaaggagtacaacaaacaatatcaacacaaagacttgcataagttcagaaactttgtccagaacttttaaaaaagagttgcctgaggtttctacaattttagaataaggagtttgatacaacaaacataagaaattctagagaaaaataagaatctttgacagcaagagtttttttcttttttaagagttttgacagcaagagaatttaaagggagaattagtgatcaagtcccaaaaactctttaaaaaatcccttcattaggtccaaccagtagagaactgtttaaaacagattttggagccaaaaacgtacattgtacggaacagacaagcaaagtttcgcttcctctgtggtgacacatcgtctgctgaaaatcgtatatttcctaaacgcaagtgacgcgtcacccccagaaggcatcgtatcatcccaaagcctatccaacttgtccaaaaaccttaaacacctccaaatgatcctaaactttttaggcatgcttcagtaccacactgtcactttgaccaaaaaatataaaaaaaaataattcttaaatgcctaaaaaaaaaacaacaaatttcacgccactatcatgtcaaatcatgaagtgttttgcgtaaaacacagccttatactaatccaatcataatagatgcttcgaattaactatgtccaccaaaagatacgatagaattaatgaagtcattctgcattttttttttttttagattttgtgctgaaattaaaaatcaatttaatactcccattattacttggtcaagcgacaacgtcaaaaatatacactagctttatttcactaaatattgtttagagtggcatgcttcatgaagcatcctgtgttgatattgcatccgaaaatggtatagcataatgtaaaaacagacattttaaaactgaagagctctcatttcaaatgcatgtttctaaaacttttttggtcgacgtcgtttttacaacatgctcctcattaattgcatgtcattctttgttcttaatggtgagatcccttacaaaatccttttttcccaataaatcatagtttcctgttgaacctaggatatttggtattacttattttgtacgggatatttatccacatgtaactaaattaaatctcaaatctttgaagtgtttttcttcgttattctcatctacaaaaaggttatagattttattgttcttaacaaatatctacaaaaaggttgtagattttattgttcttaacaaatatctacaaaaaggttgtagattttattgttcttaacaaatatcttgtctcagttaccttcacaaaggactcactgtacttttcgtttgctactattcctactccccagggagatgatttgttgatatattttaccacaacttctaaacttgtcataaaaacaacttttgacaagcctcctattactcaagtctactccaggcatccacctcgtaattcatgtcttgcacctgctctttcatcatcaaaatcaagtatcgaaccatgatcctcctattgtgttgcacaaagataaacaccattgtacttatcttatttcatcttttgtttcctataacaacttgtcattttcttcttgttcttttattgtttccattgacgctatctctattcctaaaacaattcaagaaaccataatgatggttggcataatgcaatggttagaaagagatgaatgttttatacaacattgtcaccaagaatttggtcgatttacctttaggaaaacgttctataggatgcaaattgatgttcgcaattaaggtcaatccacataggtgacttgcttgactaaaagtttgtctggttgctaagagctatgttcaaacctattaagtaaattattctgaaaacttcttctcctattaaaaattgacatgtttggttgacatttttgctgtaggaacaaacatttcttgatagcctatcccatagatttgagtgaatccttttgccaaaatctagctttgtatcttttaatacttcaattagctttgctttttattgtaagcacccacttacaaccaacaatttttatcccttacggtagcttaacaatctcccaagttccatttttctccaaaacattcatttcctcagatactacttggttccaacttgattcccccaatgcttcttgtatgtttctaggtacaacgagttctgaaatagtagtagtaaatgctttatatatttcagatagacgattgtatgagatgtgtttggcaataggatatctagtacaagtacgagttccttttctaagagcaataggaagatcatctgagtcaaatgcaactaggattgatttagcaatgggtttagtgtgaacgacaatagcatttaaattagattgagaagaaggcttaatactgctaataggagatgaatcaaaagtaggaatagaaagagaattactcagagtacttgttgaaccatcattcaaggcctgcgattggtcttgtgcagggatttggtgatctttattttctcaaagatatttttccttgaataaatcacatactcaaggttattacgatttttaatcaatcataacatttctttttttgacaaactaagctcagattcagaatcagcaggctagggctaagtttttgtatcaaaacatcaagaataagtgtttgctaaagactcactaatttttcaaaaatttggttctactatattttccccttgaattaaatttttggagaaatttcgggtattctctaaaaaagaaacatccatagtagtgtaaacatgttaagtggcaggattaaaacatttataaccttttttattaggaggataacccaaaaagaatacatttcttagacctaggatctaacttggacctagatctttttggtaggtgaccataagtagtacaaccaaatactttaacaggtaactcgacaatttgattcaagaaaaaactttcttaaacatgttaagggagtaagatattataacactttagcaggcatcctataattaaataagatgaagtaagaacagcatcctcacataaatattttggaatattcatataaaacatcataacacgagcaacttcaagcaagtgtttattttttcgttcagctaccccattttgttcaggagtctctggacaggaagattgatgcacaattcatttttcttttaaaaaatttcccaaagtgtaattaaaatactcggttccattattagttctcaaaatacttatttttgtttgaaattgattttctatcattttacaaaatgtctattaaattttgtaaaacatcagatttttctttcattaaataaatccaacaaagacgtgtggttgtctataaaactaacaacccacatttttccaaaattagtagtaacctgtgaaggcccccaaacatcactatgaaaaaaggtaaaaaaagttttgagggctgataagaaattttaatataagattttctttggctcatggcaaataagtacctctcacattggaaagataagggattcaatcgtttaaataatgctagaaatagatgttttagataagaaaaactcaaatgacctttgatcatgaacagaagagaactgatactatgaagcccttgagcaattttattaccagataattcacctttaaaataatagagaccattaatcatcctagcactgccaatcgtcttccccgaaatttagtcttgaaaaaagacaatggaattcatagaaaaccacacaacaattataatctctagataatttgctgacaggtaagtttaggaacatggagaacagatttaagatctatcccctcggaaagtttaatagatgagaaataaccatcaactattctaacttttttatctcctgaacctgaataaggtatataagagtcaaaaaggttagaagaactagtcatatggtctgaagctctggaatctattatctacggagtagattatatccaaaaacaatttaaagcatttatttcattacttgtatgtcaaatagagacattaggaataccaaatgagttcaagttagttttcagcaatgcatgatcgatctgctcaccttgtcttatctcaccacgtttgagattcatctcgaatatttggaattggctctctaaattagagtacatatgagttactttttcccaaagttcctttgctgtaaaatagcacatatagttggagtcgatttcttcttccatggaattcacaagccatgttataaccatggaatgctcagcatcccaaacctcacaagcagtgtctccttttgctagctccttctctcccgtcaagtatcttattttttcacagcccttcatgtacatttggacagattgcgaccatctaagaaaattattaccattcaatcgaatggtagtgattttgatggaaggaggataaaaaataagtggagttggctggatcaagttgcggaacaatggtggaattggttggaataatattggtttcataaataatgcaagagaatgagggttgaacaaaaagaaacagggattagggcataggaatacgactggctctgataccaagtaaactagggtaaaagtattttttctacaaaacagtgtatatatagctttacgtgagtcggcacataggcaaacaaatacccataactttcttagaatagtgatatggcaactatactagaatattccctaataaatggaagattttcctacaattttatatcttcgaccgttcattcatacttagtttcacacaaagaacttaggcgtggtaaagtatttcttagatgttgaatttatatagagggatctttctatctcaaagaaaatgtccttgacttattatttgagacagaaaaactgggagcaaagccttgtagtgccccaatgaccccaaatgtgcatcttataattgaaaagatatcgaaggttggttggaaagttaaattaccttactctgactcgtccaaatattgcatactcagccagtcttgttagccagtttgtatcatccccagtaattgggcaatgttagagcaaattttgtgttacatgaaaggagcagttagatgtggtattttctatacaaatcatgggcacactcatatagaatgtttttcagaacacattgggcaaattccaataaagaaagaatatctacttcaagttattgtatctttgttggagagaattaggtttcatggaaaagtaaaaaaaacattatgttatgtcacaatctagggaagagttagaatataaggctatggcacagtctttgtgagataatgtggattaatcagcattagactaaagtaggacttaaaacttcaatatcagtaaaattgtggtgtgataaccaaactacttttcatattgcatctaatcctatgtttcatgagcaaactaagcacattgaaattgattgtcattttattttttcacgaaattcaacaagatttgatttttacaagaaatgtgaagactggagatcagcaacttcaagaaaacttgattggggttcagaattcggattgaaaatcaagtttggatgattaatatctatgctacaatttgagggagagtgatgttagatgtatattagttatatttagctatttagtcaccttaattctaatttcctagatgtatagtttcctaagatagattctaagctttgaatataaatatataagtgcataaattttcaatgaaatataagttgaatatcattcttttcatttcacataacaacatgaaaataaaaaagggaaggtggggatcatatttttgcaatgccattgatatttctcctccttcacaccctctaaaactcttgcaaatgcataagaaatcacttctcaatttctaaatgattttatttaaatgtcaaactcaaattgtagctactttttgtgtactataaacttcaaaaaagtaaacataagagagagaaatatcactaatttaattatggagctagagaaaacatcattgaagtgtgcatagtcaaaaaaagattcacaaaatttcgtgagcaagttgaaagacttctcattagaattatctacaccaagcagagattgtaacggtatgtataggatttgtgaagtagttagaaagttgttagaggaaggaatagggagtgcgatataaggaaatgtcaaggcatatatggcgtcattgggaaatttttatgagcttttctatttgggagagaaaggtctcccaatacccagcaatgatttggtttctctttaagttctatgatgcatttccattttttctcatttagtacatcacaactcactaatgaaattgcaaactctgccacaagtgaaaagatttcatgcaacttcatttcataaacaaataaacctttttataccaaacagttttcaagaaagcataatgacaaccaacctgcaggtattgtgactttaacctctctaacaccttcaactactcctgatccttggcaagacacacaatactcctgcaaagacaaatagtagactgccattatattttacttggtagcagtaaagctacacataaaattttactggaattaacattcaacctttattactcggcctgatcctttgcaagtattacaagtagatgtgaacggaggaatggttacctaaagaagagataaaaagcaattggcacaagtttctgaattattaatttttcaaactttggaaactacgagaaaagaaagaagatatcatccttaggaagtggcaaatttaagtaggattatccgctgtatatccttcaagcacttactctcccaatacctctgcacgtagggcaaacttttttcttggcatcaacagcataaccttgcccatctgcgtcatcatagacagagaagaaaagaaacataacataaccttctgaagcaagaaaacaacattggtaaaaaaaattgtctacaacgcaagagcaatataaggcgacacttgtacaagaatatttaggggctctttacaatgcccaaatctggacatcaaataaaacggttgtttatttttcgaactttataccaaaatgatcaatacatcagtagttatacaaagtataaaattagatatatcccgtttgaaaaatacttatattcagcatacaactaaagaatctacataaatatgggcacactatgaataaagcgagtattgtaaaaaaaaaaaggacgtgggctaaaatggagtgtagaaaaggaacacccgtcctaatttcaggagttccatgatagtgtatattgttgatgaggaagtttgggagactgcacatttgatgtgatctcacttaagtgtgctatcttttttacctcacaaagtaacaccaaaacaaggtatattaggcagttaatctgcatgtttcagctttgcttcacagtgaataaatcatcattgaaagctgatactttatacataataggacaaaagatctagatcaacttacagcaaaaatcacaaggaacataagcatcaacggagagatgtcttatgcatcctttagcagcttcaagaaaagagagtgataactccacctatgaagatgcatatgaaacatatcacagtcaatcaagctatggaattaatttgacagctagaaactagaggcaaattttgctaacctgaatatcagatgcaaaacgatcaaaatcgtgttcaaaaatctgcaatgtcaagcaaaaggtataattatttcaaatatctaaattttaacaagacctaataagataataatgaggtgaggagtttatggaaatatctaaattttaataagaaagaaagtatacctcagagaatactttatggaatgaactggagaaattattctgattactgtaacgaaaaccccgagtatcaccagcaccttccatattttctgagccccttgtgtgcatcttcattaaaaacaagcatatgcagagtccaattaactaattggtgcatgttataggcgaaacaatctttcaattgcaacaaaaaaaattgtaatgacagtctcagcatcctgaaattattctattatgcacggctccagcaaatcggcttaacatcaacagtcatcacaaaatcttagatatagaagatgataaaaaaaacccgaaatggggaaggggacaagttaaatacatatgcatatcactaaggaacataagcaatataactctgattgggagaagaaggaaaaaaagtttcacctcgtcatatttttccctcttctctgaatcttgcagagcctggaattcaccaaagagtaaatgaaacagtcattcacattatttaggaaaatgattgcacatatacacatatttacattcaaagaagcaaacatcccaatattgaatgattttcaataacaaaagataacattaaaataagctattattgattttccagtgtaagtatcattacattacacataacaatgtgtgggtatacatactatgcatatatataaatatacatgtacataaatatgtatatccaacaagaaaaactgcgctcgactccttgtttaacatttctaccttctatttggaaattgtctaaacaaataaaaccttctgttgcatcacttgaattactttttcaatatgcacaagaatgaacaaaggagagcaataaataggaagaatgaaaagcacaatgtcggacctcataagcgtctcttatgtcttgaaattttttctttgcagaaggattgttttcattggtatctggatggtatttctttgcaagctacacaaaatgttaacacaacgaaccttagaaatataaatgaataattgcagtaaacaatatttgtgtatatactatacataaatgagataattgtcctcgagtccctgatatggaaacagaacaaatcactaatttaaacgagcaaaaggtttactgtagagcattaaaataaaaccctttcctgcaactatacgagtctcactttgttaaacttactgcatgaaaagccttttttatctcatcccgacttgcatttcgaggaacacccagaatttcgtagtagtctcgttccggggagcaatagaaccctagcaatagacaaaaaaaaaaaaaaaaaaccttagtgcaaatgaaaccaaataaaaaggagcgccaacaaatacagacgaaaacctgaagcataaaaataacgcttccgaaatgaagagcccaaatccacagttcccccgtgtgcagaaccagaacagtgcagagctgaaatgaaatccagaaaagcatattatcaaaaactgtgtatcaaaagtaattcaataactaataattaaaaagttcagtactcaatacctcgactacaaaacgaattgtggggcaacgagacgagttttcctagtttattacgcggctccgcagccatagacgtgagcaaatgccgccgacactgcatccaaaccaaaacattactgaaagctctttattgaacattttgaaataaaacagattatcgttagaggtttgattctcaccaggctgagccacctcagtttgctcattgtgaagatacaagtatctgctaagtaatatatatatatatannnnnnnnnnnngagagagagagagagagttatgaactccggtcaaaatctgaagaaatagaataaacaaccaagggttgattcaatttcaaggtttccttccgccgttgctagtcttgttggaaagagggactacataagagaggtttatttgagttggggaagcgccaagaaagttaaaccagagtttaagggatacgtcttcaagccgccgtttatttgcccagtctagggaaaaaaatatgggttgcaactttactcttacaatataaaatagtgcagagcttattagtaatttgcaaagaggtgaaatactctaaatatgtaattgtgtagttattgttgggtataaaaggagtaaatagaacttttactcaaatagagttactcgaagagtgcattttaagacatttgtcttgtctcgaagaggactattatttaacacttaccctatatttggtaagtgtacaaagactacataaaatttacaaaggaaaatttgatattatatgcttaaaattaatttatccactattttgcatcatgcaaaatatacttccaccaattttacctctaaacaaataaaaagtaaacatccatctctctctctctctctctaggatactcacaccacacacacgcacacactctaccagtcggacgacc

SEQ ID NO: 36250 - DNA, 9241 bp, Cannabis sativa
  modified_base (45)..(60): a, c, t, g, unknown or other
gccaaattgttttcaaaaaacaattttttgtttttaaaaacaaannnnnnnnnnnnnnnnatgatgccaaacatgcactaagcatttctaaccatgctttctaaatatattttttagctaaagtatagagtgtatttttaaaaaaatgaactccaaagttattgaaattcactctctatgacagaatgaataaggctccttttttttcgccaaatatttttaataatattttaataaaaaatactactatttttaattaatttattaaattaattcatatttaactaattcaccttaaaaaatactattaaaataatcaatcttaattaaaatagagaaaatagttagagtaacattaagaaaaaaataactgtattttaacattttaactattttagctaaaattttactaaataataaagagtttgaaaatactcaaacaacataacaaactagctaaactactacattaacaaaactgtcaatactacactcaataggtgcccacttcgtggggcagctcaaaatctcttctttctcactaaaattatactgtatgcaagttttgaacagcaagaataatgagttttgtttgactataataagtacttatctatatatatgtgcatataggtaacatccttaatgatatttgggtgctttagtcctgagaaatagaagataatgtagtactagtacccactcagttgttagcaataatgttggctttatagtttaaattaaaataaagagaaataaacattcaataagatattaattataaatatatatacacagtcacagatacacagttcaatattctgaaacactttgttttagtacacgtacaattacagaccatattattattaaacaaaattatatatatttatatattactaaataaacctcctttgaaagttctcgaacaataataccaatttactaaatcactgtacatttccacccgttacttcaaaagggcttaaaaaagtacagtaaaattagacaagtagtgaattaccagcgcgtagatgacacgaggggctgaatatgttagttgagcgcgtgagtggtggaagctggcgtttgttgaaggctaacaagagaataataagctccttgaggacctttatctaacagagaagaatgagtacctttctcaatcactttccctttgtccaaaacagcaatggtatcacacttctgaattgtactcaacctatgagcaaccaccacgctcgtcctaccaatcatcacgcgctctaacgcgtcttgtactactttctccgattgactatcaagggcactagtggcctcgtccaatagaagaatagctggatttttcagtatggcccttgcaattgcaattctttgcttttgacccccagagagctgtactcctctgtccccgcaccatgtttcgaatccgtcctttaatgccgagatgaaatcgtgagcgtttgctgctttagccgcttctatgatctccgcctcgctaatcttatccgacgctccatatttaatgttctctttaatagttccagcgaatagagttggctcttggctaactagtgccacgtgttttcgcaacgatcttagatggtacgactttatatctcgaccgttgattttaactactcctttaagtgggtcgtagaatctttcgattaatccaataatggttgatttgcctgaaccactttggcccactaaagcagttgatttccctgcttcgattttaatcgagaagccttgaaatatcatcacatcgggcctagctgggtacgcaaagtgaacatcacgaagctcaacgtggcccattatcttttcgggttgatggccctccgggtcttcgggctcaatacgtgtgtaacggtccaatattgcaaagactgacccaacagcgtccgagcccttagctaagtccgtggtcatgctaccagcatcagctatgacacggccagtactcaccaaaatcatgaaggtttcaaataaggctttggatgagatatagtggttagcaatgagttttccaccgtaccaaaagtcaaaagcccaagtacaagtagtgaggctttgagagcaagcaagcccaattcctgcataccaagattgacgcatgctctctcgacttgggccttcttgggctttttgaagcatcatgagaattctgtcttgggaagagaaagctgtgatgattcggagattggaaacagcttcggcagccagtttgctgctctcgccttgggctttaatggcttgattggacatgctttttagtaggactcgacgtgtgtagaagcaaacgatgatgaggggttgtacagctatcataacaagggctagtctccatgcaattaccatgcccattgtgcatgctactattacagctgagcaggtttgtacaagaagagccattctatcacctactaatgatctcacctacacaaaacaacaccaaaaaaaaaccatccaaataataagaatgtattattactcaaataaactagctttaaataatcgaatttgcatcataatatataaagaaaaaaagccttaagtttatccttattaaattaaagtggagtacaaaacattttaatttaataaataatataaaaaatcgttaataaattataaaattaaataaatactataaaaaataacttactatacaatgctaatatataaaatgagaaatgttaaaaaacactattgtttttaatactacattttcattttcagtatcacattgctattggtataatcataaaactccacttaataaaatgtatggaagaagctttgagttatgttcttacctcttaggaactttatgtttacgattttgtgcacacaaaatatgctattttggtgactatgagtactatggcttttctataagttaaaaattaagaataaacataccacgttggcatctttagcaagcctagcacaaacagcaccagtagaattctcatcctgatcgaaccacccaacttcaaaggtaagtaccttagaaagcattctctctctgactcttttagtcaagtactctcccatataagcaaaactgtaatgctgacaaatattaataaccaacgaaaatatagccaaccccaaaaaacacagcgcgtaaatccgagtcttctccttaatctcatcatgattaggcaagaaaaatactgatatcatcgaacccatagcgaaagcataaaccggttgaacagcaccgaaaagtaccgcgcttaagcacccgaggctggcctgtttccactcaggaacattcatacccaaaagcctcctaaaagaaggtaccgagagcgatctaccactaccactactttcggtttccaaaacgttgtcgtttccagttagcgaaaaccgagccgagttgttagccgagctggagcggctcaccaacgagagacggcggctgcttgtgttgttcaactccatgctcgagatagaagaagaaccaatgtgtctcgttgttgttgatgatgatgatggttcttctagtgttttgtgcttctccatttgctgtaggcgaatgagagaagcatatagaccgtcttcgcggtctataaggttgttgtgtgagcctgtctccataacatggccgttttggacgactgctatgatgtccgcattgcgaactgtggagaggcggtgggcaatgacgattgttgttcggcccaccgcggccttatctagtgcctcttgaaccactctctctgattctgagtctaaggcgcttgttgcttcgtctagaagaaggatccttggtttttttattattgctctggcaatggctattctctgtttttgtcctcctgacatttgaacacctctttcaccaacctgcaatcaaaccaagcataatatttatttaattattaaaattaagataaattagtgatttttattaccttcttattttacaaatatcattctcttcattatcacattaattctagtgatgtaatagtataaagatataaaagtgaaatattatagtttctgtttggacactaaatattttattggattagccactacttgttccaattgaccgaatcaaagtataatttataaagagagttgcttcatagtctactttccactttaaagagtagttttcatgaattgattggtgttgtaatgctataaataaatatcaagcccatatattttattaattaaagagacagttaaagttcaacgaacctaatgagttaaaataatgagtattgttaattttgaattagtagtagttgggaatattttcttaagttatgtaaaatctaatgtttaatttagtatattaataagaatatgacactacaaaagatgatagttgcattttagcaatcctttaaactaattgattatgtgaacccttctcaactcaacacataaaatattgctgaatcaactagatatataataatgcaagaattattgtactaataattagtattcagtgttaattcttttgatatgttattaattgtcctttgctgaaaacaaacaaaaagtactttattgtgctgtttgatttgactgcagaatatggtcaatggtggtccgcgtggaagtaattggattctaattgtgaggagagaaataacaacgttggtatgtggggaacgaaatcatgagttggttggattaataagatttgtaaataaaaacactaaaaatagcatagaaatccttcaccactatttcttgtatgccattcagtatgccaatacaatcatgtgtttggatttatatagatatacatctaatattatactctagttaattaacctatatttttctgaaaaagtaaaagcataaaagccaaagcaagcaaataaataaataagtgtaatcatagtagctaaaatatttattttaattttatacacttctcaaatcttatttaaatctcaccgttaattgttaactgaattattaagtatataaaatatatttttattatcttgatatagtagtgacaatctcaattaatattttacagtaaaatttaagatccttcaaatttaaaagtaaaattaaaaaggtaaacaaaaaaaaagtataaatgaattactttgcaaattatctaataaataatatggtaaatactacaattttagattttatattttgcaaaagttattaattggacactctgttttgttaaataaccaattaaactatatattttcgaaaataaaaaaaaaatagtactatgaactaattttttatcaaaataaaagttaataataacccaatccaaaaataactacattttttatatttgttcttcctagaaattgtttttaagttggttatattaaaaaaattatttaaaattgaactcaatgtactatttgatactattttacaaaaagaaaaattaatggataatttttgtaaaatacggaatccaaaataatattaactctaaataataataattagtggaagaaagagaaaaaaagaaaaacttacctgagtttcataggcgtgaggcaatttagagatgaaattatgagcattagaagctttagcagcctgaacaacctgatctaaatcagcatcttcttttccaaacaatatattttccctaatagatgttgcaaaaagagctggttcttgactaaccaaacccatttgtgatcttagccacttgagctgtaagttatcaatgggtacaccatcaaggcatatgtgaccaccaagtgggtcataaaatctttgcaacagtgatattactgttgactttcccgaaccacttccccccaccaaagccactgtctttcccgatggaatctttaagcaaaaatccttgaaaattatgctttcgggtctagaagggtaagcaaactcaacgtgtttgaattcaacttcccctgaaacattctccaatacctcaccttccatgctctctgaatcaatcttaggaactcttttaattacctccattattctctctcctgctgaacaagcttctgagaagtactttaagtttgataaaccagctcctaatgatctgttttatcataatatttaacacaaatttgttcacttaattataataaattaggtttctagctataaaaacagagtatatctttaatatttttacgaatttaaactctttctttacaaaatggggacagttgtttttgtgtttgcatgttactgctacattattaatattgttttccgaaaagaataatatgtgtaaaaaaaattgttaaataaatccgtaaaagaaaaggtgcaattttattattttaggtactattcattttacctaaaaagaaaaaattatttctatgaatgaaaaagaaggaatattttcataaatacctaagtgacaatagaattgcaaaaatgtagatttatagtttttaacatattttaaaaaaaaataagaacatatacattgtttttacgataagaacataattatgtagctgtaacgtgaaaattaagtaaacaaattcataaaaaatatttaaaaaattccaaaaacagaaaaacagaggagaaatttttaaatattttgtgcaaaaaaatcagagggagagagagagacttacaatccaccaacggctatggctgcaccaacagcaaaaacagttccaccttgagccccatgatacataaccattctacttccataatatgacataaaagaccaaatagcaaacacaatgccattacttccaatcgccaaacctttagccaacccttgttttaaccccaatttcaccgatccttgtaaagctgcagagaactctgttatggttttactttctcctacaaatgaataaacggtgcgtatcgatgataaggcttgctctgctatagtcccagccctgttatactcttctcgaatctttttagctaatcccatcaaagttcttccgtacattaacccaggaattaccaaaagaatcacaaatggaaaacccactattgccaatttccacaacattatgaaagctgctatatagctcccggcaaacatagaaaaattcatcaaaaaattgggtaactgttacaaacaaaaccaaaacagtcaaaaatctagaaacaaaaatagtactaaatttccaagacttgaaatgattttttttattaaccttttcactaagaacatcttgaattacaaggctgtcgttggagacacttgtgataacctcagaagtacttgttacatgtaaatcgaagtacccaacatcttgtcgtaacactgcttttaaatatcttgctctcattcttgctgcttgtctttcccctgttcttgtccaacaatatccctctaatttttgaaattaaataattaattaaataaaataaaaataaaaatatgaatttaatttaatttaattaattgatatgttgaattgaaacccaccaaaaaaacaagtcacaaatgacaaacaagccaagtacaataacgccactgcattctgttaaaggcccacataagaagaaaacagagtatttatatgttagtacaaagaagaagaagaagaagaaaattaatgaaatatgtatataataaaccttattgatattgttaagaaaaagatcagttgaagagattgaggttgatccaactccaccaatattgttcattaatttgctagtgattaacaacaccaaaggagtagtgaaaccatcaccaacagaacccagaaagccaaggatcatcaagcaataatcaaaaccatctgcatgtatgaaaatggatcgtatagacccacctttctttctcatctttacatctctcttatttttctcttccatatttcctttttagtatttttctgggtaaccaatcaccaaataatagtgattaatattttgatataaagattcccaaaacacgtctttttctttttcagaacttcaactaagggtgggtgtgtctaagatgacaggaaatatacacaaggctagcttggtcctcctgccttggaacttgtatatacataatatatttatatatatagacactaagttgccatagtggcatttattaacaaatcaagcttatattaattaaaaacaatcttattacacattagtagtgtttagcatttttaataagtgacgtcttataattggttaacgatattttttaaaatttattttcttaagtgatatgtaacccgatatttaattacatcaatagcagtatgaaactggtgagagtattaggcaccaatgatgcctttttaaagagaaatgttaaacaagtatcattttcagtgtcatattattattggtgtaattaagtattgtatctcatataatttataataaaaacttctagagaatatcgctaactaattaaagtaaacgacttacgattggttaatagtattctattaaaattatcatattaatttatataagacctattacgcactaaagcgtcaaacactataatgaagtgacgtcttataatataaatgagattcgatattgaattgtatcaatagctatattacacctcacagggctatcaagcaaacctttactcatagcatttctcttaaactaatttaaaataaaatttagttaaattcagtgcattatgaattgtgtacatgtgtagagttatggttgactttgattgcactcttttgtgtattagcgtcattaaagacgtatacaggtgaaagatgtggtccccattattatcctaagcaagcaattaaattgttttcgtggcaaatttgaaagaaaggaaaaaaaacagatgttataatgtcgttttttttttcttaattttataattaccaaattaagtaataaatgtatatatatatataagtagttaattattatggtctgttgtggtctggtactggtatttctatttcaacagttgatatagtttactggtttttccaggtctgagcgccactctgtctagaattcttagaatctaagaattggatggtccaaattttactatgttgacagagttgtccttgtttcgagataggtttatatatattatctcaatagaataatattttgctaataaggtcctcttctttccggctaactctacaacataccatttaaaggatatatttggatagatttttcatctttagtttttttagttcacttttattttttgagtattttagaatataaaatttaaatattttattagttaattttattttaatattataaattattttta

SEQ ID NO: 36251 - DNA, 5651 bp, Cannabis sativa
  modified_base (29)..(36): a, c, t, g, unknown or other
  modified_base (64)..(71): a, c, t, g, unknown or other
  modified_base (98)..(105): a, c, t, g, unknown or other
  modified_base (4662)..(4684): a, c, t, g, unknown or other
ccgtctgggagtatttttgtaaaaaaaannnnnnnnctgggagtatttttgtaaaaaaaatagnnnnnnnnagtatttttgtaaaaaaaatagcaaannnnnnnntaccatgtaaattttcctaaaaaaattaactcaacttaccatcatgtttgactttgggcataagcgggctaagtctgtgcctaaggtctacctagcttaagggcctaaaaaataattttaaaaatattatattttttttttctaaataaaagtccattttttctatgacccactatattttagagcccactaaaattataactactaattgtttgtacatgtggtaaataaagaattaacttgtttggtaagtaagcaaatgagagagaaattttcaatgtcaatctttttatttgagacttttttttgttattattttttttatttgagacttcaacaacccttggtagacatataattcattttaaaatacatttgtgagttaattaattacatgtaatgttcttcttaagaaaatgcattttgtatcttaacttgggtaaaaataatgtgtggatgtaatcagcagggttggcctgataaattttgggcctaaggaaagtttaataaagttttttagaaaaatggacattaaaattaggcataatatatatgggcctatacaaattttacaaaaatatcacaacataaaaaacttgaaacttcttttttgggcctgagtttgggtaggccctagacacaggtctaacccgccttaacctgaaattgggcttagtaatgagcacatgtataaagtacataatagtatcatatatatgtaaagaatagagctcattacactttccatcaattaaaatctagttaactattcattaacaaaatttggattggattaatgacaatgtgacaattttttgaggatgaatataatgggtactaggccaagaaaaccttaaaggtccaaggctttgtcactaagttataaaagatctcattgactagtaaatagtgggaggttcatcatcacaattgacaaagtcatatatctcattataaagatccataaatgtaaggtcttttcatacaaagacatattcataaatagatatcttattatatgagcattaaaggttatgttacttgtgatctttacacccaaaattgctcaccaaattttattagtcttatgatatttttaatatgtatataattatcttaactaactcccaataagaaatgacatatatttattcatatgttattgtattaaaactcacaatctaactaataattaaaataaacaccaacctccaactatagctacctaatccatgactttatggaaacaagtttgaccattaattatttatttcacccaaaaataaggtatctaattttcacattgattttcattatatatctaataaaattcatgtaaaataaccaaagatacaataaaattattacacaactggttttgcaatgtgaagagcaataatacacatagactaattaaagttggaaaaatttggtgtaattaattgaactaaaaaagaaagaaaaataatgaaatatatgaattgatgagtttgattgagtagtggaaagatggcataggccaggcttaggccaactgctatgtctcattgcttgttggccgacccatttcagattgacttgtgacaaaagcaaaacaccaattactcccacaatttccacacatattcatatcataaatatttatatatacaaatacctttgagattaccaaaactatatatcatgtttaaggaataaggagccggctttacacacacacatatttaagattctctagtttatattctttctatcttattataaaaattactacaaaagaaaatttctaataaattagcttaggcacatttatgtgaaaattgtttttttgttaggataaatagcattatgtgtgcctaaagttttaaatttgtaagtaacataaatttaaaatttatttttagtgacataaatatctaatgtttgtaaaactgtaattttttacaagttttgtcagtacatactccattttgaatttattaaaaaatatttggaagtagctgatacacatgtttaagtctagattcaataatttagaatctagatcttatatgtactttgtttaagataataatagagtttgtactgacgaaattaaagaaaaatttatataattttacaaacattaaatacttataccgctaaaaataaatttaaatttatatcaattataaacttaaaactctaaatatttatgtcatgtatactctttttattgtaattatttcaaaagattgatgatgatgttatgtgtgcgaccaataaagtttcttcttttggtaaaattatagccacccttttatttattttattcattttaaagataggaatattctaaattaaattctttttggactaaaataactcaattcaaccttttaaaaaatcaagcattttttttacttttataaatgtccaaggttgtaacttggttatatagacaaaaatacagctagttactacaatacaaatatgcaaccaagttccaaccaatgattttgattgaatatttaatatctttaagaattcatcatgaacataattaaattctattttaatgtaaaaataacaacttttacataaagaagatgattctatagcatttttttcttcatttgaaagaaaaaacaatgagaatattctatatagcttatattaaaggtataacaaagttttcatttttttccaaaaaccaaacaaagtcttctcttctctctcaacctctcatcaccaaactcatcataatctcttttctcaacatacccagaagctaaagatggaatctttgaacatgaattacacctctttagatcatgatctagccattagaagattttgtccagctagagttgaagaagagcaaggagaatgggaagagatattgaatgaaattgagatgtgttcttcaccaacaataacaaatccaaataacaacaatggtactaatactcctcttttggaagcttgggaaatcgatgaattcgtcgatagcttcatcaacatggatgagcattatgatgacaacaacagcagcagcaacaacaacaacaaagattcaccaccacaagatgatggctcgccggttgaggttgagactgatgtcggtttggtggtaatgcctagtgttgaagaggctaatcatggtgtggatcaagggcttcacttggttcacatgttgttagcttgtgctgaggctgttggctgcagagacacccaacttgcagactcaatgctcaatcaaatctggtcctcggttactccttatggcgattctttacaaagggtgtcttattgttttgctaatggacttaagtcaaggctctcatttctccaaaacaatgtcaacacaaatggtacatttatgaatggttcaatggagttttctgtttctttggaggaaaagattgaagcttttcaactactttaccaaacaactcctttcattgcacttgggtgtatggttgcaaatgaagctatatgtcaagctgcaacaaacaaagattatcttcatatcattgatttgggaatggaacatactcttcaatggccatctttgattagaactcttgcatcaagacaagaaggctcaccgaaacaacttcgaataacaggcctaattgatgaagaccaaacccttgttgcagagctaaaaacaagcatgaattcactagtggaagaagctaactcattaggtgtaacattaaagttcaacctcatatcagagcaagtaacaccatcacttttcactaaagaaaagttagacttaagagaagaagaaggggaagcattgtttttcaatggcttcatgcatttacacaagtatgttaaagagagcagaggttcactaaagtcaatccttcaatccataaagaaactttctccaacattgtttacaattgttgaacaagatgcaaaccataatggaccattttttcttgggagattcttggagtcccttcattactattcagcgattttcgattcactcgaggctagtctccctagaaatagccagcagaggatgaagattgagaggcatcattttgcagaggagataaggaacattgtggcttttgaagggccaagtaggattgagagacatgaaagagttgatcaatggaggaggcaattagggagagcagggttccaagtgttgggattgaagtgtttgagtcaagctaggatgatgttgtctgtttatggttgtgatggttacactttgagtagtgaaaagggttgtttgttgcttggttggaaagggagacctatattgctggcatctgcttggcaagtaaacaatgttcattcttcttcatagtagttctctctctctcttggataatatatttcatcttcaattgtttgtattattattatggcatattcttaaaattgttttatattagagatttatgccccttaactttcgtccttgaattcaacaatctcaatagttcaggaaaatttttaaacaatctaaaaatttggaaggcacaatttcatacatgtcaaagttctcgaggagacctaattagctttttttttattattattatnnnnnnnnnnnnnnnnnnnnnnnttattattattattattaaagttagtttcatattagagaattatgcccctaaataacttccgtccacatcaagtgtctgtttaaaaaaaataaatggaattaaatggaaatctttgatacaacaatttcaataatttgaagaaaatttttaacagcctaaaaagtttggtgagaacgatttggtacatgtctggaggagaattctaagtagcctttttattattatgacatattcttaaaagttgtattatattagagaaagcaataaaattattatcttgtaagttgtgttgctgatatacccaatgaaaaacacagcacttggtttttaacaaattgtgtgacataaagaatataataactatcatgactcaaagtggaaaaacttctttttttagaatgttaactaatgggcttaatggggctagtcatgacaattggtttattaagatgggaccatataacattattggtttagttccataattgaatggaatgatttgtgtgttgtgtaccaccaattactcaactgttttctccttgaatttggaggaaaaggaatataagttagaattaataataccagtaccatgttagcagaaattgtaagtcaatcttcatccaattccacttttgtgatgctttgaatcttagttgttctctccaatcaattctcttgagaccatcttttcctaaactaactatgagctttctcattcttaattctcccacaaaacttgagagctaatgaaccagaataagttacaccttccttcaattttcttacaatgcagcaaagcatgattattgatctcaaaatgacagaggaatccaatctaaacaagcttgtcttgccacatgaacattttaacaacaataaaataaactttcataagtattcaaatgccaaatatatatttatgccactaacaaattgcataattatcagtaatttcagatttgatca

SEQ ID NO: 36252 - DNA, 6055 bp, Cannabis sativa
  modified_base (5989)..(6029): a, c, t, g, unknown or other
aatcagattagattgaaatgggttttatttagggcataaaatcccaacattaagagcaaagggctgatttatagtgctcccaaattgtggaataacaacacttcagctagaggctcccataaatgtgtttaatgactgagcaacaacattactcctcgtctgtggttgatgtggagcaaatctgttcacttaagattcaacagatggtgtttgttcgccagacgacatctcaccgtgggtaggtggctctaataccaagttaaataatgaatggaaaaggtattgaataaggatttactcaaggattctgaggcaaattttatttcatttatagaccaattgtacaattacaagaatactctagaatggtgatagcacaccaacatatttgttacacaaaagacaagagagagtgatattcccttaacaatacaaaatacaaattagagggaaatcattcaccaaaagctgacgtagggaatgatggagcagaggaaaaacagagtgctgacatggatttgaaggagctgagtaagcatgactgagtaggatcatttctttacagaaaggagacatattttgatgtgctacacctatgtaagtattctatactatatttatgttataggaaattaatatttaatattcatgaaaaataaaatcgatcatattaagtatattttatcaacagttgatgatgagaatagaaatataaaaaataaaagaatatagctgtcatgagtataaaatgtgtcttaagatatataattctaaatcaattataaaaaaagtaacttcaatataaataaacccaacctcaatatatactactaattaggttacagattttagtaaggaaataatactactaaataaatttgagaataccatactccaagattttacccgtcgttactttttgatctgttacttaattgattctacttccgctgataattaatcaaaacaatatgtcatataataatttgatctccaagcacacattaattaaatatttaaacctctaatttaaataattatttacttacataatatttatattcaactatataatagtatagttctaattaatcccacaaatttaataaagtctactaattattctaaatttataattagagaaactgaaatattacaagtactgcaagcctaatttgtttatacacaagaggattcaaccttgtaactaaatattatcttttgtcatcatatgatttttctatcaatataacgagtacattctcgtatataaaagacacatgaatttgtacttacaaaagcaagtataatatgttaatagggacaaccccgataaataataggtatccttgcatgataaaaacatacgagaagtttagcagttgagacctggtcaagccgcacattacctcacgtactaatagtataaaagcactgcctcaacactcaagaatagagtgggctgaggtatcggggagcctggtattgaactttcctagaggcactttttctcgctttctctctctttacggtgcttcaccggagctatggcaaaaagggggaaaatggccagaaaagggaatcctaaggggaagaaaaccgatccttcatcttcgaatagggtcatcaagaccagatacatggatgcggtgtcggtgtgtaggaaatagagatagcagagaaagctatttcaatggaatagtgtgtggaaccaatggaacagtgctacgagccaatagaacaatatgtaaagaagatctattcacctgaggaaactgaagccattttcaagtgaagaagtgagattaggcatgatttcttagactggctaagtgttgctaatcaaaatcttaggaatcagttcaaggaagaatccttctccccttatactcaaatctggaatcattcataacttagagaatagcttcgcgagctctgaaaaacatgtcgagttaaactcatctgcaacttcaaaagttaagattcattttactgatattgaagaggaggtgaactattggcaatcttatctagtgtgactatgtaattggagctaatcctccaatctccacactcgaagggtttgcaaggagattatggaaggaaatggttgttaaggtgggattacttgctaaaggaatctttataataagatttcagaatttggaacaaagagataaagtaatgcaacagggctatgtgttctctgataggaaaccaatggttatgaaaccatagaatcctattgatgactttactaaagaagaggtaacatctgtgccaacttggatacaattgaagggtctggacataaagtactggggagagtcttctcttttcaaaattgtggcacaatttggggagccttttcaagttcatgagattacaaggaacagagatcgatgacaatatcccatgattttgattcaggttagtttggctcagacttttcctaataaaatttcctttatcgatgaacatgatcatgaggtggaattagaggttcagtatgaatggatacctttggtatgctacaagtgctcagggattggccacagtacagacaattatagaagcaagagagtaaaaatgagcaggggaagcaagtttgggtgcctaagaagcagccgacatttaaggagattgaaactgatgctgatggatttcaaaaagttgtgaagggtaaacaagtgaaagtggagaaggaacatggagaaactgatgtgcacaacagatttcaaatcttggacaatgagaatgaacaaggaataatatacaacatgggagaggggggagatccctctactttcaatggatcgattcctatgtttgaatgtaagggtgattaagaaccaccaaaaacacaatgaaattagaaatttaattttctcaaagcagtggggttggttagcctcctagaaactaaagtgcagaataagaatatgggtaaactttatagtagtctatttcaaggatggtgtttcactaataataacccttggctggataaagggagaataattgttgcttggtagcccaattcaacttattcattgttttgttctttcaaagcaacaagtggggaaatttcatgttacttttgtgtatggattcaatgatgaaaaaagaagagaggaattatgggctgatttggagggcttagcagagaaaattaaagaatcatgtctggtgatgggtgatttttataagatactctttgcaaacgaaagagttggcaggaaagctcatgctttgccttctcaaagtttcaaggactgtgttgtgcaatgcagtctagaggatgtgaaatattcaggtgcttttctcacttggaataacaaacagaagccagatgagagaatttattcaaaaattgatcgtgctatgatcaatccttcttggatgaattcttttccaagcttagaggctgtttttctgcttgagatgtcatttgatcaccgccatatactggtgtctatttacaaaaacaacaatacaggtaaaaagcccttcaggtacatcaacatatggaaactgaatcctcaatttgaaagcatggttgttgattcttggagaattggggtcctgggatctagaatgtatcaagttgttgtcaagttgagaagactcaaggaagtactgaagaagttaaatagagaagggttctctgagatccataaagcagatgctctggctagtttagctctttctgatataaaactagattgaacaaagaccctttgaatatggaattgatgaaggaggaacaaaaagcaaatcagcactatatagaggtacataaggctttctctcttttcattgcatagaaagttaaggtaaactgggctaagtatggagatgagattcagcaatgtttcatgcttcattgaaatttagaataattcacaacaaaattttctccatagaagatgaagctgggaactggagagacagtccagaaggggtacaaaaagctttcttggattattatctgggtctattggggactttgcctaatagaaggcaagtgcaccaatctgtgatggatattgggccaaaactcaatgacactcatagaggaatcatatatacaccttactctgtagatgaggtgaaagaagttgtgttttctatgcctgggaactaggctcgagggcctgatggctttaggagtactttcttccaggattgttggcaaactgttggtgttgatattgaagaggttgtattatcattcctgaattctgggaaaattcttaaagaaataaatgccactacaatgactctcatccccaaaactgtatgccctgagagtatggttaatttttgacttatctcatgttgcaatgttttgtataaaattgctactaatgtgatctgcaatagactaaggagagttcttcctaaccttattgcagaaaaccaaggtggctttgcatgggagatatatagcacataatatcttagtgtgccaagacttggtaagattgtatggaaggaaaaattgcaagcctagcagtatgataaagattgacttaaggaaggcctatgacaccattgaatgagattttttagaggagatgttaaatgcttttggctttcctaatcagttcatacaattagttatgtgttgtattaggactccaaagttctctctcctcattaatggttcaatgtgtggtttctttgaagcaaagagagggttgaaacaaggagatcccatgccccccttctttttgttctaggcatggaatatttctctagaatcttcaagaagattggggattggcccggattcaaattccatgacagatgtgcatctctcagattgaatcacttatgctttgtagatgatttgttggttttctgcaatggtgatttcatctcagtcatgcttatgcttaaaggtctgaaattattttcttcaacttctggtttggtgcctaatgctcaaaaaactactgtgtactgttctgggatgctagaattggaagttaacaggatcttagaggcatctagtttctctagaagtacattgcgtttcaggtacctgggaattcctatttgctctaaaagattatcaagaatggagtgccaagggctgcttgagaaaatgacaggtagaatttgaatgtagagcaccaaaaatctgtcctatatggggaaaacaacattaattaactcaatgcttttggccattcatacatatgcattttgccaaagaagctattgaagcgatttgcagatcctttctatggaaaggtattcaagagagtgcaggttctggtttggtagcctgggagagaatttgtcaaccaaaaaatgctggaggacttggatttaggaacattaaaaattggaatatttcagcaatgtgaaggtatgtttgggatattgctagcaagaaggattgtttatttgttaagtggatccataatgtgtatttaaaagatgcaaattggtgggattatgatacaccttctgattgctgctggtcatggaggaaaattgtaggagtgaaggacaagttgaaatagaatatagatgttcctggttttgtgcagcagaagtataaaatacagcagggttaccagctcctatttgctagcaatgagagattgttctggtctaagacagtttgggatagattgatcattcccaagcacaagtttactatatggattgtgttttgggaaagattaaacaccaaagagaggataagcaaatataatacaagcatagatatgacatgcttgttatgtgggcaagggagagaatcgatcaaccacctattttttgacaacaaatattaaatccaagctacagtggggattgaggacaacaaatatgcagtatttagtgagaaatatcagcagaaacaaagcatttttgaatgctaggaagagcatactgagaacaatcattgcatggctggtttatcacatatggagggctaggaatgaagtccttgttgggttttgtgccctannnnnnnnnnnnnnnnnnnnnnnnnnnnnnnnnnnnnnnnnaagatcagaaataacattttatgtag

SEQ ID NO: 36253 - DNA, 3216 bp, Cannabis sativa
taattatttcaagattaatcccacaagcccatatatatcagcaaaaattactttttctacttgatatatattttttctctcataatattataatggacatgtcgattaaaatcgttagataatgattagcaagagagaaaaaacagctgcagctttaccctgaaaaatcaactcatattttggattttacagtatcgccctaagctctaaattaggcaacaatgtaacactaaaataataaagatctccgtaaatatattaaatacatattatataataaagtacaggtcaaacctgcattgctcaaattttgagtcccattttcaatttcatgtaagatttcaggacagacaagaccggcctgctgtacacaaacaattatcttttataagcaagaatagagatgaatgtaatgggttcaaaaagagatatttgacccaacattgcctctactgtaacaaatttgaataagaaaccccccaagaaaatcttgatgccatattcaaaatattgcaagggttttctaactatacttgcactagacactgtaattaccttgtccatcacggccacattgccgccactggactggactcctgaatccacttctgtaatgaaatgtgcatcggttaccaaaaaaattgtcctgatttcatcgcccgacctctcccagcattactatgacagtaagaggttggcatttgcatgatagtccaacaaaatcagggagaagacaaaaatgatgtttggtaagccacagcacaatatttggacaaccaagtggagcggactctcaggagcattaacggtcatcctacagaactgcacttgcactttcaagtcaaatatcaaatcctggcaatgcaaactgacttgcaaatgattcaacacgatgccgaagctccataatgtccttgttgttttccagagctttcaggaaagctcttggaaattttccgtgttctctctgtgccacactagctatatgtgcagctttaaggagaaactctgctactgtctcgaaatcagactccaaacaccctcttgatgtcatagcaggggtacctaacgtgattgaacaatacgttaatattatattcaaatccttatcctgcaggagacatgaatctgtagtgatgtccacaagaatcagggaaaaaaaagacaatcttaaaaacttaattggcaacttataattagtgttgtatatcacttaccgacccttactccaccaggtgaaattgttccattgtcactagaaattgtaatcttattaagggtaatgtggcacatttcgcagaccttttcataggtcttacctgtagaaaattttgaagaaacagaaatcagtatgttacaatcatgtaaagaacatactcaatcaatgtaactctgaaatcagtatgttacactcaagtatagaagatgaaaaaaggggaaaagtcagaaaggaaaatagtacaagtatcagaaatagatggagcagacaggtctttgaaggtaaaacacacacaccatctctacataaaataataattgtttatgaacaaaagagaaaaaagaagtgttaaaataagcagtcaattttcataccacagttgattctgtatcaaagtaatatgtatcaaaattggccaaaaatcaagcactgctataaggcaccatatgatgcccagcaccttgaggtggcatgtgatacgtaactaaattaaattgtgttaatattttagattataatgtgtaaaacatagtttaaataaccactcatgacatgccaactcaaatggtattgtgcaccatatggtgtcacactatattaaccttaaaacaattacacgtccacgttaattgtgggaggtagacattcactttatttttaccaaaattcttatctcaatcaagaataaaaaataaataaaataaaaacatctaaatatgtaaatttagcataatcctaaaacaagaacatatttgtccttgaagtttcctctagtggatcttatcttagacatttgaataattgtaatctcatgttaggatcccacactgactgcgtatggaattggttggtggtaaataactactagagcaccctcctcttaggttagcttttgggagtaagttctacccgagtggttgtaacaaatggtatgaatcatgcaccctcaagtgggaccaacgtcgcaaaaagggcaacctttggaaaaagcccaaagtgggccactgtggacgtcggctctaaaggggagtatactattaggatcccacatcaactaagtatgggattggttggtagtatatatataactacttgggcaacctccctcttaggctagccttaaggagtgaggtatgcccaagtggttgtaacaactcgattttaatatcaacattatttgttcattatggatacaatgattaggtagttcaaatattggattggcttagggtattagaaagattacttggtaattgtatcgcatgctaaaaaaaccaagacacaacttatgaatctatctccatactagtatgtgatacaccattgcagcaatggttgaatggttcatgaaatcactgatcaattgttaatgcactgtcttgcgttaaagctttagctgatgatactgaaagagttgaaacttgaaaacagtgtagcagtgaggattttacatatgttaagctcttcttttgtctagctttttaggggcttaaaagattcaaagagctgtatcttgttcgttgtggagtgttttcatggatttcttactcaaatcgaattagggccttaacttttccattgaattcacactgatctaagtgtatttggtggaatttacattctatatttttttttttttgaaagaacttacgagtctttccatatttctgtgttttttacccccatcattttgataattgtgcaattgatgaaagttttacataatatgtcttccaaagaacctgtgagtctttcccatatttctacattttctgtgaattttttactgacaaaagctttgtttcttgcattctaagagtagaagttaaaggtaagcatctggtcgaaacaatatcaactagtcttatcccttacttgtgttttttttaatactaaaatccaaagggaaagtagttgaacttaaagaacttagatggcgtttggttggaggtaatgaaatggaatggaatgggaaggaaacaatttttattccattc

SEQ ID NO: 36254 - DNA, 7229 bp, Cannabis sativa
acgtgggccactaaaaatttgctacgtgtacaagtgtgtacacgtggtcagtccactggcatttaattgtgatttttagacggaagtgtagagagcaaaacagaatgagagtataggtagttttgctcattaaaaaattaatttttgtggttaagttttataaaatttaaagtttaggtggtttaaccgttaatatttttttttattattttttttttgtatatctaaataatttttttttttttttaaaacaaaacaagtgggcccaacgcccaaatccggaagtgaaaacatacgattcgaccacggacctgaatcctgatcggtaactgaatagttgccgatgccgatagtttcacgttatctatttatttatttattatatatgataaattattaaaaaatagtctctttcttctttcttcttcttcttcttcttcttacagggagggacacatggagcttctgtgtatacactgaaacgacaaggatagaagaaaccattctcacttctttttttcttctagccctaaatttttatcatattatatcgagagaattttctttggttctcgctaatggcgctctcggaggaggaatgctcttccgccaaatcccgatcgtcatcttccgcggcctcttccaccagcaatcactacctcgccaagtgcgtccttagaggaagtgtcgttcttcaagtcgtctatggtcgaatccgctctcctacctcactcgacgtcgttttcggcaaggtcattctcttcttccatttcctcattttctcttcttcttcaatcttgatttgtgatctttcttcttcttgttcttattgcattgttggagtataaatcgagtatctgaaatgaataaatggatatcagtgttttcactgagattaggaactttttaattgccaatatggtatagaaagttcttgccttttctttgcggattgatcttcacacatagctatggatttaattcatatgccttggagctgcctttgtgtaattctgtattttcatgtatgttttcataactagctacggagtttttttttttagctgaacagtggggtacttgtttacaaaaattgattcaggagacttctatagaacttgttgtaataggcgaagatgggatagtgcaatctgtgagcgagcaacctgtgtttggcaccattaaagaccttgccgttctgccctggaaagacaagttttcgcctcagaatccgcaggtttggattatttcaactatatatggccatagtagtttgaaagagatatttgtgtacatcataataagttcttattggcagaagcttttaccttcccttgtgaagatcataattatcccttttcttgttgtagatgctaggtaaagattttttactagttctttctgattctgggaagctctcggttctatctttttgtaatgaaatgcacaggtaatttttttttcttacttatttcttcatgttgttgtcttggtgaataactatttttgaactgattcttggtctgtatggtatgtgtgactgttcgaatagattcttcccagtgacgcaagttcacctttcaaatcctggaaatttgagggatcaactcggaagattgcttgctgttgattccaggtgcaccactactctgcttattggatatttgtaaatgcttagagcatctccaatagctaaagttaaaatagagagccaattttattattgttgctccaactatggtctttactataattagtctttgattattttaataatattttataatttaaatttgtcaaatataaattaatattataaaataatggaaaaataatattgcttttaattaaaatactattaaaaaagtttagcaaaaaagtagcgagctccctctctctatccattctctattatagagagccattttttgtatggttgtagcttattttttcaagtctaactcgctattttaactaaagagtgtgtttagagagcatggttggagatggttgtgattatagtgtagtttaatcatatatacattttttttaacatttctttcaaatgtttgtccaatgccattatttatagaaattaatcaggtcgatttgagttcatgaactgattttgtaattgagagatatatctttgtcttgtaatttttagttgaggtggacttcctgtttcccttctcacactaaactattatattcataatatattcctttcacaactaaaagaaaagaaggataggaaagacaatgaaaatttgaggagtttttgttgtccttattatttatttttttattttactttacagtggatctttcattgctgcaagtgcctatgaagatcgattggctatgttctctgtttcagtatctgcaggctgtgatatcattgataaggttagttttttttttctcccactctttaaattttccaactactgtcttcttgtaaagagtgaacagttcctagcttccgcaattatttgtgataacgtgctccactcccttcattttcttgaaaacaaagttttcaaacaacaagattattaagttatgttaagctgttatttcagaaaataatttatcctcctgaaaatggaggagatgtaagcacagctagaagcattcaaaagaacaatataagcggtaccatatggggaatgtgctttatttcaaaagatccttatcagccaagtaaggggcataatcctgtacttgccgttcttttgaataggtattgcattgacgagtatttatgctattctctatggttgagcttttcttagtataaattctctcttttgtttatgtttatctaatttgaaaatatatataggagaaatgcagtccttaatgagcttctgttattggaatggaacattagagatgatgatgtttctttgttatcgcaatttgttgaagatggacctttggcatacgacattgttgaagttcctcattcctatggatatgccatcatgttcagggtgggtgatgcactcttaatggatcttagagatgctcttacaccctgttgtgtctatcgaacaaacttaaatttcttaccccatgcaattgaggagcagaatttcagtgaagagtcaatcagggcacaacatgatgttgatgatgaaggtttgtttaatgttgctgcctgtgctttgctggagcttcgggattatgatcctatgtgtatagatagtgacaatagcaatataaagattagctacaaacatgcatgttcgtggagttgggaaccaggaaatactaaaaatccgagaatgatcttttgtctagacactggagaattttttctaattcaacttggcttcgatttgggtggtcttagggttactcaatctgactgtctttacaaaggattacaatcaaaggcgcttttatgggttgaaggtggctttcttgctgctcttgttgagatgggggatggaatggttttgaaattggaagatgaaaagctgattcacaacagtcctattcaaaacattgcgccagtactggatatgtcaattgtagattaccatgatgagaaacatgatcaaatttttgcctgttgtggagtggtgccagagggttcgctaaggattattcaaagtggtattagtgtagaaaagctacttaggacagctcctatctatcaaggcataactggtacctggacagttcgaatgaaagttactgatttgtaccattcttttcttgttctgtcatttgttgaagagaccagggtattatcagttggtttaagctttactgatgtgactgattcagttggtttccaaccagatgtttgtactttggcatgcggccttttgaacgatggattgctgatccagattcatcagcatgcagtaagaatttgtttgcccaccaaagttgcccactgtgatggagtctctttgccttctccagtttgtaagtcttggttccctgaaaatatgaatatcaatttgggggctgttggagaaaatttaatagttgtctctacttccaacccttgtcttctatttattcttggggtcagaatgatatcagaatacaactatgaaatatatgaaatgcaacatctgaaactgaaatatgagttatcatgcatttccattcctcaaaagagttttgagcgcaaaagcacaaatcatcccatggacgtgggagatgagagttgtgtggcttctctttcaactgaagttgacatcagtaaatcttttgttgttggcacacataagccttcagtggaagttttgctttttgatcctgatgacggcctaagacatcttgcaattggaacgattgcacttacaaatataacgggaactactgtcagtggttgtgttcctcaagatgtaaggcttgtatttgttgatcggttttatgtcctttgtggacttagaaacgggatgctgcttcgatttgagtggcccattgcctcttcagttccaacatctgtattacccgactcttttgtttcagtggatatagattctgatttttctagcatgtcagcaccaaatagttttggtttacaaagcaattatattgaattatctgagaagacagtgagcggggttccgattgatcttcagttgattgccattcgccgcattggcattacccctgttttcctaattcccttgagtggctcgcttaatgctgatataattgctctgagtgacagaccttggttgttgcacactgcaaggcatagtctctcttatacatctatttcatttcaatcttcaacacatgtaactcctgtatgctctgttgattgccctaagggtcttttgtttgtagcagagaacagtctacatttggtaagaaatctaatccattttattatgtgatgatgtggatattttgctttctttatcattgatagctggtactttctctgtttgttgaaaagtttgtttccattgaacagatgttttatagattgagcatcgaatatcatgctatcttcaactgctacaaaaattaattattcatttagtttctaaagagagcaatttagttggtttcatggtttattttctgctctggtatatgctcttggacggtcttttgtttttcctcttttggtttctcagttttatttctttcccttttgtggtggttactctgtaggttccttaagtttctggtgaatgtagaggtcaattggaaatttttgcaaatatgtaaactaaattgttatggtgttaacaaatatctaagttaactacttaatgatgtaagtactgtagttaccgatattattgtacaattaaaattgcggcatttcttactcttgctatcacgtatccagatttactgtgttcgagttatggactcatttcaagaaccaagttctgtactttttcctggatacctatagtggctgtttagttgaaggagtatattataggaactagaagttgatgatttagcaaccctttttcctgttttaagacttacttgttacttaagctgataaatgtctgcatcttgtgattctttaggtggagatgattcatagtaagaggcttaatgtgcagaaattcaatcttggaggcactcctcggaaggtcctatatcatagtgaaagcaggttattgcttgtgatgaggactgatttaccatatgattcatgttcatctgatatatgttgtgtggatcctattagtggggcagtaatctcatcttttaaatttgagcatggagaaacagggaaatcaatgcagttagtaagggcagggaatgagcaggtcattgttgtcggaaccagtctatcttctggtccagccataatgcccagtggcgaggctgaaaggtgtaccattttccccctacttttccatttactttctctgcttgttccacgttgcatcacgaaaatgcttcacacattaagacttgttatttttcttaatgaagttaacttttcaggaattaatttgggactatacaggcattcttttataacttacatgtttgtttggattttatatccccccttttgtgtatagttccaaggaaatgtcatcctaacttgacttttctgaacagtacgaagggccgtcttattgttctgtgtcttgaacatgcgcagaactcagatagtggttcaatgactttctgttcaaaggcagggtcatcttctcaaagagcttcaccatttcgtgaagttgttgcatatgctacagaacagctatctagcagtagcctgtgcagtagcccagatgataatagctccgatggaattaaacttgaggaaactgaagcatggcagttacggttgtcatattcacttgcatggcctggaatggcacttgctatctgcccttatcttgagcgttattttttggcatctgccggtaatattgtaagtcactaaactctttcgttcttttaacttttctgttttttaaacgtgcaatttagcatatatgatggcaagtgcaaacgttctcacatcagatactaggatgagtgtggttttctgtgcaatttattggtgataaaaatatattaactgctctattatttcagttttatgtatgtgggttttcaaatgacaatacccgagtgaaaaaatatgcgatggggaggacaaggtttatgattacgtctctaacggcacacttcacaagaattgctgttggtgattgtcgtgatggagtcctctttttttcttatcaagaagtaagtggaaaatttattttgccaataaatttttgtttttattggatggattatctccttgccttctttcttagtttcttcagtcctccacacttctattcttagaaggtgctctcttgtttcctacctgaatataacaggatttagcctgcttgttatgcaatacttgtgttgagagtgctgcttctctttcttgtatggcaggatactaaaaaactggagcaactttactgtgatccatcccaaagactagttgctgattgtattctcaaggatgttgatactgctgttgtgtcagatcgtaagggcagcattgctgttctatcatgcacagatcacttagaaggtattagagccttgtaagcaattgcttcattttatggaaattatggaacttaaaattactataatgtttgaaaatgaggcagtaacgtcgacgacacttagaagtttgaccttagttatcaaatttaggcatcagctcataaaagttggtaattattaggcatcagctc

SEQ ID NO: 36255 - DNA, 7702 bp, Cannabis sativa
acatacatattacaaccaattaccctttaatatttagggtgtccaccgataggcccaattttagggtgtctattgtagaattacccaatatcttatattcttactcaatggtaaaattgcgagttatgtcaagccaactgaaaaccttcgatagggggctctctttttccatatctcttcttaatttgatttgaaggactttcgagattgttacaaaatgaagaagcaataggaaatcttcaaagtctacgtcttactagaagagcaccttcaatttcacacttattttttttttgttgatgatagtctgttgttctgtgagaccacgaacacatttgctttggcaattaaaagagctttgaacgtatatcactgagcttcaagacaaatgcttaaaaaccaaaaattgattatgtcattttcgccaaatactctaattgcagagcaaaatttcttctatctggctttaaatatgcgaattagtgagtgacatgagtgttatctcaaacttccttcttactcagaccgagacaaaaaggagttgtttagtaacatcaaagggtgtgtttggaagttgatgcatgcttggaatgaaaaattttctccattggtggaaaagaaattttacttataggagttgttcaatcaatcccaacttatgctatgagttgttttcgcttaacaaagaccttctgtcaacaattggaaagcgtgatggcgaatttctagtgggatgtcagtttgatattctgttttaccacgcgtgtttaaaaaacttcaaacctatgtgcaattttgtaaactattcaatttttttaaaaaatttataggaataatgttgcaagtgtaacgaacactgccatgaaattatttttgaaaaaaaatattccaacgtatattttcaagcacataaactgcctaaaaaattatattaggagattgacaatgacactcctcaaataatattcactcacataaataaaaatagaataataatatatatttttggatacttctacaatgcacccataaaagggataccgatacactcctatctattttcacatttgagagaattttttagtctaatcttttttatgattgtctatgttatagttctttaagacatcctgcaaaaatttgaaagatttaaacagtctattgctcgcgagacttttattttatacgcatataaaatagattgtttgaaccctattttcgacgtattaaatttttctgaatttcttaaaattttatataatctcctaaataattataaactaggtaaatatgaaaaaaaaaaattgtcatgtactttgaaatgtactaaatcatgccttctaaactttgaagaccgttaaaaattcctcttgaactattgagattgttgtatttaaggacttttgtctaattttagtaagaaaagtctaacatggatgaaagtttaggggcaagatttgacacatgtctaactttgatgggtataatttgataaatatcaaagtatgaagagcatgatttaatacatagacaaccgaagtagtaaaactgaatgaaattggacaaaaatccttaaatccaacaatctcaataattcaggaagaatttttaatgagcaaaaaaaatcaaaaagaatgatttaataaatgtccaaattaggataaaaatcttaattagcctaaataaaaaatgcatccataaattttaaagattgtctaatttttctataaaggaaatggaggttttttttgttgaaatttagaaatagtaccattacctatgggcaaaacagtcatttcaggttatatttacaccaaaggaaaaggaattaaaaaaagaaaagaaaaagaatgcaggtattatgagccaatggattcacagtcacggatttcatagaagtgccgttgtttagagagagagagagagagagctctttcgtcgttttctgaagctcatctcagtcttcaccaacttcctttaaaaaccccccactcttcacttcttcttctctaacaatcaaacccctttttctctttttctctctctgtattctcgccattgaagaacctcaataactttcttgttcttcaataataataataataagaagaaagaacaatacgatatggaccccatttcaaactcaagaagaccttgtttcatcgaagaagatgatggtttggcttctctagctgatatggaagctgggttttccggtaatcaccaccccttttactctagacccctttgttcatccaggaagagtagtttcaggagcctttccatgccttcttcttcttcgttttcacccagatctggaaggttttatgatgccagattcgaagaacctcaaccccatttcttggaagcatgttttctctgcaagaaacatctcggtgataacagagatatcttcatgtacaggtcagttccattcagatttctcccaaatctcgattttagatctaatcggattgatttgggtatctagattagtatttctcaaaagggtatttcgtttaatagctgaataatgcgaatgagaaagtttgataaaagaggaaattttcttgctttttctcgggaaacaaacaggggatagtataattgtttttattttttttttctaattatgttttgattatagagcaatgattctgatatgggttttgtttatttttttgattattatcagaggtgacacaccattctgtagcgaagagtgtagagctgaacagatcgaaatagacgaagctaaagagaaaaaccgtaacttttcttccattaaagctttgagaaaaaaagagcagagaaaatcttcttcatccccaaacaaaaacagggattaccctttccgtacagggacagttgcagcagcctaaatctgattctaaagagaaaaatagcaaaagtataataataatcataataataatcataatagtaataataatatatacccggaaaaggaaaaaagaagacacaagacttaaacttgttgtgtttttttggttcaaattttccattaagaacagggccaaggagagaaaatgaagaagaagatgaagaagaacatgaagatgactgtgttgatagatgaaaatgaatcttgatgattaagaagaagaaagaaagaaagagttttggtttatgttaggtttgaatgtgtttttgtatagagggttgttgacaagtgtgattttattactttgatctgctctatgagatggctcttcttttggggtcttttcccctctttttcttttttttctttttttgtttgttaattttcttttgtaatgatataacaaaagcttcatcagcctttaatggcggaagctcaagatgaaatgaatagcaaagcaaagtttcatgttctttccttctttctttcttctccttgtattaaatttctattggtaatagaatattgggctcttatgctattttattatggtcaaggtcaataattatgaatcaaatagttttgggcaattttgaggcaattctggttaaggatttcaaggataaaatttcagttatttgtgctttttattttacaagatagaatcttgagatggagaagtaaaagagttcactcttagttttaattaaatggtcaataaaataaaataaaaagataatatagaacttaattatgaagaattttttatgaagagcttgagttttaaattgttttaagattgagtttgaagttagttcagtggggattgctttcaagatttgtttttctaagcactagatgttaaataatatgcttgcaaatatcttcactcaaaatataaatgaaagatgcaaaggaagcattgctgccttacagctaatgaatattaatagttcttttttaaaatgtaaaagtgagagaaaaaaaattaaacatgattataaaaatgagttttaaataaaaatatgattctaatatataaacgcttaaatgaaaaaaaaaaaaaaattatattgtatctttctatactataaattttttatatgaatattttattaaatatgttttagagtgtaaacaggagttttattttttttttgaaaaatatatatatatatatgtatgtttataaaatattttttttttgttttttttaagttttttaacaataattaatcaatctataaaatttaatatttttttatatatataattttatttttaacaatacaaacaacaattctaccaaaattttatttcttacattatttatttatttattttgttgagaaaaaaacatctttcaaaatactaagctctaaagaaaggggatgaggactgaaatttattcatcaatggactcaaccaaaattaagattagaatacataaagaataaccaagccaccacacaatattaaggtgtgagttatctcattaataactctagaaaaattgttggaacttcgtttgcgacattgttcgtgactcagccaaattattctatcggtaattcattctagattcattgtctttaatttcggtatattaaaaataaataatatgagcattttgaaaacaagaaaaactaacaaaaatattttgtaaaattagatccaaaaaattatctaatgcaatataattattaatttttttgcattgtactcagacaatttgatttttttcgtgtgtgatttttttttattcctatttgattttttaaaatggggatttcaattataagaatgactcccctaattaatatacattccattttaatttaaataaataaaaaaaggttaaaatttaaaaaactataattacaacttttttttttacaaactataattactacttttccataataaaaatcatacatctcaaactttctttctttctttttccttctttgaaatgctactctaaattatattagaaaattccattttgtgatgataagtgtaatgaggatattggatttggctagatttgcttaagtggaggattgattttggattagcaaagagtaaatgctacacgtgttatctttctctctctcttttatgttttcttcttttatattccatttagtaagatttccttctctctctcttttttttttttttaataaaaaagaaaaattaaaatgggacaagaaccatcaatgcagttcataaacttggtccaatttctgtacatagatagtagcaaacaatattagggagttgcaacagctatatcaatgttgtaagagaactttgaaaaaaaaataaaaaatgctaagagtacttacaattcatgaactaaaaatagataataataattccattatgtactccacttaaaatagcttaattaaaattatacattatgaataatatttctttatcctttaaataattttttaatagtttctctctccattttctattttctttttataatgtttttaactttttatttatatagataaaatattaaatgatattaaaaaaaaattgatatatgatgtaatataaaagtgtcaagtaaactagaaaaaaatagaattttagtgtttgaagaataatagagtaaaaaagctcatgaagtgctctaaaaattttgaaaaaaacttagtgaaaaaatataatttgataaaaaaaaatatgtatatatataaaattttataggggcgtaaaattatttggtataaaatataattttgtgatgtatttatattaaattttaatattgtatactttaatgtataattataaaatttgatgaattaatattttttattaaagatataaaaaataataaaaataaatgtaaaaaaaattataatttaatattataactaaatataataatgaaatccttttaaaaaatatataataatgaaataagataaataggataaatataaataaaaaaataattaattttatcatataaaacaataaaaataaatgtaaaaggtttataatttaatattatacataaatataataatgaaataagataaataaaataaatataaatgaaaaaaagtgcattttcccacgaagagagctctattggttcataccctcatataattgcaaaaagcaaatatttaatattgttctaaaaattaaataatatatttttcttgcaaggttaattaaataatatttttaatatgccaaatttacattgtatcaacaaatttgcattgtatcaattaacgttgtactttacctaaaaaaaactaaggttgtaaaaaacttgtaattagtaaatagaattaaatacttcgaggaacaagttaaataaataaaaaaaaaccttgacaataggctttgatccaatattatatacctgatattttttaagttttaatttttttcaattaagtttttttcttcaattggtgctattctaatgtttttgttttggtccaagtaaacaataagagaagttggttttttaaattaaaaaaaattataaaaaaaatgagagaaatttattgagttcttaatataaaatatgatttaagttctgatcttttgcccacagaagctggaaagtgatgccttaattgattcagttttttaaaattttgattagtcatgctaattgtaatttaattatgtcactatattttcgaaatataaaattaaggtgtggtccaaaataataaggtggtcaccgtgatttttttttttctaaaaaaaatcatataatacttcttagcttatttattaattagtttaatattttaaaatgttttgagtgaaaatcaacatacaaatatataaaatatctcaatcgatatcattggttggacctatacctattaacaagaataaactaaaaacaacataatatctctcatggcctcctaatttgaaaaataggaataaataacatttaattgacttagttttttatgtaaaaaatccatatttggattaaataataattatttggtctttttttaaaaaaaataattattaagagtggacatgcaatttaatacaattttattaaacacattcgatccaaatcttattgcaattcacacactcctcctatactatctcagcatgacctcagttaatattatagtgagatttcctaacatgaacacttaatattgttgttcttaattcttatatatgtacccatttttatagcatgaaatcttcatttagatgtttgacaacttgaggagtgttacggttaatctcctattacaacctcttagtcaattttatgtccgaaaatacgtgttggaatatttttttcaattttttttttcacgggggtgtttgttatacttacaatattatacctgtaaatttttgaatagtttatagtgccgaaaatatgtttgaagttttttgatcgcgcgtggtaaactagaatatcaagaactctgttttcaatactataaattattcgaaattttttaaaaatttacagaaatgatatgtaactataacaaatatcgctatgaaaaaaaaattgaaaaaaaatatttcggcatgtgatttcaaacgtaaagattgactaaaacattataataggaggttgtaattagcactcctaacttttgtttttttgtttttttaacaatattttacatgcattaatagtatgcggattctatctcagatacataatgtaattttatatatggagaggagaggtaaaaggacaattaatttataacatttgtttgtattttggtccaaaaattaagataaata

SEQ ID NO: 36256 - DNA, 10918 bp, Cannabis sativa
atgcaagcttcaaagctcttcatgttttttgagttattttgtctcatatcttttatttcttcagatggcacctccaccagttcctggttccatgcagccgccccgaatgtatccaaatcaatccatgactacaatacaatctggcatcggtcaaacaggagctcctgttgctggatcaactaaaattgaccctaatcaaattccaaggcccttgccaagctcttcaattatccagcatgtaactcgtcatggaaatcaggccaattgtcctccggtgcttatccttaccatattacttttggtttttgaaattgcaggcaatctttctgattgttatttgtgctcttctgactgactgcttttaattttcttaaagcctgctacaagtgattacgttgttaatgacaatggaaactgtagtccacgttacatgaggtgcaccataaatcaggttagattttgattttattgtattgaagttagctttgccagtcaatcttcaaccttgattggtttatttattcttttttttttattgtaattcatttttcccaaacattgacagataccatgcactgctgaccttttgacaacgtcagggatgcctttagctttgctggtccaacctcttgcacttcctcacccatcagaggaaccgatacatgtaaaccttttgtctttgaagtgttttactagttgctattgcagacagatacaataatttgtaatatattatcagttttttatttgaagaaaattgatttgttaaattaattattgatcatcatggaacctatatggaatttaaagctgagggcaacaatagcatggagatagtttctttttgggttgaattatattctgtgacatgtaattgccattacagcccattattccaacaccaacaattagacctttcgttgatatagatttcaagtcctaatccaaatttttgtgttatgaaaaatactggaaagtaatggacaaggaatgaaattcccccattcatccaacatgaaattgatactattgaattttgacttgagtgtaaatgtgctgattatgctgtgttataggttgtggactttggtgaaagtggtccagttcgatgttctcgctgcaaaggctacataaatcctttcatgaagtttattgatcagggaaagcgatttatctgtaacttgtgtggtaagtattagtgtatattcatttttctacgataacatgagtagcctgtaatttgtcgcaaaaggcacaatttcttccatctttattttgcacaatgggaggaaaatggtattaatattattcatacgactagtcactaatcaacattcacctttttggctgttgcaggatttactgatgagactccccgtgactaccactgtaatcttgggccagatggtaggcgtcgagatgcagatgaaagacctgagttatgtagaggaacagttgaatttgttgctacaaaagagtacatggttagtgatacaaaatcttacaaatctaaacatcgttttttctttccctttacagttcatccagtttagattttatgctatataccaatcaaatgcttgtgtttccattccctgtctttttaagagaatgggacatcattttgtttttgtaatatcgttttggttttcgctttttcctgtttctagtttattgttttatgttattttgtcggtatcaatcacacacacgtttgtattggtgatacttttggattttccacatccggtatttttcttttatattaatacatctggagttataggaattcctttgttcactcaactcaatcaagaaggaatgcaattggatatattatcaaaattgttaattccatctataagtagttctgttttaagtttaattataaaataataataaatacgtggacagtggatcgtataagccctagatcccttgaaattttctcttagcctcctgttaatgaaaatcatataggaaaatacggccattaaaaatatacatggccatagtatttttcaatatcaattttgaagaccgacctttccttctatgatatctatagttttccacaacttcattagcagccagtgtcacatctgaatcttactgccagtgacagttgccccctctgattcttcaaaatcttaccttaacatgcccacgatcttatggaaaatactcgtacatacttcttagaaatcagtcacaagactaatatggacaatatcactaataaagacgagtctccaacattttatctgagtgatataattttgttaacccattttgcataattgttcataaagttggttagttacgtcagtgcttatcaacaatgatgtttcattgtattatattttgaagtagagattttttgcaaaaggttgcccatacttggtcttagtaacagctgtaaattagcatgaccttgaattagcacactatacatatactcttttttttagaaaggttccaaatttgttattaagtgctatattgttttgttgtcatttctgagtgactacattttaagcgatgattgtttgattctaggtgcgtgatcccatgccggctgtatactttttcctcattgatgtatccatgaatgcgatgcaaactggtgcaactgcggcagcttgcagtgcaattagtcaagtcatttctgatctccctgtaagtttttttctttttgcatgacagatttagagtttttagctacgctgttcaggaagtggaagagcttttgggttcattggttttccatttcttggtgtttgtaacctgtaaacataggaaactatgtaaagatctacagtatcttttgatgggacaaatactgtttcattttcgctaatttgtatataggcaatgtatttctatcatgactaaataattttacatcatttttgtttatttctttgtttgttacatttattgactcttcattttgtttctctgtaattattgaaccaggaaggaacctaggtctctaacatttttaaaaaagaccaatttgactttagaaaatttcaataatttgtcctacaaaacctaccaaacttatttccttgcttgattttagtgaaaatacaaatttcattatgatgattttattctccagtctttctctcatgaattttccttcttgtttataattactaaagcttcaaggccagtcatattttaaacaattccttggtctttcattgggataatttatactttgtgtttctataaagagaaacaaatgggaaggaaaacatgttttatttttcactgagatcttggtgctttcattgatgcaggaaggtcctcggacaattgtgggaattgcaacctttgactcaacaatccatttttacaatttgaaacgtgcattacagcaggtcaaatttatcttgaccctttcatataatttcagttagtaaagtggagctttatctttaaatctccagttaaattaataaacttcctaggttttgtatgttatacacaacatttatgttacatggatcgggatattgcgttcacaaagttgaatctatctgagagtgatttgtctgaacattggaatgattgcattcttctgcaattaggatttaggattaatgtcatattaaggtgaatgactacacaagcataaggtatctggttcctaaatggttttcagataaagtttatacatacagtctcttggacctgctttacggacttggccattatttggtgcctgattgtgtattagtaatcgctttatcaactagaagatgagaaagattggtctgactacactgtttatagaaaagtataaatgtgtttgctacagctaaatcttactgttagatagcattctgcattttagaatttgcttttagaagggatggatggaaagacatcatttaagctgcatataaatagttataaatttggtaacaaagatgagttattgtcattgtgagatgaatattgggaagaaaagaacaattactagatttgcttgaagaatatgacatgctagaaaatacattaatggagtatcttggagcaaaatatgatttcgattgtatctttactttaatggtactcagtaggcagtttaaagaacagagttcgtctttcaatgactttgcacacagggcacaagatctctcctatttttttacatgttttttttttcctttatttttttcttacataatttcagttgtggatttacataatttccgttttaattgttaatatagattggtcttttcgctaaatgatattttgtataattacatttatgttgtttttgttgaatattcttgacctataattttctcaatggttatctacatttacattgattctgacatccaattatattttgcagccactaatgctaatagttcctgatgtacaagatgtttatactcccttacagacagatgttcttgtgcctctatccgaggtaaatatccaaggctgttgctttatggacctttattttccattagtttttatacactactattatcttgttgatttttaggcaatatttttcctgccaataatagttgatcttttgtttttttttattgttgatatagtgccgacagcatttagaggtattgctggaagttattccaaccatgtttcagaatagtaaaactgctgaatcagcgtttggtgctgcaattaaggtttgctatttttattaagacagtttatggttcttggtgttttgattatgttgttacagctggaaacacatttcttatactttttttgagttgatgtcattggttttgggagtttgtcgttccctttgctttctaggattataataaaattaacatatttttatatacataaaaaaggcctaaattttgctttctcgtgtacaatgacaaacatacttgggagattaagaaggtcatctcaacttcaataaattgttacattatgtctgtgtgttaggttccttttgtcaaaatagaaaaggacaaaacgaagggtaaaatctatccatgatgttgcttttgtgtaactatagtaaattgtaaatatgtgaaagtattgtttaaatgcagatgatggaatgtttggatgaatgcttccaagattggatatgttattttcttgaagagttattgttttaggaagggtaggcaaatttggaatcaactaacttttcagtgctggtgtttcttataaaattgatgcagttagacggttgcatctaattaggctagagtcatgggggaaactttaacacatgcattgatcatttggcttgaaaacaactctgagatcttgtatcttgagttacagacagtttgttctgaatttagttcaaaatatttaaccaaaatgagaatataagagtctggaatattgcatgctttacatgatgatatttcatctattaatattggtacattaaaacatgcattttaatatgcttctgctccctgtttttaggctgctttcctagctatgaagagcactggagggaaacttatggtatttcaatcaggcaagtttagaatatgatacatcttcatgtttgcatgtttgcatttaaatgtgtaaattgtttccgctaccaccaattatgcttcataattatgcagtctttttaggtcttgatgattagaaatagagaatgtgacactgactttcagtcggatttctgcatggtgaagatgcaccggtttttttagttacttttgtattttaaattcatgaatactgtactttatttcaaattcaatgacactcaaatgcaaagtggcggattggattggattacatgatgtggattggtttgggttgctgtgtatgtgttgtattagcttagctgtatttatgaaatttatttgacaaaccaatttcatatatgaaaccccagttgggcttagcatctatatttttctcatagggaattttggctctctcatgacatgtattgtatttgtgatttatttatttacagttttgccatcaactggcattggagctctttctgctagagaagctgaaggaagagctaatgtatctgcgggagagaaggtatggaaataatgtttttttacaccttctatccgactgttttcagacaatataatggatatgagtccgatgttcgttcaatttgttttctttaggggtaatgtatgtaatcttcttagattggcggagttaaacatcactgggttgtttcattgaagttttctactttttatgtaaatctaattgaagatcctgaacttcatgacatttttcctagatcctttttcttcatatttggaacttaatgaaagttgttggaagattttgatggctttattgatcaaactggaatgattgttccactagtatataagataatcaacatttttttttgttgacatgtggtagaaggggaaaaagaaataattctcataggactctggttcatttgtacccatttccaatttgatacacctataggcctcctaagagaatgagatggtgataattgtaatctgtaggggcatatagagtactaaaagcaataataatcacaagaagaagactgggagattggataaagatttaaagaaatgaaaacgttaatgttaatcaataactcaagcataagaacctaatgctttgtagagtttctataaagtaatgctagtacttgtcttagtcaaaactgcctttcctttagattatgattcttctttaacatctttgcaggaagcccataaattacttcagccagttgacaaaacttttaagacaatggctattgaatttgcggagtatcaggtaaacttccagtaatttcatatcacttaataatttaggtatggcttgtttcaaaaaaaaaaaaaataaataaatagatagatatgactttgttctacctgctggtggagattttttgcactcgatgcactgtatttgatgagtataattttgtacgggtaacttatctatcatggcatgtttcaggtttgcgtggatgtatttatcactacccacacatatgtggatattgcatctattgctgtcatcccaagaacaacaggagggcaggtactaatcttaatttgtctagggttttatggaaacatcacttatggcttatctttttaacttgataaccacgtcacttaacaacggtttaatattctgagttcttttaaattgatattcatattagttaagcatgttaatgttttgtgtatagcttgtgaaagaattatatcaagtgttctctttaagcatgttcacatagttcatgctgtcagctgtaaaatacaccaaatgtgcttggattcactaatatattcaaatacgctgtcgtctctaagcatgtttatatagtttcatccctttaattatcatttctttcatttccacgcttatcaatagtacaactaggtggtgtttggttaaataataatactaaataaaaaattatgctggttttcgtctttcaggtttattattattatccattctcagttgtatctgatcctgcaaagatctacaatgatcttagatggaatattacaaggccccaaggttttgaggcagtgatgcgtgttagatgcagccaggtattctaacgtggcagtgaaagtttattacttttcttaaaaaatcgaatcagttgctaagaacaaaactcaaataggcattttttttttttaattttcctctttatgtatagggcattcaagttcaagactactctggaaacttctgcaagcggattccaacagatgttgatctacctggggttagtatatcatgttcaaacaattttttataagttttttaattctggttttaatacctctgtttcattgcattgtgttactcccttttattttcacttggtgtggtctgctctgtgaactgtttggtggaaatatataatttatatcttccttcattttgcagattgactgtgacaaaactattttggtgaccttaaaacacgatgataaactacaggatggctcagaatgtgcttttcaggtaaaagctaatgtgaactcaatctgtatcatcttttttctttctccccatttgaagcaaattattttctgctaagaagatgaatgatcctattccttctatttattatgcagtgtgcccttctttacacaactgtatatggtcaacggagaattcgagttacaaccttgtcactgccgtgcacaaatatgctaagctatttgtttcgtgcagctgacttggactctcaattcacatgtttcttgaagcaaggtatgtgatatgttttaaatttcttctgtcatttttccttaccttccttcctggttttagctacctctttaatttgacattatttttcaattctaagtcatttttctcatttacattgtgtaatagattaataggaaatcttctgtaaaacattgcatattaaattataaatggattttgagaaataatacatcatcaatatttcttatgactgtagagtgtgaatataatattgtctctcattacaattgtattttttacttgcctcatcatgttcaatattaattacaatgcagaattttggagatattggtaactttttgttagaactttcaattgtaagaaaaataacaattaatgtgttcttttcctatcctttgtagcggcaaatgaaattcctttcaatccactctcacgagttcgggaacaagtgacgaatctatgcatcaacagcctgcttgcttaccgtaaattttgtgctacaccatcatcatctggccagcttatccttccagaggcacttaagcttctgcctttgtacaccctgggtatgttcccttttcctgcacgagaatatattagcatttttcatgctccggttaagctctttttcaaagttcatataatgtttcctttagaaccacctaaacgtcccacccgcacacgaactcacatattttccatttttctttttgcagcattaatcaaaagtactggcctgcgaaatgatgggaggatggatgaccgttcgtattggatcaattatgtttcctccatctctactcctctcgcaattccactggtatacccaaggatgatagctattcatgatcttgatttgaaggtatgaataatgtctttaactttttcctttttattcttttaatgtggactatattacagataaaatatgctatatatatatttacattatgctattttctgttgacaggagaatgatgatactgttcttcctccattcgttgcactttctagtgagcatattagtgacaatggaatctatcttctcgagaatggtcaagattgtttaatttacattggtagcacagcagatccagcattactgaaacaacttttcggtatttcttctgttgacgaagttaccccacaggtagggattttttaaatattgcttttatttacatattcacttatatattatgttagaagaacttataatcgagggattcgaacatcttaccttataatcgatatatccttcatttaaatctggaatcccgagttgggtgctagatccttttattttattcctcttgaaaactattaataatagaaaaacattattgggagtttgtgtaacatgtaaatattttgttgcgtagtttgtgttgcagcagtatgacaatccactatcaaagaggctgaatgaagttatgaatgaaatacggcgccaaagatgttcttacctacggtatgactggctgatctctgcagtttcatttctagcaatatttctcttaatctttccgtaataacttcttaatcttgtctcatttaatttttgcagcttgagattgtgcaagaaaggagatccatcaggtcagtactttcaaaatcataaaatttttattaatatggttctgacatttcattgcacaatgtataaattaacctttttcgggtcaagtggtcaattattaatcgattaatcgagtttttattgatatgaaattctgatactgactgtacaatttgttaacttgtggttgcaggaatgttgttcttctcttatattgtagaagaccaacaacatccaactggcccgtcctatgtcgactttctagtacatgttcatcgacaaatccaagtaaaaatgacggcgtgaatgcatattgcttttccaagttgagttaaacaagttttgataaacttccagctagggtactcactcatcattgaatttgaattaaaaggaaggaacaggttgataatagcacttcatagcggagcaatccggggtcgccccgatccattttttcttggttttttttttatgtttcaagtatagtgaacaaaattttgcgctattagagagggtggtcactgtagctgacatagtaaaaataaatctaaagttataatatcatcttattgtttgtgtatttaaattgtgctgtttattgccccgctttactagttttttctctagtgagaactgaaatatatgacccaaacaaaagaagaggcacaatttgtatggactgctttgatgggtatggttctatatgaatgaatagtttggttgttcaaatataacatatctatctaattttgtggcactttcttatattattataatttcccaactacctgtgttctgatttatataaatacttttctaagtacatttatatatactagctagagagaaagtagataaaacttggtatgagcattgtgggtggtgtggtctcgttactgccaagatattattgtcatttggggatagaagaagaaaaataaaataatgaaaagtagctaaaagaaagaacaatcaaatttttcagggtgatgacttgtaggaaaagttatctcttgggttgctacctttaccaaatgattagaaactttggttgtaatttaagatcattttcgt

SEQ ID NO: 36257 - DNA, 2686 bp, Cannabis sativa
aaaaatccttaaatctaacaattttaatagttcaggagaaatttttaatgccaaaaaaaatttaaaaagtataatttggtacatattaagattaagaagaaaaaatcataactagccttagatttacggtagctatttaaaacatgccgtaaaattttaataaattttgataaatttatataacaccctaaaaacatgtatgtttgaacactagaatattgatagggtagatagatgcactctttttaggttccatccaagcacccaatattatttaatattttttcaaaaaaattaaattaaataaaattgaagatgatagttactgagatagagagagaatatgtgctggtagctactctctctctctctaagctttttctctcttcctataaatactgaaacaaagcctcacttgtcccgaataaaacagcagcaggtataaagatagagagagagagaccatcagaccactctctgttgttgtgtgtgtccttctcttctctctctctcactcttttgtagggttttcattttctcacactctctctctcatttccatttctctctccttcttagagagagaaactgaaacttcgagtcatggattcctatacgctacatttggctatggcggctctcgtcggagcctccttcgtcgccgtatccgcttattatatgcaccgaaaaaccctaactcagctcctcgagtttgccaagaccgtggagcgagagagggaggaggtttccgatgaaggcggcggcgattcgccgcagcatttgaagaggagacggagccacgcccggcggaaggggaataattattataggcgaagctcggcgtcgatgccggatgttatggcgatctccggtgcgattgagagcgaggataggcggaatggtctgctacatgttgacggtattccgtctgggttgccgaggctgcatacacttcctgaaggtatggatttggacctcttactagagtaatatgcgttgtggctttggtatcgtgcttttgatttggttctgtgtttataattttttttggattattgaagtttagtagcgtgttctcaactgcctctgtatgagatgatgatatgtatgaattgacgtgtttatattcgtcttcgaagtatcaaggatgtttggttatgcagtagaaagccgtgtaggattttgtttatatatgtgtctgtgtgtgtttgactgtgtatttaatgctagtgggaaacagagttaacatggaagttggggaagtaatgtgtttgaatactgggaatgcccctgcatacatcgatggctaacagagtcgaatttagctttgtcattattttaaacaaccagagaaaggaaaaagaataattagaacttagaagcacaatctaagttcttcaagcccctaacggagaaaaatgtaaatttctaaaagacgttaagtatttctctttattcaattgttttgtttcatttcttttagaaagattgcgtagaggaatccataataactgtctgattttgtaggtttctgatttctggagtctacatgctaatatgtatgatttttcctatagtattttatgaataagaatttggtgaatgacccaatgaaactttattaggtcctcgtgtaataaacaagaggaacagttgtggttgttactgaaggatttttttttttttggttttaaaagacatactaaaagatttaatttcttattgtttaggcttagacttcctcctatgttggtggtttttttcctaacacagaaaaagacatgaatttcttatatttgggttcttttgtttgataggtaaggtaattatgtattgtacgcactgaacttgtttgcactgcaggcttgattatttatttataaataagtaacaatataatgtgaattgacatcatacaaccatattttttatgcagggaagtcagctttacatacgaccacagccaagagaactagtagccttttgaggacaacttctcccaagtcacctgttgcaagtggtagtgcattcgagagtgtagaaggttcagatgatgatgacaatttgactgataattctaaactagacactacatacctccttactaatggaaatgcggtgagttatttaacaactatgcaaggggctatcattgtactgttgatttgaactttagatattactccctgcatgtcctgtgaacatattctttttagtcacaggagttattttcatttgtaatttttacccatctacagcaaataaattttaattgcaagggactattcttgaattttggaatatgcagggaacagataaaagcctatgtgagaatttacctgaccgtgttaaggaaaatggggagccattgccaatagcaggtcccactatgatccgctcacatagtgtatctggtgatctacacggtgtccagcctgacccaattgcagctgatattctgaggaaagagccagaacaagaaacatttgctaggcttaaaattaccccaatgggtattgatactctctcctctgtccttgacttggatattttggcccattttgtttaatttattattttttttttataagttaatttatggacgcgaatctggaccactccgtacacacactcccacccaactattggagttatctttaagtggtggctttcacttcttgttgtt

SEQ ID NO: 36258 - DNA, 3015 bp, Cannabis sativa
gagaccggtagccacagccaccacagttagagtctcggcatcgtttgtgttagggttcaaaatagctatggctgtcgctgcgaatatcaacattagagttcctacgaactctgctccaatctgtaattaattaaaatacattatttttaatttttggttaaaagtaatattttttttttctctaacatatattataaaatcttatatatatgtgtatatttacctttcttgctattgaaactacaggagggcctttccttgaagtagagtttggtttgttgagtgatccttcttccatggcagaccattgatcattattatcaccacacaagttgcttagcatggattttttggtacctccatgagttggagtaacaggtatagttgttgaaggaataataactctctcattcgaattcgccatatatttgattatatatatgatgattaatcactctatataataatataaagaaatatgtaagtatatatctataccaaaaagattattataatatatatgtttgtgtgtgtgtttattaattaacacttcattttagtttcatcactcaagtagtgatcttttgatgatgatgagtttgttttgagctcactatagttggtatttatagaatgttatagtagttgacatataatagtataaagagagagagaaagagaggagaatatgtatattccgacaaagtacttattgattaattaaaaataataaataatatataatgtataataacattaaataaaatatattattattattattatatgaagaaagaaattaataatggaaaagatgttagtggtcacaactatgctaaagagatggggaaaattaattaaggtatatggagaaagagaggtactataggaaggtggttcggttgcattaaatttggttagtggagaagaaaatcagtatatagtgggacacttttcaaagaagaccatatgtttgcatttagagtacacacaatttcgaaaggagagtagaatgaatggagagttgaaaggataaagaaggaaagggagtctgatcgatggatggagaggatagtaaatctcgactatgttgtttggaattgatatggaaagtacgcgcatagaatttaaagggtaaatactattttaaatcatgtgttttgtaaaagctacagattagatcatctattttgttaaataataatgtggactctgagtttttcaaaatatatagcacaaattagaccttgaacttaatttttgttattttttttaatataactaattttataattaaactaatttttagcacaaacaaatgtaaaaaaaaaaatataatcattcttgtcataatgcctagttgatgttatttgatgaaaattaagcttagggtctattttgtaccattataaaaaatttatagtctaaattgttatttaataaaataataataagttcaatcgataacttttgcaaaaggacctgaaatataatttatttaaatttaaatgtaattattatatcaccaaatataaatattttaatttttttaaggatatttaagtaaattcattaaattctttttatcttttatttcattctcttattttttaaagattcaaaataaaggattaggagggagagctcatatcctctatacctttttcatatttttctttctcacaaacatagtgtaagacatatacacatgcatgtaataatatattgccctttttccctttttaatatttctttttcattttctttactaaaaaagtgagagggctacatcatctaagctctcactagggttggtttaaaaataccaagtcaatgttgttgataaggtttattcttttttttcttcttaaaaaaaaaagaaagaaaagaaacaatgtaatattactatatataaaaaatacaccacataaattaaatctcctttcatgtaagagaagaaaaaaaaaatccatcttttagttactcttctttttgagcttttactatatagttcagctctccaaacttaggctttatgaagatggaaaaatatggttattaatataaaactatttaaaataattataattatattaataaatcaatattaatttaaaaaccaattatatatattcatgttttacttaaaattccacacaccacaaacaatatatatgtccttcatataagaaaaaaaaaatgtttcaattacttttctttttttttttttaatttttcaagtccaaagtcaaaacataatttttttattatactaaatattatatattacatatatattatgtgtatagtcacttcaattaatattctatgtatagacatacgtacatgtgctaccatattctatgtcattccatgatgttatatatatagtaatagtacctttataaaattatgtaaatataatgatgatgatgatgaagaaataactatataaaactatttaaaatagtttaagtcaatttttaagtcaacattgagttaaaaaaatctccttcattgaaaaatcatcaacttttcttattatattgtccataataaatagaagtacctttaacatttagggatatatatttagtgaagaagaataagaattgaaactttgaaactattaaaagcaagaagaccttcataaatatatacatatatacactcaataattgagtataaattataataaggctgccaaccccactctctcagttgcttcatcattatactgtgcttctctctatggaagaccatgtgtgacgtggcttgtgacgtaataataaaccacaaaattaataatatatataaaaaaaagacatattaattataatattaatcttatatatataggttaattattaaaacggtacgaggtgttattattattataattaattatgataattttagaatagactcattgttagaattatttatttgtggactaatataataccataatcacaatcattaactatgtgcccaatatttattcactaccataat

SEQ ID NO: 36259 - DNA, 8424 bp, Cannabis sativa
aaaaaaaaaaaaaaaacatttgcattaccaagtgattttctattacattctattgtaggctatcacagctcttaagaaaggggcatgtttactaaagtatggtcgtagagggaaaccgaagttctgcccattccggctttctaatgtaagtagttttgctttcatatttccattgtgattccacacaaggccttttaactggagcaataagtttgggcttacttcaaagtacaagaattcatactgaatgaagagagatgttattgatttcagttaggttcaaaatataaaacattctttaaacacttctttgagaagagaaacctggcaatataatatttgctatgattctgattagagaacagttatgcaatctcagggcctcacaagttagagcccaatcagcactaaatgagagggtgagttaatatgcggtgtgctaggttgatttacttagtttggcataactatttgtttatatctttcaagttttatttttattatcttaatctaaaaatgatatattctgctgtttttctaatttgagctcagttaaatcatgtgtgtactcatataaaggtgtctttagcgttccaatagaatagtgatgtcagaaatacgttatccttaatatattgtcatttctttcttagatactttatcttcgtttcaggatgagacttttttgatttggtactcaggcaaagaagagaaacatgttaaactaagtcatgtttctaggattattcctgggcagcgtactgtaagtttgtaaaatcattctttatatgttgactggcctcaatggccagtttttgaatccttaattgagcctagaactggggccttctttttcaggcaatatttcagaggtatcctcggcctgaaaaagagtatcagtcattttcactaatatgcagtgataggtccttggacttggtgagtgtatttagtaatatctttgaattgatattgtaatactaatttttgtcggtgtcaaaatgacatgaacattacaaaatgaagtagttctctctttttttaggataagtacaagtgttaccagtgcccaagattaatatatagaaataaagcagagtaactatactgatttctcacgaacgaacaaatgaagaatgaatctgtttactttcttttgtggtcactctccaattttgtaactatactgacacccgttattctacaaatagatatgtaaagacaaggatgaagctgaagtttggtttgttggccttaatgcattgattactcgagacaactaccgcaagtacaaaattgatgcaacatgtgaaaatggatcaactgatagtcccaatactcgtactcgaagaagttctccttcaattgcgccatttgtctgtatcaataatgtgtttccctctcttttgtttctcttcttagtttttctatcaaagttcaagaagaatgtttattatttacagtttaaattcctcatgctttttttttttttaaaaaaaaaaaaaaattaccacaggatccaggagatgctgcagttaactttgagaatgctgcacagagtagaatgggaaaggcctttgcagacataataacgtatactgcagtcaccaagcgtctcagccaacctgatccagttgtcaacccttcaacgtcaccttgctccgtagataactccaataacaatggtcgagcttctgcaacagaagcatttcgagttagcttatcgagtgctgtaagctcatccagtcaaggttctggtcatgatgaatttgatgctttaggagatgttttcatctggggtgaaggtattggtggtggagttttggggggtggtattcacagagttgggagctctttggatgctaagatggatgctcttctacccaaggcattggaatcaacagttgttcttgatgtgaatagtattgcttgtggtagcagacatgctgtgctggtatccagacatggagagatttttagttggggagaggaggcagggggcaggcttggtcatggggtggaaatgaatgtttcccaaccaaagcttattgatactcttagtggcacaaacattgaattagtagcatgcggggagtatcatacttgtgcagtcacaatttctggagatctttatacatggggtgatggtactcagagctcctccttacttgggcatggaagtgaagttagccactggattcctaaaaaggtatgtggtattatggaaggaatacatatatcctatatatcttgtggactatggcatacagctgttgtaacatcagctggtcagttatttacttttggagatggctcttttggtgccttaggacatggtgatcgtagtagcacaagcattcccaaggaagttgaagctttgagagggcttaggacaatgagggttgcttgtggtgtttggcatactgctgcagtagttgaagttataaatgagttatctagtcctgaaacaactgttaattcttcctctggccaattgttcacctggggagatggagaaaaagggcaacttggacaagatgataagaagcctagactcattcctgaatgtgtatctactttggttgacaagaaaattcttcaagttgcctgtggtcatactatcacaattgctcttacaacatcgggacaagtatacacaatgggaagtactgtttatgggcagctgggaaatccttcagccaatggaaaagttcctaatcaagttagaggtaaaattgcagaaacctttattgaagagattgcttgtggttcttatcacgttgcagttttgacctccaagacagaggtctatacttggggtaagggttcaaatgggcaattaggccacggagacaacgatcacagagatgaacctactcttgttgactttctgaaagataagcaagtaaagagtctagcatgcggttctaaccttacaactgttatttgtcttcataagtgggtttctggtgccgatcattctgtatgctttggttgtcataatccttttggatttagaagaaagcgtcacaattgttacaattgtggattagtcttctgcaaagtgtgcagcagtaagaaatctatgaaagctgccctggctcccaatgttaacaaaccatatcgagtgtgtgatgattgtcatgctaaactaaagcaagccatggagacaaattctgcattgcgaaactctaaggttagaaatggaaatgttcgtcgtaaaaccaatgaagtggctgatagagagagtcgagctcctagattgcagacaacactctctagattctcatcttttggctcaataaatcaagctgaaagcatgcattccaaaaatgagaatcaattagaatccaatcatggtcgtgtctttcctcctcttgatagagccaacctaaaggattttaatttttctacagcatcgaattctctggttggagctccaaagaaagtaatatcagcttctgttcctgtctccagattgatgtctcgagcaacatctcctgtttctggaaaattgagcccagcttggtcttctgaagaaacagatttgaagcgtacaaatgatattttaagccaagaaattgtgatgttgagggcacaggtcagcttgcttacactgcttttgtgatgctaagattttaaattatatccatgcacatgagcgtacatgtcctattaatatttgtaatgtcagcattgacatcagttatgagaaatatgtttaccaagtagaaagtgattggaatggcaccctgcaggtagaagatcttacttgcaaatctcaagatcttgaggttaaactagaacaaacaacaaaacaattggaggaggtgactacaatagcagtagatgaagtggaaaagtgcaaatctgcaaagaacattataaaatctttaactgctcaggtttgttatgtttttctctcttctgtttgattttttctggaaatctaattaattaatgtgatatgcaagtagtattgtggtgaaaaactgcacacaatctagagtaaattattccagaaaagttaagggggagctaattcggaaaaaaaatatccggaaatagattccacgcctagcaaaaactaaagataaaagaaactttactaaaatacctttatttcatgtaaccatataactacccagtaatttgtttcaactcctcgtatttaattataaccaaagacccgaattactgttcattagaattaactttcacgggatccttcttttcctttccttcttgatatctaaacctttactagacttgacgaatccaaaacacatgacaccacccaccctttgcttctaaatgaatgtaagagcttacattggcaatctcgaccaaaaaaaaggtagaaaacgtcatagtaaatcatttatgtagtcacccaattataaattgcctgatcttttattctgtgagaacactgaacattatacttacccaaaaccatcgtctctacaaacattttcttttggaacacaattgacaccttccagccgtagaagaaacacttctagagaagtgtccctaataatcctagcaaaaaatgactaacaattaaattttattgtctacttcaattttattgcattatcattcccatgtaaatagttctaacaattgagctcattcaaattttatataacatgaaagatccaacttggagtttatcctgtaaacaattttgatgcttcattcaatgaccctttccaaatgtcctctgaaatttgataatagtgcccattgcacacttcaaaatagcaagcagaaaaaagtccccgtataactaaaacgagctttccaagggcgtcataaagttacctatttttcccctgacgcatctcacttattaggatttgagaccagtcttggtaagcttgtatagttttacaacaaagaattgctttctagagggaacctcaaaagacaaagcattggttatgctttttctattcttgatgccagtgtcaatgtccaagccaccctttttctttgggatggcacaccaggtcacaagtcatcatatcatctccactcaagtgctactttcccactaaaaaatccctcttcgatcttctgagttctgtatgtagagtttgtctgcacaagcattttgatttgagacaatttataaatgccatttgggtagttaggcttgtgtacctttataataactcaagtttgaattttggaccattcacttttggagcaaaggtgctttggaatgaattggttggatggagaagaagccaataaactggttaaggtattgatgttagacagaagaaagtgaattggctaatcttacactgactacaacatattcatttgtgtactaaccatcttttatgtaattcttcatctatgcaatagagccatgataggtgctacgttagtctgaaattgttttgacaataaattaggcagtaagctagaatctatgtgaaggatagtagttggctcactaagtggagctttgtattgaattgtattcgttttatttttatttttcattccaatgcattaaacaagtttgtcctaaataccttgttttagaaaaacatggtgccccctggtgtggataaagtccttcacaaatatatttgagaagatatgatcaatgtttttacaaaatatagtacagttactgttgtcgcatacaaattttgcttactcaactactatgctgttctttttatttgtcaattatctaaactcgagctcttcttgtctaaaagttgaaagacgttgctgaaagattgccagaagtacataaggtcagctctagtacagacttaaatgctggatgcaccgtcaagttttcaaaccacaaccacgtatcaactaagaccactagttcaaacatggctactcctgaaagagagtacaatggcgatcgaaattcccccaatggatcaaaatcacaagctggaaaagcagagtgggtggtacaagatgaacctggcgtttacataactttatcctctttgccaagcgggggtaatgaactcaggcgggttcggtttaggtatgttcatgttgcgactcttctctcacatagatattagtatattataagtagtcgaaaacgatgattacctggctaatatgagaaaaataaacttgaacaaagaatcttatttcaccttgtttctgaatgcactattttatctcatagcaattttttgcatggcctttacaattacaatcacttaaacatagttatatataatgagatattgatagataaattgatgtattctttttcaaaaacctattgctaaaagtcttcaatcttccaacattctttcatagtcgaaaacatttcactgaggagcaagctgaaaattggtggactgaaaatggggctagagtatgcgaaagaaacaatgtacgaagtacagagtaatgtgctgctagcatggtgaaaaagagaaagcaaagacgatatgacaattcagtataatttctccctggaatttgtaaattttccccttaatcttccagtggagttcaccttgaagaagctgggatcaaaacatagctattagatggaacatttggaatatgcgtaggaggtaacgggtttcgaaggaacagtgaatgtaaagatgaaaagaaaatatatttttatttttttgacaaatttagtgttcattttccttttaatcctctaacgagattctgcttgtcaatgttggtagtctgtagcgtttttcctatttttaacttttgaaaaattattaaatttttcagtatcatctttagatttgtatgaaggctttcttttcctaccaacgaggattaagaaaatggtgtgttcagttcacaaggggttatcttaaggaattcaaaaaggttgtcctcagggaatgggataagaagctatacatacaagccaataattagctactaaagaacatcaaagattttgtgtgaaggagaagacatcaaatattatatatatagaagatatggtttttgttgtacatacatagatagtagccagagccaaagccccagaatgcgaagtgaatattcattaaacaagtgaaggaagtaagttgcttaggttttcgtaaagggcgtgagggtattacttcccattgcggtcctctccggcttaaatggctgcgttgaggcatcagataaagttggtaaccttgaaacactgcccttcccttttctggcattaggtcctaactcctctatcatgtatttccacccatcaatgggtctcctccgactaaatatgtgagtctttataaaactagctatctgagtaccaaaacacaataatacaagacaaataaccagcacagcagtaagaaaagaaagcaaaagatagtttaattaaagcgactaaaaaataatgcacaagtaattaagattacgcagacctggaatttgctgtaagcaattcgacgctcgaactcttggagaagaatatcctcctccctctgtgtcatctcccatatattcccatcttcagtttttgatgtcgtttcccaaccatcaggcttggctttaaactcaccagagcttgacatttttgagttttccaattcctggttcacagaatcgaaaatgctgcaatttgtaaaagcacacactcacatcagaatccaacaaaacaaacacaataacataaaagaagacgagacgaaaggaaggaacttactctgaacaactatcaagtaacctctcgatatcatcaccgccaccaccaacgatggaatcacccaatttctcctcttcctgcttctcaatctccttcatccataaccccgcatgaattctctgtttcttcaatctgtaatctctcttcatattctctaagctatatagcgacccacttccactttcgctctctggattcagtttttctggttgtttctgggtcttacttgacgatttacgtctctggctccaattatcgttcatgtcttccacaaacgccttcgtctcggaatcgacgtccgatgggagagcaatgggggaatccaatggggctgagaaattaacgtcggcctcccatggagctcgaggggatttttccgaaacttcctcggggatccaagcagtctcccaggcgttgttccagtcgtccttgtacttgtcatttcggttggaggagaattctctgaaacttggcttgacaatggcaacaggagagaatctatggagttgagagtttcttactatgcgttgaaaagtattcattgaaatttccactttaacgaaatgaaacctgactgacacacctgaagttgaaattagtttccttcttctctgttttcggttgatgctggaaacagaatgtcaaagcttaaaccctactgtgactttcaactcaaattagaacttgggccgttagaacaggcccaattcggttttgatgtggtaaaatttagg

SEQ ID NO: 36260 - DNA, 6645 bp, Cannabis sativa
  modified_base (2746)..(2747): a, c, t, g, unknown or other
taaaaataaatgatattttttaaaattattttaaaaaataaatatatatttattaaaagttttttttttatttgggcccttaactttacgggcctagcccgccttaatctaggaccggctctaataggggaaatcaatttggttctaaaattgaatcatgctgcgcacccatcatgacctgacaatggatggtgataatgatgtgatgagtaacagtaatatatttattaccccacgtaatgatcttcaatctttagctacagctatcagtcaaaggcaaccagtagcaaaaacaagagaaatgaaattgggtgggttagcgatcagctaagagtcaaacctgagacccctaaatatgcatgtgtgatatatgatatgatctgatgtatttatgtataatatatgtatctatatatcactaaaaaaattgtcaaaatattaattagtgatcaccaaaaagtgtggattgttttgctttatgaagaagggtagctgaaaaaataatttttgagatcataaatagaaaacgacataagttgaagctaataatattaggctggttaatacttattcgtcaatgagtcaactacacaggggctaataatttttactcaaagcccatctttaaaaagcccaagtaacctcattttctcacaatacaacagaggaacaacacagagtataagaaaccaagtgatcgatcaagtgtagtgaaagtgagtgtacagaaaaaaaaaaaaaagtgtgtgagttagaattaattattagttaaagatgactgtgtccacttgtgtctctattgcaagtactcatgctaaaagcaatgggcgagtcctcatcgttggtgccttgggcttcataggccatttcatcgccgaagccagcctttccctgggccggcccacctatgttctcctccgtcctggttcggcttttaataacaaccccgcaaaggctgctattcttagagctcttcaagacaaaggagccatagttgtgaatgtaaattaataatttaataatatacatttttaacttctttttattaataaatataatataatgtatatttcgtttttgggttaactaaagggtgtgataaatgaaaaagaatcaatggagaaggtactgaaggagcatgaaattgagatagtgatatcagctgttggtgggccaaacattctggatcagctcattcttttagaggccattaaaagcgttggaactgtcaaggttaagtttaaatataattaatgtttactttgttggagatgatgatgaaattgttagttagttaattaattaataataatgatgttatgaatgaatgaatgaaagcagagatttttgccatcggaattcggacatgacgtggacagagcagagccagtggaaccagggctgacaatgtacgaggaaaagaggaaggtgaggcggatggtggaagagtcaggggttccatacactaacatttgctgtaattccattgcttcttggccttactacgacaacactcatccttccgaggttataccacccttggataagttccaaatctacggtgatggcactgtcaaaggtatatatataaacattatccaatctctactcactacgtgctctattctatctattttaataatcactctattattaatatacacacaatttgatgacattattttttagggtttcgttcaagtgacaattgaaaaaactgttaatcatactattactaattgcatatatattatattactttttttctgaaagctattattattagacaatcaaaattaatggctaaaaaaaaaagtcaagaaataattattagaaacatacaacacaattaatttattttatttttttataaataactttttttgtgtgattaaaataggaactaagaaaagcttttttaattaataaatgtattgatgtgaggtaaagtagcaataaaaaaatgtactatatattgtgtgctaacatttaacttttcatattttagtacattttacaccatcattaaaaaaacttatttttatgagaatgttttaaaaaataacaatacaccacttcttagcaataattttatgttgaaatgttgatgctcataattacaagagtaagtcataattattaattacacctttatatcaaaatattcttaaaatggcaaatggcaatcccctacttttataaaaattatgtcgatgttcataattacacgtgtgagtcataattttatgagttgaaatgatgatctagctagacaatgacatcttagctaaagcatatatatatatatatatataatgtgtggataaatcgatccaatctaatgaaaaccgaccgatccaattacaaccgaccgccaaacattagatattcaattgtgatcagatcagattggatgttatttttaaatattcaataattggatcggatcggatggtggatggggtgtctaaaaattcaatgcatctaacatcctatcgaactaattagtattttcatttaatttgaatgagtattagattttatattgttatacgtcaaatctataagtatatatgaatattaacattaaagttttactcattttttgttggattggatagatccagtccaatctaatacattctggacctaaaatattggatggatccgatccgattcagaaaatactaggtctaaaatattagataaatccaaattaaacaaataaatatatatgaaatacatnnaatggatagaaccgatccaatctaacatatctaatggatattggattgattggatgatggaaattaattggatcggatcggatggtaaaatttaacatccaatatatgattggttcgaatttgaataggcctaaaaatatttaatgtgatctaacgaacacctcataccacaaaaattatttttatttattaaaacaaaccaaaaaaaaaacatttaataactttttcacccaccaaattacaaattccccacattctatagatgagttccgagtacaattacttttaaatcaaagaagggaaaaagaaaagcttaattattttcaaaaaaaaaaaaagaaaaaacttcatgcgaagaatcttagcaaaagttttcaaaagggacaattttgttttcctttccatttagccaaataacataaaaagagatcaataatgatgttgttggttttggtttatttaacacgtggctgtgaattggtgacctttattctgttgtaaaatttttagttgtttaatttcaaaaagattttttttttttttttaattttaacgtttatatataatttcgactcgaactcaaaatctccaacacacactctctttctataactagcctcaagtagtttttttaaaaaaaaagtttagttgttaggtgagaaataccaaaccatgtgtttattaggaatttaggactcccaagtgtgttggatctctcaataataggtgttgagttgaggagcaccgctaaagcttatacctatataaatattatatatatctttatatatatgtttcaaatatttaaatatataacgaaaaatagtggggtatgtttattcaaaaaaagaacaaatgtgtgggaatgttcatcaaaatatgctagaaaaatgtgattaatcactttttgaaatacatatgctggatatgttgagacaaatcaaacatccgacagtgcatgaaattgatatattgaacattgtcatgagatacatgtggtatccaatagggccaataccattaaatgtgatatttgatataaatatggatcaaattttttaattttttttttgaagtaatcaaatatttttaaaaacaagtaaaatattaaaagaaaaattaaataaactgttattttttgataaaatatttacatttttatatttaatttttattttttatttttacagtgttctataaaaataacacaaaataacaaaaaaaaaactatataaaagtaacaagaaaataacatccaaacatgtatcaaaacatcaatgaaaaataatatacaaataataataaattaacaaggtacagcataaaaatatcgtattttttgtaaataaaatcattaaaatgtttaaaattcggtacaatcgtatttttgtaatttttttttatttttttttgtataaaatatcccaatattaaaatgtattaattcatcacctaacttttttttttttgtagcattacctaacttaaatggaagaaaaaccacacaccaaaagaaaatccttaaagaaaataaaaatagtaaattacatcaaacaatattggacaccgcaatattcaaataattatatatttatatatatgttctgacatttataggtgctaccaagataagccaaaaataaatacccaaaaaattatatattttataaaaatttaaagaacaaaagtactaatgaaaaaataattttgatggcggccaaaaataacaataaaaacattacaaggtgtgagagatcccactcgctctcatcagcactatctttggatattgaataatattgtaggcatttgaataaagtatgagataatattgtatgttatccttatgtacgttattaaatataaatatggtactttcaaaaacaataaaatgtactacattaaattaattaaatttaacaattcataagaataagatactagataatcctaaggagtagagtggtatacatattatatacttatatgtgaaaattttaagatttaatttataaattaaattcaggtcctagttatagtacactaactgtatctcatttatgtgaggtaagtcatttggggctaagtaattgtagttaaaaggagcactattttacatgttgatacagtatttataagtaaattgattaagaagagctattaatgtatgaattaattaattgcagcttactttgttgctggcaccgacattggaagactaacgatgaaaacagttgatgatgttcgaaccataaataagaatatccattttcgaccgtcttgcaatttttacaatataaatgaattggcttcactttgggagaagaagattggcaaaacccttccaagagttaccattactgaagatcacctactcgctgcagctgctggtatatatatatatatatctaaaattctctcctctctacattttttttaatttaataaacatatattagtatttggtttttgtgtgtacagagaattgcataccagaaagtgtagtggcatcattcacccatgacatcttcatcaaagggtgtcagataaactttgctatagatggttctaatgatgtggaagtgggcaatctgtacccagaagaaactttcaggaccttggatgagtgcttcaatgactttctcctcaaattagaggatgaaaacccagaagatggtaatgatgatgatggtgatggtgatggtgatgatgaagctgtttctgccaaaactcatgtccttgaacccattccaattgctgctatctgcggttgataatcctttaaataataaattggaaaaagattatgtactatatttttagtataatttgtttcgaggtcatcatgaggaaatatatagagtaagatgatttcagcgttgagaataactgtttattattaaacactctgtaagttatttgtaattcagtgtaatggttctactgtagggtttgacgaagtatgaaccaataacttgtgtgaatctatgaattgcttcgtaaaataacgaaatttattttgtttcaattacttgttaacgttatccttccaattatgtcataattatatacatttttttctaaaacgaaaacaaaaacagaaactgcggtgacagaattctgtgtctgtgatacaataccaattgtattcggttgtactctttgagtcaatgccaaattctaataaaaataatcttaattttctctgattttattcatcaattctctattaatgaaatgactttacatatctatactaacttaacaatactaacaattactaattagttcttataccatttcatgtaacactcctcaattcttcaaaattaccttgtccttaaggtggtaaaattaaaaattaaaactaagaacaagtacaaatataagaaaaaaaattaattacagcacaattattttctattaatattcggtccaagcccaagtccaagccaaaaaatcttagagcagcaccatcttcttcacccgatacaagctacgtccctgtttcttcatcttcttctcttatatatttttttttttaaatgcttgaagcagatagcgatgtgatctctttcaattgtgcctatgtttctcttgatttcgataattgaaaataatactatatatcttacctttataacaatgagttaggaaatatatatatattgatatatttcagcaaacgataggagataaaactaataagttcattgtctatgctccaatggccttctctaatctgggtcgaccaagcctcctgtcgtctactagtaaccactttgtcgagcccatcgtcatcaaattttgtttgttgtcctcgatcaaaaaaccaagtaagttgagagctagcccgacccgatcacaatctcactggaagaaaggtcaatcacatgtt

SEQ ID NO: 36261 - DNA, 4017 bp, Cannabis sativa
  modified_base (3588)..(3591): a, c, t, g, unknown or other
actttgatgtcatactacatcagtaatccaaattgagattacttgcaccgaagaacaggcatcactgaaccgtactagcaaccattgattaaggattcccaaacttttatatgctgttgactgttttaacaaagtggtcttaattctttgtacagctacgagccacaaccttatatatgaataagaaattttttgatatttaataataaatataaataatttaacattcatgcatatatcaaaagttcaactctttatttaataattagaaatgtccttacaggcttttcaggacataagccctaacattgtcatccaccactgtattagaattactgtcgttgtcttcttcctccttgttcttctttttcttatctcttaaacccaacattgtatgattaagtgacccactctgcaacaatgatgattgtttacccagatttttcaaaaactaattaaatgaaagctttagaaattaaataattgataaataactaagacaaagaattttacgtggttcatgcattaattatcccgagtccatgagtaagtatattggccttataggcttcttgaacatattacaagtggtgtttacaaagtaaaaccctaactctgcttctctaggtttctcttaaaaaaagaagaaaccttataggatattttggcagagcttcgactatcattttttcgatccccccttataaagaaatgaaggggtttatataggctaaattttaggcccaagtatacccgtgacctgtgtagggttttgtaaaattctgctcacaattagggtaaaatacattatatagtatatacatgactattggaccccttagaaggttttttctcatggggtgacggttttgtacaactagaaccactgtatgcagggcacgtgtcaggaaaaagtcatgtctggcaaaaaaagtgctctaaggggctgtaaaaaaaatgggatattcagaagaggtgcgcacactaccatagtctgacataggggacaagatcaaatcctatgtcaaaaaggtagcacgtcgagggagacgtctagcttccacttcgtagtaggcttccaatattccctgtatacaagacatccgtcttatcttcaaatggcttccaggtatctccatgtagacttagtaggtttaatcttcctgaatcctggaaggctgggaaggctttcgatcctggagggttgctttatcttgtggcaaggtgctaaatctctcccaaacctaggtctcttccaggttatcttagtctttctgcgaccttttgcaattaaagaaacttaagcgatgattattcaggtcatcatcttctatcttttgtcacgtgcccctgttccgcaaacacggataacaatgacattatctggtttcccttggtcttgacttggatcttgaatttccttttgagtcttgaattgtcactggatcttaagccatcttaatcttgaatttcctcttctaggatgtctacctcgagccattaaagcttcatcagaccctgactcttgctttattgtctttttctaatttaattcaacatcccttgatttcatagtgctcattacatcctccaaagtgagagtgtccctaatatacaatataaaaactatcatttctttaaattgatcaggcaaaccattaagaacaataacaacttgatcttcttctttaatggctccccccatgttagtaagagcaagagcaattctatttgaatcatctaaattctatcctaataagacagtagcattcatcgtaaaaccataaaatttcccttttaagaagatctttattgctgtggattttgccatttaaacttgatcaagtttgctccaaattcctagagcaactcattgtttgcaagattcatggttattatagattgcacttgcttcatcacagtatcactttcgttcttcttggctgcatcgacttctttctctattttcttaacaccttcttcaagtactgaatcaagtttttggtatatcaatattgttgtcatcttctcctcccatagactgaagtttcttgatccatcaaacctctccagatcaaatcttgttgaagatgaagccatgttccaatggttcttgaatcttgacagcttgccaagattgaattctctttctcgaaattctaagctctaatactattgttgtaaattctaacaacacagaactcaaaccaagaacatttcaacaaatcaaaaccgaataaacaatgaaaaatcaataagaaaattaaaacataaaataaaattgcaaaaaactaaagtaaagaacatcaaatttttatcaagttcgaccaaaccaaagggcctacttccagttattctaccgagtgatcttctccattaaaatgatgaattattagcttgagttgttgagtgcacctaaagaacaattacatatgaatacccttgaaactcagcttgagtttcaactcaaagagcactaatcttggtcaagttttccaactctcttcactcttttttttctctctttctatgtctctctccaactcgatctcaatctcgctcaattcagtataaattgtgttacaataccaaaataactaaaggcctttaaataggaaaaagaaagaatcaactaactaatgggtgcattaactaacataacagaagcgtacaacatttcagacaaattttactgaacgaatgatgtagcattcgaactcactaacagttgtttattaaaactattataattcaattttttttctatgaattaccaaacaacactatatttataatgttaaacactatctatatcacccaacaataatggtagcattcctatagatgatgtataatagcaatagttaaattatttaggtaagatataaataatgatgaaaaatattgctccatcaaatgagctattataattaaggtggtgtttggttggaaagaatgaaaacataagaataagaatgagaatagaaagagaatgaaatcaactttaaaatgcataaaaaaaattaaaaaaatatattatatttttctcatcttgcattagaatgatatttctttctttttttaaaatagaatagtcattttaccaaaatgatggaaaaatcattctattagaatgacattctaatatttttaaatgtaactaaacaaaagggtgaaataaaaattatttcatttctattttattacgtacctttagccaaacgccacataaaagatttagctcatgaatagtgcttagctacatgtcaagaagcactattcattgagctataaatattatatcaactttttaaaatatttttataatatatgtgtgagatatttattatatttatttatttacttataaaatgtataagatatattaaaatgaataattttcaaataatatagagatattaaaatgtagtaaatgtatgggttaacatagaaaaaatgacagttttgacaaagtattttaaaaatagagtagataagctaatgcgagtgctccttctactgctatacattagtaagggattatttcataaatgacaaaaaatttataattttataattttttttttnnnntatatttttacaattttttttttggtcttataaaaacatggagtgttgtttattttggtgttgctgctatgatttttttacaataatataaatttgttattattcgttgttttaaaataatattattttgagggtgttactgggtaacgtaaaaataatatttttctttaagaaaacaagtgaaacttgaaaaaaaaaatcataaaagtgtaaaaaggaatccatttttaaatatatcttgtaaatttgagtaaattatattgtatacccacttatctttatttttatattctttaagatatacctacttttatagatgatatcctcattataccccttaagttaacgtaaattatgtgttagagttaagtggagggtgaagatatattgggcaaccacttataaattatgtgttagagttaagtg

SEQ ID NO: 36262 - DNA, 5332 bp, Cannabis sativa
cattgactaaaattagggaatcaactatcactaattttatgttgttcatttatttttcactaattatgttatttttaataatttcttaacagatcaatgatccatgaagatttttttttatcatgaattgaagattgagaggcacgttaagtgtggagaaaaagagaagccaattgggtcgcacgatacatctgatgcgatccaccccactcaagcggagccggctccacgatacacaagttgtcctatgttcgtacagatgttccactgtgcaagcgtcaagaccagccaagattgtttctccttccgccacgtgtccccatagattagactcctacaaaacaacacattatagtgatacacacatttacccccgcaaatttttctccttatcgactttcggcgtcacacaaataaaactaaaataaaataaaatagcaaaacgaaaagagaagaaggcattattaaaaacactgagacagatctgaatagacacatagattgtggtttgggagctatggaagagaagttggtacagagattggaatcggcggtggtccgcttagaggcgctctccactggtttcactgccaggagcttgccggagaatggtgacgacgcgccgcttgatccctcgattttggccttcgacgacctcttgggccagtacttggctagggtctcggctgctgcagagaagattgggggccaggtccttgaggttaccgcaattcttcaagaagcttttactgttcttagggagctgcttgtcaaggtcaagcaaactcaggttcatgaatcttcttttttctttccaattacagttccaccttaaatgtgatgttttcgatctagatttgtttttgttttttgttgcttttgaattagcagattttgcattggagattcggacataatgttggccgaaattatatcattttttttaatattaaaaagaatgttttatgtgcttttgatattgagctgtaaacaatatctgttggatagattgatgaccgcttctgagaatgaccatttcaaaataggtaacgttttatttgtactctactatattggtggacggaattgtatcgatgtttgtgcttggatctgaaaacatttgataatatatgggtctattttcttctaagttggttggagattgaggtggatttgctacattttatgtatgttaatcaatttattgatcaaacaattatcggcccaatgttttgttaagccttgctgttaaagaagaatttgtaacctctacatttgttgttctgctctagttttaggaataaactttatatttgagctctgctctagtttcaacacggtgggtttttcattttctatgttttgctgttacttgattatgggttctttaaggtaatcattatcctcaatttaactatgtttgtatgtttctgaatgatctattttttttttttttttttgaatgatctatttggttaatactacttatacgtaaagaaatttttttgtcagtaatggcttagtgaaattgaagatgcaaattcaaataaaagaagagtgtcattgtcattttctacatggatgcaactgtttttggtgctcttttctgaaaatggattgttgtctcaaatgtgttttgtttgctttttgcagaaaccagaccttgcaggattggctgaatttctcaaaccattgaacgaagtaatctcgaaagcaaacaaattggcagaagggaggcggtctgatttttttaaccacttgaaggctgctgttgatagtctctctgctttagcttggattgcatacacgggaaaagaatgtggtaagtaatatgcaaaatgtttataaagagctaatgcatcttaaaagaatggaaaagtagttaagctgatcctgtcatatttatttaattttaatttctttttgtaaagattattctaattaattctacttctataggaatgagcatgcctatagcgcatgtcgaagagagttggcagatggctgaattttacaacaacaaggtattcacaaaatttgtgtaatatgccatattctttcatgatagaagttaatatgagttttatgttaaaaaaatatatgagttttatgtttaaaaaaaagtcaccacaaaagaaagcaaaatgctgaaaattaaggttaatttcatgtctgttaacgtaacacttttgatgtttactagtttaacatcattgttgcatgccttattttctttacaacatattagtcccacaatttgtttcttttgtacaaaaattcaaggctatgtcatctagataaaatgattctgtattcaactattaaaagacaagcatagttcctagccccccccccaaaaaaaaaaatacaagcaaagttctcttttgaaagaaaagaccagcaaagtttatgattacttgaaatgataattttcttttgttctgttttgaagagccatctgaatttgagaatgtttacccttaaagcatcttcagtaataacaattatccaagtacaaactgaatatctacactagattattatcaaattaacaatcgaatttattcagactgataagatcctacgattggatcaaattgaatttagcgaagttggtcagaaattacaccctagtaccctacagtaacagatgttggagaaatctgatagctctccaatagagcaccagcttgaaaccttatattttttttttttggatatcccctaaacttttgctaaccttttgtcccctcaaaacacaaattacaatcaacccaaatcaaactaattaccagcaaagaaatcacgatgctaatagagatatatgcagaaaacttccaagcacctctatgttgcacttggtactaagatcttgctaattggccatttccctccagctgttgctaattggccatcttagttctcacacatgtgaagcttgtgggttatcatagctctttactaagttgtttgttcagtctgaaactgcacatctacctgatctttggtaatgttttagaggtgaattaaaacaaaaaggtcctatcccaaagtaaatgcagaagcactttgagcatttgtgacacgtgacatttttaatgtatagtcttcatcatgccactaaggctagctcggtgatgagtaacggtaggggtaaggtagaggtctcatgtttggacctgggacctctccattatttgagtagtaatggtaccatctgtgtactaaactcttcaaaagaaaaagaaaaataaatgtgtagtagtgcttcatcatcgacaatatttatgtgactatacattaacatggcatttctaattcagattcttgtagagtacaaaagtaaagacccaaaccatgtagaatgggccaaagccctgaaggagctctatttgcctggtttgagggactatgttaagagtaattatcctttgggtccagtttggagttctactgggaaagcagtcactgctgctccaccaaaagctcctagacccagtgctcctgcccctcctcctcctccaccagcatctctttttacatctgaatcttctcagccatcatcatcaacaggttacaagcatgggatgtctgctgtcttccaagaaattaattctgggaagcctgtgacgtctggtattttttcttttttgttacgttttttttgcctcttttttatttattaagtttgctttaggtatgtattggcctgattgctatttgtttgtaggtttgagaaaggttactgatgatatgaagacgaagaatcgtgcagagagaactggagttgttggttctagtgaaaaagagactcgtaccagtgcaccttcattttctaaggcagggcccccaaagctagaacttcaaatgggtcgtaagtgagtattattacatctgcatggggatttaatttgtatagggatgatgccagtttgtgatgttttcaaatggatgtttattttgcaggtgggttgttgagaatcaaattggaaagaaaagcttagtgatcgatgactgtgatgcaaaacaatctgtatatatttttggatgcaaagactctgttttgcaggttcaaggtaatgtatgtgtattttgcacggttttatagtttctatctttcataagaagtcacatttagtttatcacgatttcttattgtgcaggtaaagtaaataacatcactgttgacaaatgtactaagatgggagttgtgtttagggtaagtagaatatcatttgtgcaagaaacaatctgttgtgatgtggaatatattcttatcaaatgctttttttcctataaatacaggatgttgtagctgcttttgagattgtaaactgcaatggggtggaggtgcaatgtcaggtattcatttatgctatgttgagaatcagttgcaagtatattctaaaaatgttaataaatgaattttcttatatatatatttatgctctgtagggatcagctccaacaatttcagttgacaatacagcaggctgccaattatatctaagcaaagaatctcttggggtatcaataacaactgcgaagtcgagtgagatcaatgtattggttcctggttctgagccggatggtgattgggtatgtttcttgttttgtgtgacattctaatatcttgtttttgactacttgatggattttgtagcggtatcctatagtctaattggaatattttctttgattctagaatatatgaccctgatgcttttatgtttcttaacattcatgaaatactcttcttcatgctttaaatggccaaacacacatacatatatacattttttttccaggaaccggaatgcatttatggtaatgctaaatcttattcatgcaccagtttctatcatgtggcttatcattttctgctcttgcagggagaacactcgttgccacaacagtttgttcatatatttaaggatggtcactttgagactactcctgtctcccactctggagggtaattggtacttatttcagttgccaattgcgtatattgtttttctctcatattcatttgggctgtggttactggttgcgattcgtgtcttctgttctttatttaattcggtatggcttataatgggtgatgcattcactttggtttcattcttggcaaccttgtgagtttgataaacattgggaattttcagcatgatttttcttctttctcgacagtttttttttttttgagtctccgagtgagattgtaacagctatcaagctgtaaagagccatatatgtttttttttgttggtgcacgaagagccatatatgttcttgtaatgtgctgctatcaattttttttttttttttt

SEQ ID NO: 36263 - DNA, 5161 bp, Cannabis sativa
ttagaatataccgacaaaacaaaagttgacgtttatggtcaatgcatgcatatactcatcaaataatttaagttacagaacagatcacgatctctctctctctcaaaaaaaaaaaaaaaatatatttaaaggggttgtgagtatccatgctaattgaagatataatatatgtatgatcatctgaataaaaaacacccttagtactgtgtggagtggagagaaaacaatggccagcgatagtttaatagtgagcaatgttatctctaagcatctaatctaattatacatatttagaatatatattatatataaagagatacgtggacgaattaaaattatgaatggagattttatggataccctaaatccaaatgcaatgttgtctatttcaatcaattcttttgaggtataattttgaagttgtgtcttaatttgtgttttacaaaaattattaattagcctcttaaatgacaaaataaattctatatgtttcaaaagagaattgttaaaagatattattagtgtctagcattttttttgatgtcatactactatttttgtagttaagtaatgagtcttatataatttataagaaaatatataactcctaaaaaatatcactaatcaatcgtaatgtaaaacatatggaagatgctggacaccaccgtgcccaataacaatgctctttcgaaaatatatagtataaataagattatgtgctcaatttttgaaattattttttttataatatagccaacttgaagataattcttagcacaaacacacacagtaaacgtaattacttttgtcataacatttctagatcgagttattattaagttttattttgacaataaattaattcagggtacattttagtactatttttttaaaaaaaatacaagggtcaatttatcattaatcaaaataaataatctaatcagtaacttttgcaagacacatggtccaaaataatattaattttttttttcttttaatgtactcaaaaatactaattcacctgttttctaaagagatagagataagttgacactgaggatcaagaattgagtacattattgggagtttaatttttatttatttatttatttattttgacaaaagaagaaaattttcatcaaacaatcaaatcgttcatcattatagaaatgaactccgagtcgcttgctcgaataatatgatcagaaataaaacgagtaaatctcgctagaaagttagctacattattagcagatcgtttagtaaattttaaggaaatatgtctatcatttagttcaattaataacctcttacaaacatcaataattctgctaaaataggataacatgatagttgaactcctgatagaacgactataaaataatttgtttctagatcaacttttctccactgttggtacttaatccaacttaatacttcacaaataccaatggcatctacaattttaggatgtgcaagagtttaatttttaataaaggagatatgagaaagaaagatcaattgacacaaaagaagaagaatttgcactcattaatgaacaatgtgaaaattggcttatattctctttttatcaagttttgcaccacttatgtgagatgagtttgacctttcctatattaacttatatagttaaagtaaaaacaaaaaagcttcatatacgtacgtatcattattattatactatatataagtaagcttatacatcaaaatattaattcataaagtctactactttcggctttgcataataattaattaaactgactttccaagagatttaatttatacaaagtggatagtattactttgtcactaaataaatctatattcaataatggaagagaattgttcctttttatacataaaggggagaaaaaagagcattgttattgggcattagtggtacctagcacctttaagacgtatcgccttgcgattgactagcgatacttcctaaaagttattatattagactatatgggacccgatactatatgtaattaatggtatttatttttctataacaaccttattgtttagtaataaagtaatattacatattaggtcatgaaaaggcaacctttttcatagtggttttcatatgcagagacctgaaagtgtgatatatatgtatatatttttttcttttttcatgccaataacaaaaaggatgtagtcatgaagcagcctatgaatttcaaagcacacatacatagcaatgacaattcacccactgaaattgaaagtaatctagctgaaagatatgttttttttttcttttcggccaaagaagactttatacatacatatatatatttatataagtgaaaagactaaagggtgatttgtaaagttctttttttcatgattaaaaaactcaagatgatgactacaggagtcgtgattcccaaatatataggcctttttttcctggaaattcctcaaaggaaaatcaatatgtgtgcattgacacatgacctcaccgttgtgaattagtgatgtgacttattttgtagatgagtatcataatattttttagagtattattatttggcattacatattagatatttcattttgtaagcgacaatctctaaaaattattatattaaattatataacacctgatatttaattcgcatattgacatataagaaagtaataagcactgttaataccttttaacaattctctattacttaaaggaaagtctattgtactttgtacacctctttaattgagtgtttcggtagatcttatctaattcagtattcaagaaattttttagtgtactttttaattattatttaagattatctgtaaaatttcagaaaaattccaataatttataatgctgttcaaatattgattatttttttttattaataatatttgaattttatttttaacatagtaaattatttaaaaaaaaaatgaaagtaatactaaatgttagactgccaacataagcatgatatagcttggcgattttattttggacaccttcctaaaaaattttcatattaatagatgagtatccattcttatattctcatgattctatctttctatttttaattaatggattttgattacatatttttccaattatttagtatgtgactatacttaaataaaaaaggaagaagaagagaaaaggaatattgtgatcgtgtgctgtgcacgtatataaaatatataagaagaaagaaaaagtaaaatagaaaaaggcatgatgagtttgcttaacccctgacatgaattgaaaaaccataggctgaccagttaccgaccctttaagatagggacaaaacatagttgtcaatttatcaacaaattttctccatctctattcaaaatggggccacacccaatgcaattccaaagactagccagctaagtgtaaacttcctttataaaaggtacataaaaacacatatgaaaagaatgtactctaattctattaataataacaaccctcaaaatattttgtcatagaaaaaaaaaatgttgatggagtctaaggagtctcttgctcaattgggatcttatcttggtgggttaatgttcctttgggcaatatttcaacaatttttccctaatcaacttcgaaattaccttgagaaatactcacaaagattggctagtcatctttacccttatatacaaatcagattcaatgagctgactggggaacgtcttatgagaagtgaggcttactctgccattgaaaattacttaagcacaaactcatcactccatgcaaagaggctgaaggctgatgtagtgaagagcaacaaccaatcacttgttctaagcatggatgatcatgaagaagttgttgatgaatttaaaggagtaaagctttggtgggcttcaggtaaaaacaattctaaaactcaaacagtttctttctaccaagtttctgatgagagaagatactacattctcactttccataaaaggcatagagaacttattgttggggcttaccttaatcatgttcttaaagaaggtaaagctattaaagtgaggaataggcaaagaaagctttatacaaatcatggttcttattggagtcatgttgtgtttcaacaccctgcaacttttcaaacacttgctttagagcaagaaaagaagcaagatatcattgatgatttgattgcttttagtcaagcagaggagttttatgcaagaattggtagagcttggaaaaggggttatttgctatatggtcctccaggaactgggaaatcaaccatgatttctgctatggctaatttgttaaactatgacatctatgaccttgagttgactgctgttagagacaacactgaccttagaaggcttctgattgagacatcaagtaagtctattattgtgattgaagacattgattgttcactagagttaactggacagagaaagaagaagaagaaggagaaaaaggaagatgatcaagatggaaaagaacacaaggagaagaaagaagagaaagaagataaaaacagccaggtgactctttctggtcttttgaatttcattgatgggatttggtcagcttgtggtggtgaaaggatcatagtttttactactaattatgtagaaaaacttgaccctgctctaatcagaaagggaagaatggacaagcatattgaattgtcttactgtggttttgaagcttttaaagttttggctaaaaactatctttgtattgaagaccaccctttgttttcaacaattggtaaattgttgggtgaagccaaaataacacctgctgaggttgctgagcatttgatgcctaagaaaattgtttctgggcaagctgaaatctctctcaagagtctgattcaaggtcttgaaaaagccaaacaggatgagaaactcaaagctgaggaagaagaagccaaaaagaaggctttggatgacaaaaatgaagataagcatcaagaatcaaaatgtgacttaaagagtaatggttactagtaaaggagtcattctcaatttggattattattattattattatgtacaattcactaattcagtttagttggtattacccaactaaacttgttttacaattagaagtattaataaaaatttctcttttctttagttttttcttttcttttctttt

SEQ ID NO: 36264 - DNA, 8994 bp, Cannabis sativa
ttttttttttttttttttaagaagctactgggaaaaatacattacgaatgccaagaaattaccatatgatatccattgacaaatttatgtggttcatactatgaacacatattttactagtctctttaaagattattcccttgaaattctcactacttttccccttaaagtagcacataagaaatttccaaacgaaaaattataaaaagtgaccttatatttaaagtaaaaactaaataacagtacgtatttcggtatttgtggtattctagtaatattactattatcaagcaagtcaaccatctacaactaaagtctcccccaccaaaaataaaaataaaaagacatacaagtctactaataatgtttcagtccatgatgagctaatgacaaaaagggtcatataatagactataattacatctgtaatgcatagttagctccccaaaatccatactatataaagggtattttcttgaaacacagcctgatcgatcatcatatttcaccagctgaaaaagcaaagcaagcatcttttgagcctgaagagaaaaatctgtgttgggaaagatgatggctaatgcaaagcctgaaactttgttagccaagaatgaactcatcaagagagctctctctgaggccatgaaggctcacaagtctccagaaaagcaattcctgagaaaagctagtagttcaccctcagattcagaagttatttacagctttccgggatcttggtctgtcacaagttggtatggtaacagaacaagaccctttggagaaaaggaaattaatcttcaactatttccttctatgagaagcataggcaacgaggaaaaagcactagtcaatgaagcttttgagagtagattccaatcaatattggcgaaatcagatcttaaagataaggtatgtgctgtacatgtagttgttaattggtttaaatttagataatttgattgataattaaattccttggttagaaaatagaaaaatgacatctggggtttgtaaaaacttcatactgggatttgtatgagttgcagacatgttttctcacaagtggtaccattttgttgtattgttttttctactcaggtaaaaaatgctgcaagggagaacaagaaaatagtatttactgggcattcttctgggggcccaatcgcagttctagccacaatctggttgttggaagaaaatagaaaacaaaacatcaaaatctcaacacctccattatgtgtcacttttggatctcctttagtaggaagccatatctttgctcatgctctccggagagagaattggtccgactacttcatccatttcgtttcgatattcgacattgcccctcgggtctttcttgctcctcttcccaccaaagaagaagagtttaaaacaatcctcaaatccttgagtggacaatcacaaggagcaccaaacgctttggttcaagattacttcgtcgaagtaatgaggaatgtgttgactcttacaagccatgttgcttgtaagctcatggaaagcacaaatctgctgctggaaaccgtgacgagcttcatcgagctaagtccttacagaccttttggggtttatgccttcttcaatgggcaagaaaagcttatcactttggacaactccaatgctgtcttgcagctcttgttttacacttgtcagccgagtgtggaggctgaagttttggagattgccaaaagaagcttagcagatcactatgcctacgaatctacactgcagacctatcataaagactgcttctcagttggtgaaccaagatcagatacttacgaaatcgacacagtaaacaaggctgcggatgcctttgcactggtaaagttctctttctccatcacttgtgttcaaaccttttgtaacaattaagctcttcagtcatgtttggaatatcataagacaatgaatttgcagagtacaagcggcagattgtgcctgctcgcggcaggagaggcagaggtgcgaaagaagacaaaccttaaaaaaacagttgaatcaaaggtaagggaaatggaaaaggcattggaaaatatagagcgttacaagaatgagtgtgagcttcacaaactcgggtactacgattccttcaagcttcaaaagaggcaggaggatttcaaagccaatatccaaaggctggtactagcaggcatttgggatgagattcttgaattgttgaaagggtacaaacttccagacgaattcgagggccaagctaagtggatagagctaggaactcaacaccgccgccttgtcgagccactagacatagccaactactacagacacctgaagaatgaagacaccggaccatacatggcaggaggaagaccaaaacgttacaagtaccctcaacgatggtacgagcatgacaaacagacgagagaaggtgattgtggtgagtcctgtttttgggcagaggtggaggagctctgtactcatgggaacgaggatgataaagctaagaagattcaagaacgggttttgcaatggaagaaagacaatgttattggaaaggatgtattcttaagtaattccacctttgttaaatggtggaatacccttaaacccgaaatcaggtcagatgccattaggcaactcgtccatggttccgaatagactttcattattgtcataacaaatatactatgatcaatgctttaaatggttcaaatatagcaagtaaacgagtttgtttcatgctccaatgtccacaccacttggcaaaaccttaaagggacgaataagctacaaacaagtgaattattactattatgattagttggacaaataaatttttgcacagcattattattagaggtggcatttgataaatggttatgaatattatatataattatttaattaaattatgtaaaaatacttaattacatatagagtaatttgcgcctaaatctttcaaactttcagttcacttacaattaatcttctaaactcaaatttttgtgataaaactcttcaaactattgaactgttagtaaatttaaggtgacttacatttctcaccgttaagtaccaatatggactgccaatagttaagtagtgctaagcacatagcattacttttaaatttgctaacagtttagtagtttagagggttttactacttaaatttgaatttagaggattaattacaagtgaattgagagttcgaaggatttagccacaaattagtcttatgtataacatttctaactagtgctaggtatttctcatttttgcacccctctcgaattgcatcaacaagtactagaggatttattggtcaaacaattgaaactacaaaaattcatcaatcaaataattgaaataaactctttcatgttccaactaaatttaaaaaagaaccgatttctatatttatttgcacacattttcaggattgataactaccttatccctgtcatcactcaaaaaaattaacaaaaagattattcatttattttatttttggagaagtcctcattcttcaatccagcaagaatctacttggaatataacgaattgttatgccaatgtctaccaagcaataggagcaacatcaaataaattaaaaaaaaaaaacagaaccacaaaaggagtaacaatttcaactttatgttaagaaaaaaaaaatcaactttattacatgaaaaattaatctttaagggcttgtgatgtattgtattgtataatattgtgttggattgtattaatattatttaatacaatattatacttgatattgacttatactaatagattgtgtaaaattataaattctttccaataaacttgaccctaactccaatcacgccctggacttggacccaaaccccaaaacatccctcgcaaccgaattcgaaccgagaccccaaactcggacccggatcttaccctgaactcaaacttggacagaactccaaccttaacttggatccaaatctcggacccgaactcgaaaccgtgacccgaacttgaattgggacccaaaccccaagccttgggtttgggtccaaattctaagtttgggacacgggtccgatttcgggaacggagtcgaggtccgagtctggggtctaggtccgcggtctggggccgtgtccaatgttcggagctagggtcgaggtttgagtcgagggtctgggactctaggtccaatgtttaaggctagggttcagggtccaagtcgagggtccaggtcttagtccaagtcaaggtcgacgtttgggtcaacgttcaagtccaagtctagagtctagattcgaatccatggtcaaggtatgagtatggatccgaggtccgggattagacccggacactttgtaaacattataatacaagcacgagtcatttattatgtattaaataattcgaatcacattgtattaaaatttatgatcgtaataattaatacaatataatattttattcaaatataatgttatttattatttaatacaatataacatttatttagcctaccaaacaggccctaatctagaaaaaggtttggttcgtcatatttttacgactatgctaacaccaccaccagtggtaaaatacaagtgattggttgtacattataattaaaaaaaaaagttttttttagcaaaaacataagagaagaatctattttaattgtatcaactaattcaacagagagttatacaacaccgaaaaaattgggcacaattgggagggatcaatggttctgggcaccaaaaaaaaaagctatttatcctttttaaaaagatatttttaaggaattctctagaatcatgggatccgtgagtacaaaatctagatgttcattccatcagattacatcaacctaaacattttcaaagcacattcgccctaaaatcccatttagatgtaaataccaaaacaaagtccccatctggctaaatcatccaaagtgttgttactgcataaagatgaatatcagtgtctgaataaataccgttacacagctttaataccagacccaatgatataagacataaccaggctaaattgaatgtagtcccaaaacttccatttctgtagctggatgaaaaaactctttatacttaagaaatttaatcatgtagagaggccattaatgctttgaattcctgaacagctctccttaaacaatattaaatattcaaacatagtattgtttttttatgctttttctgttcctttgctttttgaagaaaagacaccagtcaaaaggtttgttagtaaaaacaagacattataaattaaaaaaagaaaaacacacacattttgtcaagatacaacctttgatgatattgttatgttagctactaactggttcttcgtactttagtaagactaactcatgaatgcctccaatttacaaagcctaaacagaagctaaaagacaatttgttcaatacagactaaatgacctcttggctagatatcattcttaacggtggctattcaagcacacaccatcgaacctgccacattaccgatatctactgcaagctgcttgctcttattccaatcacaatctatagccatttggatgccaattacgacaataaggctaactataaattcctattaacatattttgaaacaataatactaactaaaaatattgtgtttcaatcaacaagtaaagaaaatcaagttctcctcctacagtattctgatgatgataaataagtaactccctgagtgtgagtgcttactctaagaaaggagagctcatattccaacattaataaagactgtagaaactgcacaaagcgttctactacctacattcatctgtcagactgtcaggctctactgtcattggacactcaaaacaaattaaaaatatgagttaatattgatgaaaattgtaaaaaccgcaactaacgaaccatgataagaccctcctgacattattgttaaatcaagtaaaatagaaactaaagcaccaaacctgacatatttctcccaagtcttcccagttgaaactctgaaaaggcctaaaggccacaacacaacttagaaagcatgtaggtttaccgcatataatggtgaagaaaatagatgtgtcgtaacacttaactaagtatttagtggcaattcaaggattcaaaatagatcatgatttctaaccagggatttctacataaagttaacagctcttattggcaaggtcgtgaatgaataatataattccaacataaaatattatgaaaccaaaaacttaaaagtatgtcataacgtagtgtattattactctttcattgtattgaatttctataccaccatatctattcacatacgaatatttagtcctctacattagcacatgcaccataaagatacgaaccataatcaaaagagaagcagttcaactctcgggtgctcaaaactatatgcccatatctaactattgaaaccaagagtcttgcaaagcaacacgagacacatgtaaaacttaacaaaataaagaaagcaaaatcccaacatacataactcgtaaaaacagagacctaagaccttgtaaccatactgcaagaacgacccaagcggactgtaaggctacctccttggacgatggcctccgcctctgccttcacaggagcacagtcgtaaggcttccggcatccaggacagcgtctatcagcctcaagaatcttattatgacagaagaggcagagcctaaaaccacacaaacaaggcaaaaaacttgtgtccgtcaaatccaaatcttcacagcaaattggacagttggatggcggaatggtgttgtgggtccaagggacaactccaaagccataatgctgcctgtttgaattaggcaggctaagctgcttggataaattaggcaaacactgaggacgaaatgcgtcatccggcctccatgctcgggtactccctgaaccttttgggactgccgttgtcaaatcagatttagtgctttcaacatctaaacctgacccattagtttcttgacaagaggaaaccaattggggaactacttcacaatccggaggagattctgtacacggggtttctgacttgtcattggccgccaaagcatcagccacggcctcccagtcatccaagcatccatcatcttcctcctcctcggtaatactccctgagcaacagccaccactgctactgctggaactactgctactgcttgacccagtaaagtttgtccccgaaccatggcttcccagaacactactagtcaaactagtaggactgtttgaaggtgaatctgaatcgctatcattatggtggttggatccgtcgttttctccccctctcggtatcgtctctaaattccctaaaggacggtttctctccttggctggttgaacaccatccatttcctccttgcaacacttgttcttgacagcaactaattccaataaatccaaataaatcaaagtaaattacagaaccataaccaaagaatccaacgagtaatcatgcagactccaaatatccacgcggatatgtaactacacaaacataaccagacaaacccatttacaaaatacaacagagagatcataaacataccttgcgaaagccattgctcacgacgaacatcaagcttgcactgcttcaatttggccgtcctagcctaaagaaaggaaacaaaaaaaatccaaccagaacagttgaataaagataacataaatattattaataacaacaagaatttcagaaacctaacaaataaggggggaaaaaacaaatctttaaaagaaaattgaaatctcttaccctcttcttcttccccaaatccttagagttgtgctgaaccgaaggaattgaagcgttagcgaccgaatctgaaaccatggctgctgtcaacaattggattcgaagatttgccccaaaaacccctaaagaaaatttttgaagagagagaaaattgaatggataacggaaactcctctgctccgctcgcccttgttattattttctttttctaatttttttcaaactctggatgaactttcgagggtggtagatatataaagccgtcaagttacgaaaatacccttatttttggcttaattttctgaaactaacctatgagatattctgggattctggataagatgaaggggagatatatgaaacgccagggttatctttgtaaagttgcaatggatagcaaatacggcgtcgtttttaaaattggtgaaatttatagccacgttgttggaaaggagggcaccatcattatttttttttttttttgacaaaattatgtttaattttttttttgaaacagtctaattaatcatccaaaatttctttaaaatttaaacatggatttaaactcgtgacagcagggattaacaatataaataatgttattatattttctcaaaaaaaaaatgtatatgtacagtattagtttcttcttcatttttgtatactggtaatcttctcaaaatataactattttaattttcctagaaaaaagaaaacacccacaaatggtcgcaccacttttccccattattaatttattaagaaaaccctaatttaattaatctataattcataaaaaaaaaataaactataattattgaggatgcttttattggacttcttttagcaaattttaagatcattcgtaagctatataaatataatttttctaaaaaagtgtaactttgatttcaatttattagtacaatcactacatattttgtttcgattattatataaaaaatatttagtaagctataatttggttcctttttattttctcgttattgattggtatagagtgataaacaaggtagagtttaaaaatattacttaattaacagcaaaagaaaataaaaactaatagaaatatatatatactaggtaggagttatatactaggcacgtaaatattagttttaggtaaagtttagtttttttttttttatttcttcttatttagattgtatgtgaaggtatgatcat

SEQ ID NO: 36265 - DNA, 6165 bp, Cannabis sativa
ctaaaagatatctaaacaatgtggaacttttacctttgtatgtatagtttattttttaaataaaataagagaatatgccaaaaaataggaaaaataggaagaaagaatagtatatgtattaagttttaaactatattatatactaccattagatttaattttaattttaagaacatatgctaaaaaatacacatacacaatctttatatagcattctattatagatgttcttagtagcacatcatcaccgattagttaaactagaataattaatatttttgttcttaaagtttttattctagcaagatgtgtacgttatagtatatgttttgttaataatatcctttaaaatataatatttacagtaatgtggtccttttactatattttattcaatttgattgtaaatcgagtggcaaaataaatagcagttgataaatagatgcatattaaatattttcaccttttttagttgaatgattaaaatactaaaataaaattataaattattacagaaaaaaaaagtattttattttattattcattaatataaaaagagttaaaagtatttaatttgtattcatttattaattattatctatcactttgtttattttacgataaaattaaataaaatataataaaataattatattactctaaattattcaaaaaaaaaaactatattactctaaacattatattttaggagatacttttcgcaagttgtattaaaaaaaatataatttaatagcgtaaaaaattcatagaaaataaatattaattattcattaaactaatcttcttaattaatttgtttctttgaaattgatgaatggtacagaaaaggttgcaagtttggttaaatgagttcataagaaactacatacttacatggagtaacgtcatataataacaataggacatttatattataaaagtaagagaaataataataataatttaagactcgtggatgccagctgtctcttattgtgcaagtctttctctcaagagtgagagagagtgtagtagtgcactgtacagctataaatttgtgtgtcgagcttactcgatctatatttgtatttgattttcaaattatgaatattgtcctactatacaaccaaaaaatataaatcgtagcatgtcttgataaacgaataagtctagaacgacttgtaggctcgtatttttttttgacgtattttattcgtttcagctcgtatttcttaaacaagtcaaccatttttaaatttaggtttaaatttgtgatttattttttcattttctttttacaatatgtgtatttttcttaaaaaaactatatgtatattttattgttttagttatatttatataattttttaataatattttatagataattatataaaaaattattatattgttagaatttaaatattcacttataaatacttaaatttttatgtcacactttttaaataaattattatataattttaatttacatgtttttaattataaaattataatattgagtattatatttaaattttgttattattttaacttatttataattgaaatacatatttattattactaataaattataggattttttaatatgttgcgtagtgttttttaaatttgtcaagtattctgccttttagattaatttatttgtgcttatgtatcttgttttttgtgttttttttgtcatgtcgtactttaatataaatttttcttgtcaagttgtactaatttatatcatcctgtcgtattttatataaatctatattttttcgtacttaattatgctcatactttctagactggtatcgatttcgtgtcgtgttaaaaaacacggctcgttcgtatttacattagtagtatagtgtattgtgtaagttttaatgtgtaagttttaagggtaataacacaaaatacacaaaataaaaataataaaatttggaggacacatgtgggctcttgtgatatttattgtctaatcaataagttaggtgtgagtaaaggacgagggtcatgatccattgttaatctttagaggcgtataattataattaatacaattaatgaatatatatatatataaaagaaaaatctatagcaccataatgcttgtttagtggattaattattaaaattttaaaaaaacttaaatgtgtgaataatgaatataaatttcaaactgtgttactttttatcccaccttgtcttttttattttgaaatgctatcccaccttgttcatactcttcacttttggaatctttaatcattgccatttttctttcaaaaggaaaatcatataattattatcatgaattttagctttgaaagaattttaatttcagcgagacactcctcgtcgtaggagtaggactacctcatctgacgttgtttaatagtgaaaacagcaaattattgtgtggaaatgagattaaaatccattaattataagagcatcaacaatgcataatacccctaaaaggaaaatttacgcataaccacatcattataataaataactagtaaacgtaactaatagaataaatataaattttagttctatatttaaaaattattaagttttttttttagaaaaaattcagcattttattaagtaataatcttggttaccaaataaggtaacaatccagtaagaatattgtccaaactgaaacgacaatcaggatgttagaggctctagcaaatgaatgagtcaccatattaaatcatctttttacaaaataaattgaaacatttctcaaagtacataataaagccttacattcattaatcactttaccaaacatagaaatcataacaatagtactacgaatggcttgaatcaccgagagacagtcagtttccaagatcacatgtggccagtggtgatctttcatcccactcaaggcttcgcgaaccccaattgcttcaaccaccacaaggtccaccgaaccatgaaacaatttggtatagccttctaccagtaaaccatttgagtcccgggctacaacaccaacacaatagctatgggtctctttaaacacagccgcatcgatattaatcttaatactatttgtacttggagcgatccactgctcagtcccgtctcccggaatatacccagtgaacaataaatcgttacctgatttttgagcaatacgccattgattaagatagttctttgccaatgagacgatgctatccaccccgactgactttttaggccataccttgtcacttcttgtgttccaaatggcccaacatagagccataatcaaaatggtttgctccacatccagcaccagaaactgcccgatacaccagtccaagaaggacgtatcctgctccattattgtaccaatacacacccggttctggcataggacagcagcagggcaagtgagaagagcatgggaaatggtttcagcttctagcgaacacacaagacataaaatgtcaacctccacacgcttcgattacagctgagacatagttgggagacaacatttggcaactctcaatgacaggttcttcatctttggagggattttcaattgccataacctcctccaaaaacgatccacaactgaatcatcgataacagcttcaccatttaactcttggaggagcttgtaagtgctcttaaccgtgtataggcctaatttatccttggaccaacacaaagtatccctgtccggatgtggatgattggaattagctgcaccagttgacgatcacgctgcactaacaagtcttctaaaatctcaacatcccaacccgagccatcaattgacaagagataacagactttaacatgatggaggcttgggtgattagaaataatcataggattatccacatcagggagccacggttccccaataacaactatgcttctaccgtcccccacaacccaacgggtgcctctcattacaactgactgtgcttccaaaaataccccgccaaacaaagcttggattggagccaatggtagctgtcaagtacgaaccatgggggtaatatctagctttgaacactcgggaaacaagggacttaggatcaacaagtagccacctaccttgtttgcctaaaagagccaaattaaattcatgcaagttacgaaaacccataccccccttagttttgtgcttgcaaagatgcttccaagacatccagtgaatcctagaagagaagctattagacgattgccaccaatatttagctaacatactttccatctctttagtaatctcaagaggtaataaaaagatgctcatagcataactgggaagagcttgagcagccttctttatcaaaatctccttacctgcccgagaaaggaatttagtgccccaggcatggagacgtttttgtatttttttttcttttaaataacccaaggccgcaatcttattacgactcatagaacttgggaggccaaggtacaaactaccctccaaagcaatgccgatgcccaacaactcggtgagcctttctttcacttcttcactagtgttggagctaaagaaaattgaagacttgttgaaattaaccttctgcaccgaagccaactcaactttgtggagaatttcttgaatctgaatggctttctcataggtagctttgcaatacaaatagttgttgtttgtaaaaaagcatatgtgaaaaacgaagagctccattagccactttgcatccatgcaaccactcacgagtcttgtacttgccaaggagagccgagaaaccctttgcacaaagggtaaagagatatggagacaaggggtatccttggagaatacctttggatggaaagatagggttgatatcatgactaccatgtattacttggtatctagttgatgttacacatttgagtgtaagatgaacccaatagtcagtgaaacccagcttctgcaacatagcttaaagtaaacaccattcaatacggtcatacgccttgcttatatccaactttagagcaatgtagcgatctttaccattccgtttccttttcaagtagtgtgtttacggtgagaactcgttaactaagttagtggtcgaaaaaggcaagcttgcccagaaatgtgataaagataagataaagatgaaggtgaaaagatatctaaatattcctctctatattgaattcaatatctcggttacacaaaataattttccaaccccctctcacatctgagatggagggtatttttaggctctaatggcctggtgtacaaagtggtccaatggggacaagatgttgctttcccgctgcatgctgcaggtgttggaggtggcctgggacctagtactcttgtctagtgtcagatggtccctaattacaagctgcaggaggatggtctccgggtacatgcgcgtggtcccagttggaggctacaggaggatggtctctgggtacatgtgcgtggccccaatcataggtgctagaggtggcttggcacttggtacctttgtctaaggtcagatggtccccaatttcaggctgcaggaggatggtctctgggtacatgcgcgtggtctacaactgcacgcgaggtggtcccgggtatagagtgttggagagtggttgcggtatacccttggtcgggtcttcatgcattgcagttccgttgtcgccattccttgtacctccttgctctcattcttcagaaggcgtggtggtacgctcttcctttgcatgccttgtccttggagctcttatccaacctcatccttgtctacatgccttcgcttctttccttatatgcacatccctccaaaatacatccacgaaacctcacctttgactccctactcccaaacatccaaattcccctacatgcacactcgactccccccacatgcacacacgtttcgcatgcaaaccccccatgggcttgcatgtgagcccccactctctcacacaacactctccctcacctgcactcacggctcacgtgcgagcccccatgggctcccatgcgagccccccactagcaaacaccacactcctcctcacttgcactccctccacatgcactcacaactcacgtgcgagccccccactcgcacacaccacactccccctcacttgaactcactcccccacttgcactcatagcttgcgtgcaagcccccactcaaacac

SEQ ID NO: 36266 - DNA, 8179 bp, Cannabis sativa
  modified_base (1241)..(1241): a, c, t, g, unknown or other
aaaattaaaaaaattgtaaaaatatttaaaattccgcgaaaccgtatttttataacttttttgttgtttttgtgtgttggtgaaataatccctttatttattgctcttaactactatgctatattgtctatgcgacataacatacatgtgatggcactattttattggtccatataatttaattattaaaaaaatttaaaaagtaaaagatcttttaaaaataaataaattaattaattaaaaaaacaattttttttttctctttttgatgcctcttatttctttcttttcattttctcccatttttcttcttcttctttaatcatcgtaccaacaccaccgccattattgccaccaccgaaactaccactgcaataccaccaccaccgccaaccatcaccatgcaaacaccactacccactaccactgcaaccacatcactacaatactattgccgccattgcatttattagatccaaatcaatttcaattataataaacaaaatcaaaatgcaaaaacaatcttagatttagaataaaatcaaacaaaataccaaaatgagaattaataaatgaaaaaataaaaacagaaaagaaatgatgaacatatgagatttttaatggtgacgccgactagttcgagatctgaactcgtgggtctaagagtttaggaacctttaatggcgacaccgactagttcgagggaaagagcagagagcgttggttcagactaagatataatattgtgccaaaagttaggctaaatttgacataagatataatattgtgctaaatttagtctacaataaattttactttttctttactataatgcacctaattattatgattcattgacttttacatactttaacttctttatttgccacattaccattgtttaaacaataaaaaataataattttttatatttacaataaaataataaatgatcgtcgataacaattaaatttttgggcttttttcaattttaaccaaaaaatataacaatattataaaaaaaactttcagccgaccaaataaacaaatatacagcccaaataaaagaaaaagattatttacaccacatactgaaatttctaattttttttaatgtttttactttggggcagaagttttttcaaaaatattgtgttttttttttttcaaaaatactgtgtaagttttgtgtattgtgttaagtttttactgttgttctacgattattttttagttgttcnactgttgtttttagttgttctattttgtgttccattgttgttttataaaaacacagcatttttttaaaaaaattcttgtgacagtatttttgtaaaaattaacccaaattttagtatttttgtaagtttccctaaaaaaattacacaaacacctcttacacacaccttcaacccacgatccacgcttcctgggattgaaaccttcgtatgatcatgcaacctatgattgaccaacatagcaactcaacacaatcgaaataaaacccaaccagaaagtgaaccaccattaattatggcgacttcacttgagaagacggtcagaatcaatcaatacaggggttgtttcgaattcatgaaaaaaaaagtgcagaaaaactactacgaaactaaaattcaattagaaattcagtttaattcgcataaaactaataccctgacttcaattttcagattcatgaaatgcaaatttgaaaaagttgatttggagttcccaaacaatcaaactcaagtataatccaaaaaaaaaatcacatcaatactatagtaaaatatttatcctggtgcagtttcgttattccaaatttttaatagtcaatttgttcatattaaatcacaaatagatatgtagataaagttacgtacgtggaaacaatattctaatctttaatgtttcataacagttgtataaacattttgctaagagttgtttctccacatattactattaaggtacaagtaattatcgattagtgacaaaaaaaatactgacaaatagtttcttacaagtacacattcacatttaacatttttagttgcaattaagttacatgttagttgaataatatttttgttactacaatatcatatagtattataaaaactagatttagaattgtcaaaatatgcaacctgaacagataaaacacgattgttgtaatattagtttgtattaaatatatgaaattattagttgttatgtggttttttgttaattgactcacaacaaatataactgttgcattaattacagttttatcacggttgtcttaaagttgacttcatcttacccttttggccatcgaagttgaaatttttcaggcaaagacacgttcgacttcttcttcattggacgacgaccacctttagccacggggggagcgaaatcggagtcatcatcgtcaatgactcgatgtttccctttagcattgttagcaattgatttatgatccattttgaagctttttttggcaatagagatggagaagcagaagaacagttaaatagctattatatacacgaaatgaaagatatgaaaaaagctgaatgaaaatggtggcagttagatgaagaagttagagatggatatagctgaatgggttttgatcgtaagttaattgtgggggaagaatgtgattttttgaaatgaaaaactgaaaaagaaatagatagagaaacagaatactaacttaaaaactcaaaataaaaataaaaatgataaaaaaaaaagaaaaaggaaaaaaggaaaaacctatgtaagtgaggtgacatgcatatatagcgtgtgtgtgagtgatagtgtgtaagtgatagagtaagatgtactttggtaattaaaagcagattaaaagtaaaaatgctgtccacactttatgaagtatttttgtaaataaaatgtcattttgtattttcatgtaaaagtttttaaattttttgtatttattttgtatacataattataaatagtggactaaatataatataaactcatttgctgttgttaaatttagaataaatttacctcttgcattagggatgatcgatgatggtagtattataaagatacaacaatcgtatttatttaggttattttgtcacattttattaacttttgataaattttctaaaaaaaatgataattcaaatttgcaaaaggatgcaattactcttaccggaaaattaaatgtaatggttacggatccttaaaactaataaacaacgtaaacatacattgaccaaaatatctaagtaacatatatctgcattaattttgttccttaatgtcgtaaaaccgtagtacattatttgaccaactatataatatcatcttccattgcatggaatttcttctttaacataacaaaaacagaaattaagcctccatcgatctctcaaaaaaagccaataattcagatcacttcaaactttgaacacatggcagtgcatcatcatcaaaaccacgtcgttttgataacagtcatggtgatgatcatcatgatagttccatcgttgggttgttgcttaactccaccaccgccaccactcccaccgccatcgggactccaatactgggtcggagattccctctggaccatccctccttccccttattactactcaaactggtcttcttcccacttcttcaaactcggcgactcactaggtaatatttttatctaatttaatataaagtgatacataattccaatacatacattatatatgtatattcaaatattttgtctttacagcttttgatttcgaaacggggcgttacaacgtgatccaagtgacaagacaagagtatgagagctgcacctcatggagcccaatcaagatatattacgaaggaccagcaatcgttcccctgacacagcaaggtgtactttacttcatttgtaatttgtccaactactgcaatctcggccagaagatcgccattaccgtccatgattgtcctaaaacaaatcctccgtcgccagcacccacgataccggcatcgccaccaccttccccggctccttcaactgttagaagtcctccgtcgtcaccatcgccgccgccgtataataatggatctcgtcatgatgaacctgctccaagtccagctgttaatccttcacccagtgccggaaataggcgccattcgccagagaataatgcacctaaagcgaacaagtctgctgctattatgagtggaggaaacaagtttggttttggattgtgtatgattttattcatttgctttgttgggggaaaaatgtagtaggagattatggattgtagtaaattttaattagtactttaatttaggtttgcattaggaacaaaaacaagtctctagatttgttattgtctgtttttattaggggaattgtccttattattgtttcatctagctatttctatgtctcattttacatgtactttataacatggtgttctttaataaacaaaaggaaatattctgaatagaccgatcgactaataaagttttatctgtttaatgttctttttatcatttgttgctgaaatgcccacatttttttattttatttctttttgatgagggaaattaatccccaattaattaaatttatgacacgaaatctatctcaaaaaaaataaaaaataattttgtgacatgtaaacaatgttttgtttgcactgaggctggtcttgaggctggtcttgaactttgagtctttgagaaggcctatgcaaaatatatatgatagtgtcataaaacattaaacataatatagtatttttacaaaattgaggccatttcaaagtgtgggagccgacatagcccacctgagccagatccgggccctataatgcacccaatttgcaagcatacggttacaacattacatgttattttgaataattgcagtttttcaagagcgtcctcaatacttttctgatgggcacagaacttattatggtagaggattttccatctctcctggttgagctataagccatgtggcattattaaaagaaaaaacgtaataccaactcacttaaaaaaaaatgataaatcatgtggataagagagaaaataaaaaaaatatacatatattttaggataatggttccctttccaaattaatttctattttcacctactttttttgagaacaaggattaaaactaacagattaataattaaacaagtttgtcatattcatccccaccaagaaaaaaataataatattaatcaaagaaattattaacaggaacaaatcaaagctaaacgacatgatcatcatcttgatgatgatgagaaattagttcaaccgaagaagttggattagccaacttccgacacaccggacacgtgggatgcaatcgaagccaccggaaaccacagttgacatggtagaaatgagcacaatccggcaaaactagaagagtatcatcatccttataatcaaccaaacatattgagcagcaacaccctcctcctgatgatgatgatgaacccgcgcttaagtttattaatccttgttgcttcaacacttgagaatatttaagctttggataagtagaaagaagaccttcatctaagccttctttaatattaccggtcataaccgcctgagacgggttgcttggggaggtggcggcgatcggggaagctctttggtgttggaggtcagtggtgggagaccaaacctcgcctctacaaaagtaggaaaaagcgatggctatggttaaaataactaaggtaaggcctatggagaatattattatgtaagcggtttcattgatgaagcttgatgatgatgatgatgatgagcttgaagatggggaagatgccgtaatggaatccatacatatatatttcggattaatattatgtttggcaatgaattgtgaaaaggtagatgatgatgatgatgatgatgatgattatagtagtctatagtaaattgatgtggtcaattgttttatttttatatgttttggtcaaattaattaattaattatatttacttcactttcatatatgatgctctatatatattagtcattaacaaaatctgtactctagcaagtgcaaaataaatagtttattaattagttttatttggaaaagatgtatgtaattgatatattgtactgaatcatatatctactgaaggagaatgattaaaatataagaaatgccgtgttgaaaaattattaataaatttggcaaaaagagatacagtttgtgtacaaataaatatgttaacttgcaggaacaaataactgcatataaaaaaatttatcgaaaaagtaaaataactgcatatatattgtaacacgggaatggtataggtagcgtttaatttttatattctctttaatgtttgtcctaaaaatatagggaaatttacatgttatactaattttttgctattttttcacaaatatattatcagatagtttttttttaactgtattttttttataagtttatattgtgttaaattttcactaatgttctactggtgttttgagttgttttgctttgtgttttactagtactgttttataaaaacacagtatttttgaaaagatttccgtgtaacagtatttttgtaaaaattaaactaaattccaatatttttgtaagtttcccaaaattgtatagtaaattgtggcataatatatattgagtccattttaaaaatctttggaggataaaactaaaggaaaatctccaatactattatgaatatataaaatagagaaggaaaaaaaaaaatagaagatttagatgcatagatcataagaaatttttaatgaggtaaacttttatttgtacaaaaatatgattaaaatataagaacctaaatttatatattaatataaaagaaagcgcataaaaagtgtaggtggctttgtataagtttttatttatattgttttaatttcattaaaaaatatatatcataatgaaaaacttaattcttatagtaataaaacacaaatctaacatatataataagcattaacatatcataatcaaaatataaagatataataaaaatccaatcccacctaataagcataagcgtgaataaacaagctcaatgcaccaaatacaaatatcatataaattataaaataaattacttttcagtttaatggtttaggaaaataatgtgtgatattttaaatttagtatttttaactgatctcacatgtgcaagtgcgtattaagaatttaattaattaatatcttttattaaataaaataaataaatatataaaaaattaaatgataaaaatattttaaaataacatataaatataattgattgataataagattggtttggttcggttgttcgttggatcatatgtctcatttaacaattgattcaacccaattggattttgataatttacatcaaatctgatctaattatgattagatattcgattctattagatcaattgtgattaaattgttgtattggatcggatgactttctgcacactcctattttagatctcttaattttacaaagggtcattctatagtatacattctaaaaattaataagggttattattatacattcctatcaatttcagcatccaaaataattttttagcaaatttttttttataattgtatacattgtagttattcagaaccacagataaattttcaaaaaatttcaaatagtttccagcagcaaaaataaagttttttttagtgataagtaactgtttaaattttatttttactattataaactattaagtctaattgtagttttaattagtatatgtttcttatactgaaaaataaaaccacatatatcaatataaatagaattcaacaaaaaaaaatcaatataaataatgttttttttaataagttatgaaattttattaatggcaattaattaaaataatagtctacaatttaatcagaatatctctttcattggagacatagggttagaattagaaaaatgagtcaaataatcagccgcctataatttcgagattgtttgacaaaaaaattaaaataaaattagattaaaaaagattgctgttagatttaatggtataaactgaaatgtatatgtttaagtattaagtgcggaattaatcaaacatatatacactatgaataaggatcgaaatac

SEQ ID NO: 36267 - DNA, 1880 bp, Cannabis sativa
aaaaaaaaaaaattaagtatatatggatcgatgtggtcctgctattgctggaattaacattatttatatatatatatatatatatatattctcaacagaaatagaatattgatgaataaagaaccactagtgttactatagctataacatatcctaaaaaaaaatcaatgatgtacttcttaaaaactgatacaccacatgaaaagattcgaattaatcctaaggctaaatattgttgcaagtaaatccatgacttaagacaaaaaagaaaaaaagataatggactacttgaaatgctttcagaaaaatagagaatgcaaatatagaatttttaaagaaataaatatatagctactgactactatgattagctagtagtatatttttctatacgtgatgattattattagttattagaaaatagaaatcccaccaaaaaaataaaaataaataaatgctaagaatattcaaagcaacattaaagcagtcaattttcatttttaaatgacctagcaaaaatacaataattaattcatagatatattatagctatattctttagaacatgtgttcgctatggtgatataagctaaatacaaaaggaagggtccctatattttttgttacatgttcttttttattacatcataaaaatttggctatatatataatataccaagttgtacccaaataagataaaaaaaagtactaattgattaacgctagctaaagagtgaatggctattataagctaggtataaattaccagaaaatatatgtgatatgcatccttgtgtgaattccctctattgggaccatcatacgtatataggtgtgaattctaataataattcatggaattttgcaagacttttttgttaatttgtgctttatcatgtaatgtatttttcattctttggtatgtacttgtacacaatttcaaaatatttaaaacacatactcatctagctttattaaatgaaaggaacacaagaaccaacgtgaggcaatacgatcgatgcatgtgataaaaaagacaagtgctaggggagattttttttattttttatttttatcttaattaatataacatatataaatttatatatatgtatagtattccaatgtacgtatatggtaattctatagtatatacaatttagaagcatcgttttttgatacaccttttcagtatttaagggaacttttttctcacaatgatacaatatagttatttaggacttaaattaaaaaaaaaaattaaatatattaattacacatataattaatcttttctaatatacataataaacaactacaaactattcgactatatgtcaaaatttataaatgattataattaagtacaacataacttattatgaaaaaaaattaaattaataaacctttataaatatcaaaactaatagaaaatataatagatcaaagatttttctaaatatatattcaaatacttgttttcttccttctttttatatatgaaatctcttggatatattttttttacatatatatggattatatttcaataaatatcatttattaattaaatggattttttaaaaaataactatagctaaatatcaattttaaaaatattaattttcaaaaataaaattttaatccaataattgataataaaagaaaaattaaggtactgtaaggtactgtagttaattttactatttaattaaaaaaactctctttctatactatataaaaaatatgtttacatttagcattattttaatatctttctctaactgaaatgtaacgccctaaataattaggcacgctacccaaaaatacttataaggccctaatcccctaaccgggattactaattaaaatagcgcaaa

SEQ ID NO: 36268 - DNA, 4100 bp, Cannabis sativa
gactgcatctgacatggatgacgccaaagctcgtgcatcaagagtgctcgaggttttggagaaatccatctatacacgtgcaagtgcagaagtggcccaaactatccatcaggttctaaattatctttgtgattttatctgttgcctgtacaatactctaatacaaaaattttttatcttcttctgttgcttagaagttgttggaccataaaaatttgatgttaatctttcttatgtttgattttaattatttgtaggaaaatgttgtgttgaaggaacaagtaggtgtacttatgcaggaaaatgcaattcttaagcgagctgtgtctattcagcacgatcgtcacaaagaatttgaaaataagaaccaagagttgcagcaattaaagcaactggtgtcccagtatcaagagcaattgagaacactggaggtttagctcacgacagcccctaacataaacatgttttttccttgctatgataatttgtttatttattcaattatgataggaatgttattatcatgcaataattggatttactaattgatatatgctgcccaatcaggtgaacaactatgcactaaccatgcacctcaagcaggctcagcaaggcaactccattcccgggcgatttcaccctgatgttttctgatgtccttgtaaattgaatttttttgggtagataagcaggctgtgctactaatctgaagggcacctgaagcccttgactgctatgtactcatcgtttgtggccatattagcttccggtggagtgccctttttatgcggcaaagataagcaccggaccaaatacacaaaattgcatatgaacacttaatttatttttgttttttacctctctttctcgatctttgattgtattattgtaaggaacctcaaaaggaaaaaaaaggaatttgattgtatttacatacattaataaattctcttaaaattgcattttgaaatagcgatatggagtttctccagtctaaatattacatatctccattacatatctgctcaattttttttttttttggatgaatctgttaccatgactagaagtattttttatatttggggaagggattcgaatttgaaactttttgaagaggtgtcaaactattaggatatgagtatctataaatcctcatttagagttattttgtattcaactttacaatatacttggagttagacaaacactcaatattggactaagtacttttgtcgtgttctgtgaggtgcctcttaccttataagattagtttttggaaaaactcataaaagaagcgaacataagaataaggaaacaccaagttttcttttgcacatgaccccaatttaaagcacttggcaaatgtttctatctacttttgtggtttgctttatactcttttcttacacttactttttgagtctttgggttagtttcttttggacttagctgcacaagttagtgaaaaaaaaaaaagtagggtttgcttatagcacatttaatttacactaaatagagattttatatcttagattcaatttaatcggcaaacctgtagattgaatgattattttaaattgcttacattatttaatattaattaaaaaatatattttcttttgacataagcaataacaaaataaaagaaattagtgttgttttatgtttcaaatatcaaattaaaataaaaaataaaaaaaattataaattcaaaaagaaaaaattatatatatatataaaaaatatttaatcttattttaatttatatttgtattatatctattaaatttttaaattatattttttttacattgaattagttatatacataagtacaaatattcgtattttacggagtagattaaatctccaaaattaaagtagatttaattatttatgaacatccaaagaaagtgtattgtatatcattatccaaagttgtatatgtgctaaaaacttggtatgggtttagtacatacagctaacattgccaacgaagctctgtactgtaaaatagttatataccttcccaaaaaattggtgaggtaaagcagacaataggcagacccattggtttgacgacacatatttcgaggtcaattcacacatcttggccagattagacatatgcttagcatttgttgaatacaaaaattaaatagaaaactaatacacatgatccaataattcattgactaaagtgtaaaaaagtggtttgttggttatcattcctcattgctgtacaaccaatatgtatataaatattttttttgatttaacatatataaatagttgctacttgctatattgaactgaatattttttatcacacctatccttctctttgactttaatgaagattaaagaaatttgcaggggaaccctttgtagaaacttcagcctaccattggtttcaatacataacatatataaaatcacacaacttttgcagttgaaatgaaataattacagagaaattggtttatgaccactgactattggatcattttaaacaccttagcttgtaaatgtctgttagagaatgaaagagagagagacagagatgacttgtaaattataataaataaagcttgtaaattagtttagagaaagtacttctaacaagaagagggtaagagaagctggcctccacttttcatcatgctcttgaactcttcaaagtttaccattccatctccatccatatcaaccttcttaatcatctctttacaattctccatctttttcccttctttcaatcccaaagaatataaaatagaacccaactcctcaacagaaatcctcccatctttatctctatcaaacacatcaaaagcctcctttaaatcctcttcattttcaaataagctttcattcccattcacttcatctttcccttgctcaccaccagtcatggactcacaaagcaaaccaaactcttcaaagtcaatcaaaccatctccattagcatccaattttaacaccatttcttctacctctttctctgtcatgaaaattcttatgttcctcaaagattccatcagctcttgctttgttatgaacccatcactgttcttatcaaaggtggaaaatacttttctaagctcatccttcctgttgttgttgaccatcttcttctctttgttgggagataacaatgatttatcaattgaagtttttgatgaagcactagtacttctaccactactattagttgagatgaacaaggattgaatccaaacatagattttcttggtgggaacatagaagtacaaattaaataaaccaacaatgaacaatatgactagtaacaatatatgtaaaaccattttttttctttttttgaataaaaccaaagaagaaaagataagaaagaagaagaagaagaagaagggaaaggggaagaagaacctaaggtagagaaatttttgtctggttatgagaattttatgggagtttaatgaatagtttagagttagagttagagcatcatttgatggaagttgatacgcggttttgtgttgtacttttggtattttttttttaaccccacaaaccgcgtgaactgtaataactaatgacaacatcttttgtcagagtagtctttaagtattataaagcactatatatataccaaaaaaagaaaaagagtatatcaattatgctttttgtgccttttgttgtggtgtgttggttactactacttgttacttgttacaaatcatcaactcacttgtcagttttcacttctttgttttattggccactcctcatctttcattctctctatatcttaattatgctttaaatattaataaagatattccatcaaaaaaatatattaataaagataataaggaattggaacacttttttttttcctctttccatttcaaaaataataaattaataatgaggatagttggtcttggtagatcacaaattttgttgtggtagaatataaaatagaataataatacttggaaaaaaaatcatgcaaatagtatttttaactcaaaatcattatataatacgcctggcctccgatccatggctgcctcatcccggccaccgacgaccacccaccaccccgacca

SEQ ID NO: 36269 - DNA, 8493 bp, Cannabis sativa
  modified_base (7783)..(7783): a, c, t, g, unknown or other
tctggatcaggtcggatcatagtcagatcaaatccgacccgccccattgacattcctaattggcattcctattcaattcaaacaatggctagatgctatggacactaaactcacaacccttcgcaacaacataacttggacaattgttatacttcccccaatcaaaagagcaatcggttgtcgttgggtttacaaaataaaactcaatagtgatggttctgtacagagattcaattccagacttgttgctcaaggctatacacaacaagaaggcctcaatttttttgatactttacttgtggccaaaatggtcttttttaaattgctccttgctatttctactataaaacagtggcatactttacaaattgacataaacaatacttttttgaatagagacctcaatgaagaggtctacacggcccttccatcaagactaaccttgtctaattctgtttccttatgttctaaccttgtttgcaagcttcacaaatcccatctatggacttcgccaattccttgagacagtggtacaaaaaactcactgatgccctgctgcatgaaggtttcaagcaatcaaaagcacgttacaccttattcacgcatggaaataatgacactttcattgccctattggtctatgttgatgacattgtcatcacatgccctaatgttcatgctctacatcaactgcaaaccactctgcattagtagtttaatcttaaagctctcggacagctcaaatatttccttgggttcaagatagctcgtgctacatctgacctttttctctctcaaagacaatacacccttcaacttctagaagacaatggctacattggtagcaaaccagcaaaaacacccatggatcctaaaaccaaactcgatgaccaacaaggagaaccattgaccaatccttctgaatacagacaactcattgggaaacttctttatctaatcttgtctagaccagacattacctatgcagtgaacactttgagccagattatgtctggccctcgcataacacatatgcaacaagtctctcacctacttcgataccttaaaggtagtccaggacaaggattactctattccaggaattcctctattcacctctgaggtttctctgactcggactgggcctctgccccattacaagatgatcaacaattggattttgcatattcctaagcgattgtctcattttatggaaaaccaagaagcaacccaccatttccaagagctctgttgaagctgaatacagagcacttgctgcaacaaccagtgaactcacatggcttcaatatctactccatgacttccaaattaaacaagccacatttgccttcatatactgtgataatcagtctaccatccacattgcaaataattcaactttccacgagcacacaaagcatatcgagttagattgtcacttcattcgtgacaaaattaacaattctactattcgcctaattcctttctccagcaatttacaactggcatatgccttcaccaaacctttgccctccactatactaactgccaatacaagcaagatgtctgtatataacctattcagtccaccttgaggggggagggggggatgtattaagaattggtcagttagttcagttagtcttcagctagtaagttcaattggtgaccgttatgtctgttgacagtttctttcccttggttctcttttagttctgattatttagttgggtttgggttagtcttttagcgtgatcatagggtgttaagttagttgaacacactgctcatactatatatatttgtaccctttctagtattgttcaattcaattcattcaataagttgtacattttcttactttttagtttcgcttgtaatacaatactgttataaataaagatttggctcagtctggatcaagctttcatagagcttagctcatagcaacattttgtctcaattactctctatccttttatgatttcctacaaagttaaactatttccatttttgttagtttaggattggtttgacgggacaccctattcggacttcataggaaaattaattagccgaataagattcttctttttcttcgtttaacaaattcgtgttgtgagactgttttaaaagaatataagtagaaatttattttctaaaaataaagttacaattatttgctacaaagcaaaaaccaaatgcagtaatgctctaaacaaactggggtgcactaggtgcatggacacttgttaggtccaaagactccaaactgattaaaatcccaacatgaatgcttgcccttactcctcctctactactcttcttaagtctttcttttaacttctgcaaggaggagagaagagaatgcataatgccaatcagaatcagcctggaaagctctcagacaacttcagaagggaaaaaatagtggcaggctagttgaaattgtaacaaatcaaaatggctaaggtaaaatagattttgctccttttcaccctttccagttctctaagacattctctagattctggtcaataaatgctctaactacatgtgagtcaaggagaaccgaggtgcagaaaattgtcagcaaactcgaactttccgtctttccctgtcactggtagctgttgagtggttgtctctctctgctaagcatctcttgtatggtacaaaccccttcctagaattgcagtgttcaacactcgctttacgatgaggttcttgagaaaaggaattaaaagcttctatgtttctgtttcccactgtttccactccactggaagaaccctcatttgaatcggtacaagatctttccttcttaatttccttctcttccatttctgtagatgttggacctgtgcttggattgtatgccgcttggtaatgaaagggaaattggggcatagaccaccagagcatttgagcatcaccatttagttttacaatattggagctttctttctgttgttctgtttggttgctaggagaagaactttccaatggactacagttactagcaaatccaaatccaccgagagacaaatttgtgtctaatttctgcccttcatccgttttcagtgcttcagaatcatcagtactacaatgagattccttctcaaggtcggataacaacaccgtccttccaaaaagcttgaaacttgttgaagttgatagtttgtcttctttgttattgtgtgctgtgtccttacaacctggctcaattttctgtaaagcatatctggttagtatatgagtgaaaatacagatcaatttatttcaaaaaggaaaatatctgggaaactaaatagacaaatcatcttaccacagataagacattctccacatttgattgagaagataaatgatttcctggtatcttctcttcagcagatgagttggacatcaagtaacagttttccttatctgaaggagataggctgattgactgcatatcagttgtacatgaggttgacgaaggggaccttttatgctggtggtcagaagcatcataaccgactgcatctgaaccatgactagataaaactgaagtaggagattttattcctttatctgttgcagcaaaatttggggatggagacctttctagttgatttaaaactgatgttccattgaaggactcgacaaatttacgagggtaaggatgcataggcttcctctttggccttggtggaggaatctcaaccggtttcatgcacccttcaacactcccacttgaaccacgaacaacctgaaagcaaaagaaaaaacatatgagtaaacaagacatgattaaattttaatgtatggaagtggatattatgacaagagttttagtgaacaataaaataggaagcttatcgaccttagagaaatacttctgagcgtgacttcgaatctgaacagcagttttagtaccaacatgttctgcaccaggatataaaggaattttacacaacagaacagccaaaaatatacattccatgggcaacaatttaacaagcttaccttcaatttgacgccaacctcgaccataaagtttcaaggcttcaagaaacttttgatgctcctcctctgtccacttttctctttgtttggtaattgtgtaaggttttctaacctataaattttgatgaaacataaaacaggtcagaccacaatgtccctcaaccataaatatttgcccaaaaaacggcgaggcctccttagtagagattaaggagcagatggaaacctttggtgcactttcatacagatccttcaacgggctctctgacttatattttgcatcaccattggtaatgcagttaccagccacgacagagttgtttgacaacatgccttcactctgtttctgtgacaagaataaaagggaaaaaatgattccaagtaagattatatgttcccacgtgaaataataaataacaaagtactcttacacacacacagcataattcggtcatataaacgaaaataaaaatattgacaaaaatcaattacaaagcaaactgcaacagatacaatagtagactcctcgagtaagaactgaatatagaacaattgattgaaaaaatttcacatgttcccaggaataaagatccgttatccctaactagtcctaacaaacccagagatacacaatgaattaatcagtcaaaaacagaaaagaaaaaaaaatcatacgattttactcacttagcaatcccttaaactcaattaaccccttaaactcaattaacccattaaacttaacttaaccaatagacagtcgagttctttgaatcagaatataagaagtagcatcacaactggcacacatggccaatgcaattcaaatggccaaacatgacaaaaaggtgataccataatgctatttgtccttagtatgaaaattaagtcttagcaaaattacagcagtaattgttacactactatttgaataagaggatttccaataattgcattgctcaataattgaaaaagtctccattcacataaccacacaatttcataaaattaagcataccacataaaaaaaatctcttctaaatatcatcaccgaaagggccccaaacttttttgctgagaaacagggcgggcaagagatgtctcatatatgccatgccagtactgtaataaatactagatcccactaccatctaccaataaaataataataaaaaaaatacacataatttttcaaacttccccaaatgaatattttgaattagtaacagaacaaagcaattgcttacctcgacaaccatggctgcaaaaataggacgtgtaccgacaccgaatcccttagttaatccaccagaacctgcagtttcattaaaattccaataattaagttttcttcacccactaaaataagaaaccacaacaacacagcctccataaacagcagcatagaaagggaaaaaaaagtcaatctgaaagcaaatcaactattgttttttcgtattctcgttcagaaatggtagatcaaccagaaactcacctccaaaaaaaatattagaaaattccaagcagagttggtcggataaagttctccttgggatattttcccagaaaatacagattccaggaaaggaaaagagaaaagaaaagtaaagaaattatccaaagatacacctgtaataatctaagaggggaaaaatgagagcatgaaaagggagaaagagtttggaagaatcatataaacgagtatttgagagagagagagagagaaggaagatgtaaaaggattgatttttgaagaagtataagaaagaaagaaatgaagaagaagagtgaaaaagcagaccaagccacgtcagataattctaatttctttttattttttttacccgaaaaataaaaagtgtatttggacaattcgagaagggccttggagcttgtggctgagaacgaacgggacccttgacacgcggcacttacttcttccatgtctgtctcactaactctttttactgaaatacccttcctatttttattatttttttaatgtctttctttgatatttattcaaaggaaaaaacaaaaaaaacttgatatttatttattgtggaagatattaaatctgaacggataaatattacgacatgtttcaggagagataccgaaacagttgggctttaagaaatgaagaactttattctattcggacagcgtgtgaggtacacgcgctatgcattgagatgtaaaggctttgccatatcagatacagatatcaatatcagatagtttcacatgctccaaaattataaaatcctgtttggcctaagattttaagccaatagaatagaatagcatttatcctcaattaactttattatttatatattattttttaaattaggccccacagaaatttgaataatgaaatgtatcctacctttttgctaaatgacaacatataaaaaataattggtcatttttgataaattgaactattattaaggtaacaaactttttttctattaataaaataaagattcttttcctaatatttgagtgtgatgtttggaagtaattgtgtaattattaaatagtttaattattaaaatgattttatatttttaaatataaatgtgtttggatatgaagtaacaatttaatgtgaatttttaatatttttttaataaaataattaataattatactgaaaaataatattaatagttaataattaaaattaaaaaaaattagtaattatgcaccattcttataagagctaagaatttgagagtataaatgacttttaattacacaaagtatattgtaatatatttatataaatatgtaaaattttataattacctttaattaaataaaaatttaaaaaaatgtggctttatgccacgtgttaaggaagatgagcaagtaaatggtttttacaaattaaacttatccaaattacagaaatacatacgtgtcccaaaatggaaatcctagagctttatggaacgactgcagaaaagggaaagatatagaaccgtaattaatttgatttaaaattaaattaaaattggaaaatttcggaccacaagaaaaacaagggtgggagacaaacaagggtggccaggtatctttatgtgatctataataaagctgtagaagactagagaatagtggaagagagcagtgatgacatgagctggtccacatcatatgtaaactgcgctttaatgacacatcatcatcctctctgcatgtatagtcaaacgcctctaaaccacaaattaaacaaatacaattatcctctattcattttaaaggcaagaaaaataaattgggttaatgtaagattctaagaaaactattttattattctgacggctattgacattattataacactgcaaaacctttaattattattaaaatgagaggagagatggagacattctctctcttttcaaatatccaaatttcaatcccaaatctaaatagataaaataaataaataaataaaataaaataaaattatttcacaaatacctaaaaataacaaaaaaaaaattataaaaatacagttttatagaattttaaacatttttacgattttatatggtctttttatgttgtactcttattaatttattattgatattttgttatctgtatgttattttttgttgttgttttgatattatttagatgttattttcatgtaacttttatgtagatttcttattattttcgtattgtttttatggaaaactgttaaaatataaaaaataaaaaaataaataaaaaatctttaaacgtaaanatataattttttttacaaaaaataataccttatgtaattatccctaaaaaaataatttatacttagtaaaaagcaaggagagtaaaatggataaaagttgagaaattatgagaacagtggcagaaccaatcaacggaataaaaaggggcaaataaaatgtatttttacttaatttttttagtatatagtattatataaattaatataaaaagttaaataactttatccaacgcatataaaataatgtaacatatacaaaagaaaatataaaaacaggtataaatatagattatacaaaataatacattgtctaaaattgtaacctacattcttttaaagaaacaaaatcatcaagtattgaatttaaatcaaatgtctcagctatctctcttttaatatagacaattaattgcttgctagaaaatcattttcaattttatgtcaaagccttgtttttgtaatctccatagttgaaaatgctcgttcactaaccgatgtagatactgaaagagttaaaacaaggtaaattaatttatcaataagatagtatatctttgatttctctgtctatactaatcttcaacataattttgcgatcaatgacaaattttgaaactttgaattagtaagcacatcaagtttaaaatgcttcaattgaaaccttatattaattttctcattctcaaaaaaatcaagaggataataccctt

SEQ ID NO: 36270 - DNA, 5896 bp, Cannabis sativa
ttctttttttttttttttggtgtgtagatcaagatgaagtaaatgattctccaatcgagcaagtcaggctaacggttcccatcacagacgacccgtcgttggcatgcctgactttccgaacatgggttctggggattgtttcatgtgccgttttggcatttctaaaccaattctttggttaccgtcaaaatgctctatacgtttcatctgtttcagctcaaattgtggttcttccagttgggatgtttatggcagcaaaactaccaaacaaatcgattcggataccagttttgaattggtcattttcactgaatccaggaccctttaacttgaaagagcatgttttgatcacaatatttgctaattctggttcaaactctgtttatgctgtgaacatcatcaccattgtcaaggccttctacttcagggacattcatcctcttgcagctatattgttaacactaactactcaggttagttattaattaaattgacaaataatatcttataatagtaatatcagataacttggtcccaactaaatctctgtactaatattataaagtatataatgatggaatattcagatgctggggtatggctgggcaggaatttttcgaaagtttcttgttgattctccttacatgtggtggccagccaacttggttcaagtgtccctcttcaggtacatcttatgcatatgtacatgtaatttagttcattttctaatctattcctttctattgatatctctttttatctaatagggcgttacatgatgtagagaaaaggccaaaaggaggcttaacaaggctacagtttttcatattggtccttgcatcaagttttgcatactatgttgttcccaactatctatttccatcaataacagctctttcctttgtttgttggatatggaaggactcagtcacagcccagcagattggttctggtcttcgtggactcggtgttggctcgttcgcccttgattggtcaacagtagctggcttcttgggatctcccttagccacccctggatttgctatcgttaacattatggctggtttctgcataattgtctacatattaatcccaattgcatactggactaactcttaccaggccaagagatttcccattttctcatcacatgtgttcgatgccaatggccaaaattacaatgtttcactagttttgaatgaggctaccttccaatttaatcagcagggatatgatcaatatagcaaaattaatctcagcatcttctttgcttatgcttatggtttgagctttgcaactttggctgcaacactttctcacgttgctctctttcacggaaggtatgatttttagtatagggatttttcttattgtcctttgtagttttttacaatgaaaaaactctttgttttttgttttgttttgtttttttttttttaattttggatttttgttattggacttaaatatatgcagatcaatttggcaacagacaaaagcaacattcagagataagtttggtgatgtccacacgagactgatgaagaagaattatgaggctgttccagactggtggttctacacactcttagctgtggttcttgcacttgctatgcttgcttgtgaaggctttggtagacaattgcagctcccttactggggtgtccttctagctattagcatggccctgattttcactctcccaattggggtcatcacagccactacaaatcaagtataataatctcatcattaatcaacatttttacccttcttattatttccctctaaaactaattttaatcaacaacactatcactgtgttgtaaatttcttttgcagcaaccaggactaaatgtaatcactgaactcatcattggttatatatatccaggaaaaccattagcaaatgttgcatttaagacctatggttacataagcatgactcaagcaataatgttcctttcggatttcaaattgggacactacatgaaaattcctcccaagtccatgttcctagttcaggtatacacatattccattcaataaaaacaaaacaaaataaaagaccaattaagatttaaagataccaaatcgttaagagtctttttttatgttgttaatgaagctagtgggaacaatagtagccacctcagtctacttcggcacagcatggtggctactcacatcagtagaaaatatttgccaaccctcaaagctaccagaaggaagcccatggacgtgtccaggagacgacgttttctacaacgcctcgattatctggggcgttgtgggcccacgtcgaatgttcggcccattgggcttgtacccaaagatgaactacttcttccttattggagctctagctccggtgccggcatggctcctctcccgggcgtttccccaccaaaaaatatggggtctgattcacatgcccattattcttagtggcgccggatcaatgccaccggcgagagccgtgaactacatatgctggggcgtggtgggggtgttcttcaactttgttgtttaccggcgattcaaagagtggtgggctcggcataactatatattgtcagctgggctggatgcgggagtggcattcatggcgattctgtgctattttactttgcagattaaggacataaatggaatgagatggtggggtttggatttggacgatcactgccctttggccagctgtcctacggcgccgggaatcaaagtcgatggttgccctgttttcagttgataaaagaataagataaaaaaaaaatgtaaatttgggctctgtgcattccaatgtgaccacgtggcattgttggattggtaagatatcgtgcaaagttgttgctcagtagtgttgcacgcactcagttcaacttcaaacccatatttgcacatttttgaaagttttaaaagatagttaaagcaaaagaaaatagttataaaaaattagataaaataataataataatttcataattcactattttctttttaaatttttatatacttttacagtattttataaaaataatacaaaaaaataaacaaaataacataaaaataacaaataaaccatattcaaacgataacatacaaattataaaaatattaataataaattaataaaaaaataacataaaaatatataaaaaaccatattatttataaataaaatcataaaaataaaaatatttaaaattctatacaactgtattttttataatttttttttttttgttattttagtgtctttgtgaaataatctaaaaaaaatgtgaattaatttagtcgaacccaactaatatggccctgtttattttaatatataatatctatatactattttatttaacatatataaacttaaattttaaaaaataaattatatttgttataacattttttttatattgaatttcaagatttttttttgtcaagaagaattgttagttctattgaaaattactggaaatttattttgattaaatatatgatattgttttttcttaataaataattaatttaataaaattataaattaatccaaaaaaaaattactttatacttcatctcgtaataaactataagaaaagaaatcatacgaaattgctaatagagtctactctaattcaatcttaagtacaacagacttgaagaattacttgacaatttaactttacttgatgattaaatctgttaagttatatcttaatttgtcaatgatatattttcctgccagacaatcattgttcaaaaggacaatcactcaaaaagtctgtcaatatagttcattgagcacaacaatgaaggttgcacttcacaattttaaacattattcataaataatattggtatgaagaatattagaataaccggtcaccggatcagagttcctcccatcaagacatcaagtcaaaaatgtcggacaccttgctggtataataatctggtaggatagtgtttgaaggatcttcaagggttgggagggttgtcacacctgtcatgataaattacaagcctcagcaacgaaaagtattaactccttgtggtcagagttacatgaaatagaaattggattacaaagaaaaaaacctgaaagaacaaggagagttttacagccagcattctgcccaaacaaaatatcagtgtctaatctgtcaccaaccatacacattctggagcagcttatattatatctgaagaaaaaaaataataacaagaaattattccagtgttttggacaataatcttgcagcagaaaacaaagctttgctgcagtgcaattctgctccctcttttagatgcatgacatgttcatgctttttgctatgacaaggagaagtgcagcaggggaaaaaggaacagatatgccttgcctacctttctagcaaaaagtccatcatgaaagtagagggcttcccaactacaattggctccttctgagttgatccacatatggctgcaaccatgcacccggcacctaaaacccaaacgcaaaccctgaaataactacaataaattgcttaatttcttcaaataaaatatcagaaacaaataaacgaacctggccattcctgtaaattagtcatgtgccccacagagtctcggttggtggcgatgaacaagcatcctggattctcacgaatgcatagagtgccatatctacagttcagataacattataaagacatcaatcaatacaggatagataacattttacttttaatagacgatgagaaagtttggaagtgtaaacaaaaatgatgtcttttaagaaaggaagaaaagtaacactcttactgaagcttgtaatagttgatacgtgggtccaatccaactacaactgctcctacctgaaaaacaactatcacatgtttaaatgctcttaattgctaacaaccaaacaactcaataaaatagtgaagctgttactttacactcttatcgtgttcaaagagagaatttggtttcagctctgctgtcttttcaccatcttcctgcaatacaacattgttttacgaacaattcaaaacaataaagtgaaaggaaaacaagtaactaccaacatatgggataggctgagtcctgtacttctctattggccagaatattgtgtatacatgatgacatttaattaaaaactataaaactaaggtctctttatttgttaatctagaaaggaataaaagattgacttactgggccaccaagacctgtaaagccagctagctgcaactcttctaatatcccttctccacctataacatagacctacaacacataatataaatatcagtattcagtttggacttgcaacatccataccctaatccattgccaatattccatgcttttataaagtaaattaaattccaaaccttcttatcttggggaaatttacggactttcaagaacatagcagctgcaaatgaggaagagaatatctcatcctacaattaaagaggggaaatatataattccgaaatcgcaaatcagaaactaactatattgaatatggactgataaatgatattccaaaacccatgttccatttatctttattattattattgttttgaaaaaaaaacctggttgactgaaatgccgagggattggaactttttggcgtattggcttcttgatttcgtggaattgttggtaacaaacacgagcttctttccctgcaattaaacccaaaatgagttcaatggataaaaaaagaatggaagacaaaactggaaaaataagaatgagaaagattgcctttgatcgaagccagtcaagtgtgtgtgggacgccatcgatgagggagtcgcccttccagatgacacctgagtattattaataattataaaaattaaaatcaatttaatttttttaataaaaa

SEQ ID NO: 36271 - DNA, 5365 bp, Cannabis sativa
  modified_base (4767)..(4767): a, c, t, g, unknown or other
ctctctctctctcttcttcccttttgaagccctaagaaccaacaagaatcaaagcaaacttcttcacagttaaacctattcttagctgaattaatcatgtatatgagttgttcaagctttgaggtaagttctccacctattcttcttgatttctaggattttaggttgagtttctttgagattttgcttaaattcaaggttttatgattaattgagttaagagcatgatttttaagtttaattaaaggttgtttaattatgaatttgatgtttctatggttgttatgttttgatttgattgatttcagttcaagaactcaaatcaactatggtggatttgcatttttagtgtaattatgagttttgaatgcttgattatgttgattttatggtattgcaatattctggaaagttttaataggtttggaggatttttgattttgttttgatgcaaaaccaggggttgcccgtttctgcagtagaaacctgttcaacggttctacaaggcactatggaactggtcaatcggttgaccagtgtggaaaccctattttctgaaattgtttatccattcgaggtactttctagaacttagttttaggtgttttattgatgtttaggctatttttaagctggtattgataagggtttgtccaattttgagtttagggcctattttgggatttggttaagttgtttatcaagctttcattgtcgtgacattttaggacttgagatctttgagcgttattcaactcaggtcgatatacacacctaattttggatttgaggtaagaaaagtcaattgcattgcttagcatgtcaaataagatacgattattatcgtttgggattcgattatgatcgaggtaaagatacggtaattaccgttgttaggaatgagttattactcttttttaaaactgttgataggtttcttacttgtcaaatgcttaattaagcaacgatagtgacataagaaactcggtggtaacgaggggtatggatgttttataaagcatcgtggttggtttgtcttataaggggaataaattaatcgttattatttgattatgctttgaataattgcatattctatatatttccttgtaagttgtacattgtttaaatactatactttatgtgatgtttgtgttttacttgctttttttgctaagtctttgtgactcacaagtgctctatggtgcaggtaaagggaagtgaaaactggaccaaccatgagtcagatgtctctcagaaatgtacatatcagtcgccatattttggctctcagtggacaggatccttcttttgttgtattttgaaaatgtgacaacattttgtaataagttgttttgtagcattttgtaaagagtctataattaaggggattcccgaatccaatggtattttgaatagaaagttaagttatgatttaaattattttactaagagttttaattaaactacacttttattaaaccgttagtttattattataaactaattcataaaaacatacacgtggcaccctcacggttcaggacgttacatttaaattactgtgctaacctttgctaattcaaagggtttagtaaaaaatgcatttaataaaaaatttataaataaacacaaactttactaattatagtttacaaaaatttataaactttgggatcctgatttttttacaaaatgaccaaaatgtaataatttaaaacgtcgcctagcgaccaactcaactgagcccatgttgtctcaaagatcgaactctcctgatcgaaccatattgatatgtatgatcttcgtagagctccagactcatttttgatttagtctcgtcctttacctacacatgcaaacaaattggtgagtcgacaaactcaataagaaaagcataaaatatataaagatatttttgacttgtaactaggtgcccatacacctacctacaaggcttaatagatgaatcaagaatgatcttaatagaactatgacttctataccacatgcactaagtactcgtcctatactagtgttggtagggttaatttgtacctcgagtacactaagcattataccacatacactcagtactcttcccatacttgtgttagtaacgttgaagtacgaccactataccacatgcactaagtactcgtcccatactagttttggtagggttagtccgtaccccgagtacaactgagcgttataccacatacactctgtattgttcccatgctagtgtttgtaacactgtgtcataccccttaacattatactatacaaatgcactacgtacctcgaccgtaatagtgttggtagtatacattcatataattcatgtataacacatgcatacatttacatatcttacactaatcttaccttggttctgtaatcaagtatgtcggtcgacctgagtgaaaatattatttgctgaacaaaggccctatgtcacatttatgtaaaattggtaagtgttaacctaaacacttttgggtacttaaattcaaaactagaagtttccctatcgataaatattaaatagcatgacaataccctaaatatcaagaaaatcccaaaaatgagactttgaaataaattccccaaaaactggcaaactgcttttctgggttactgccagtaaaaatggtagaccgtttatgagaaattgatttggcattttttgctgcaaaattcccaaaaatctcatttctcacccaaaactaccttaaacttcgtaaaattctctatctcataaacgcagcaacaaagccctgtaaaaaaatatcgtcattgatgagttaagcttgagcttaaaaactcaaacttaactcatactaagatacagctagaaaaacctcattagaaacactctaaggagttctaattcaatttataaaacaaaaccaaaaccccacaagcttggacagagcctaactcacaaaattacatatccaaaccaaacttttcttccagaatcaaagagaaaaagtatctagaacttaccatagttcttgctacccaattttcttcccattccttgctgaatttccttgagaaataaatgaatctaggtctggttccttagttttccttatggccattagagagagagagagagtatgctaaaaaggttgtttcttttgtgtcaagtttatcaataaaatataatttcaatttaattgaattaaaatcagtataaagttttgggatttatctacaaaacccacccacataactaaaaacaacttaaagtgaaaggaccaaaatgccccttgcttcaccatgaagtaatctaatattctaggagtacaatggtctagatcaataaccccaataaattctgatatttccaatgtctaactctctttccctactaactctaatatatacaaccgtatctaagtgacttgaatggccaaaccctcgtatttcaaccgttacctagcaaaatcataaaatattaaaatgcatgtttatcatatataatacatctagaatttaataaaatctctgaaatagaaaaattataatccaaatgcttattccttgacaattggacccatatcacataatataattaattaatgctaattgtctactaattccaattctaggtatgcgatcattacaattatcctcccgtcaatagaattttgtcctcgaaatcaaatttgaataactctgaataatgagccctctaattgttaactcaaactttaggtctctttattttgatgattaacaaatatttgattattatttgttactaatgatttgttgattttgtagcgcaattaaagataaaatatttttttctatggcaaaattaactctaagggtaaaatgctaattttatcaaaatttctcgaaagtgacccaaagtggatttcaagactcaaggaactcaagacaagacttcataaaggtttatttacatttcctagtcttatatagtgagtttcaagtccatacttaaaaaagttaagtacaaatttttggcccactaacttgtgcgataatttttctcaccaaatgatgtaaaaaaattgaattgagtttttaaatcacatatcatttaactaagagaaaaaaattagaatttttgaaatcgggtaatcaagtaaaaagttatacaaattttaattcaaaaaaatgcaaaatttaccgctgtaagccatctgaaattttgattggaatctagaattctgattgtaattaatccagaattccgattcccatcaaaaattccaattcatggtagaatccccttgaaatgcgtgttgacggctataaacggctctatttcaccccaacactatataaactcgatttttactcaaaaatcagggttggctgagcatttatatcatacacctaacatattcaagtgagtttaatgagctcccaagtctaaaataaaaaaaaaaaatacttttcacacactttgagccaaaatttgtgtttaattctttaacgtatgcttgctaatgactctaggtaatctattgtttcatcatacttctagagtgaatttgcttgtaatttcaaacatttccatattgtgattgaggtgaggttggcaccggtattgtaaacaacccagttagagtgagattgtcactacaacaatccaagaaagaggttgatagtccttagtggtgcaaaactattgtaagaggtttcaaaacacctcgttgaaaaaactcctggttataagggttagtcaagcccgttaacttggctcgatattggaantcaaagctaggtctatagctttgaagaccaatgatgtaggtggcttagctctactaaagcttgtaaaaatcgagagtttacaatatcttacccttaaactctctttactttacaattgattatttgctatacatcattgattgccatattacttacatttatttaattaagagattaattgcgtagttttgtgctaaaagttttaatttcctgaaattagtttaaatttcccattcaccccctcttggaaacgtatcttgggttaacaatttgtatcaaagcgagggctcatttatttgattagatatcacaatttagagcatggtgtttccaagtaattcacaaaataacatgttagaaggtttgagcacaaatagaggaccatacttcaatggagtaaattttccttattggacaattaaaatagaaacttaccttcaatctatggattatgatttgtggcatactgtgtctagtggaccttacattgctaaacatgttataaatggtgtagaagttgttaagacttatgaggcatatgatgtgaatgataagaatatactttttgaaaatcctaaagctaaatatgcacttatat

SEQ ID NO: 36272 - DNA, 11165 bp, Cannabis sativa
  modified_base (6551)..(6552): a, c, t, g, unknown or other
atattcatttatcaaaaaatcaattatttatttatttccttaaatagaaatttatttctttaaatagaaatatatttctttaaataaaatattcttataagacaaagttcagatatttgtgttgggttagaaaaactagcaaagtctttggataagatgatggagaaatcacatgaggaaatggcgttgctcactgaaacgctaaaaaataaagatgataacaagatgtatgactctgtttgggaagagatcacaaagatgaacctcttgttgctgatcaaatcatggctctaaaaatatttgctgaacaaccatggaatgtgagggctttgaaaaacatggatgaggctacccaaatagagtttgtcgtgacccttattaactatagatgagactctaaagacattaaaatataacttatatcttatacgggtgttaatattttaaaatgtgtaagcttatataactactaaatggagtttatccagactctttaggtggtgagtagcaattagattaatatatatggcttgaatatttagatagatctcatgttaaagctattatatcttttgtgcatgttatgaatacatagtaatttatatgaacaagaatagttaatttttggctaaccgaactaattatgtgtacttttaattatatttgacttaatataaatgttatatttttactattttgtttatatatgtgtgtcaaatattatatactatttaaaaatattttgttgtcaaattatttttttgcttaacttgttgttaaattataaaaacaataatttaaaaaattaataattgaaaatatatattatttgttgatgtattttttttaataattaattaatatttaaaaaaatttagtccaatcaaactatgtaccaaacacagtattatttattcagtacactctaccaaacacagcattgtatacaacataattctatctaatctaactctattcaatcctcttcacttaagtggcgtttagttagacgtaatgaaataaaatagaatggaaaaaaaaaactatttttattccattcttttatttagttgcttttaaaattattggaataccattctaatagaatgacttttctattattttagtagaatgactattcttttttcagttagtccagtccaattttactacaaaaaggaccgcggaagctcaatatcttcgtgtaatggatccggttagatggaaacttccatttaattttttttttttttaaagaaaatataaagagccggttcgaaattcagtatttcactacatagaaaaatgactccaggcaatcttgctcagagctcgccagttcatcgtgcttcttcgtcaggtttatcgtcaaattcaaaattggtcgaacaaacagccgtttcgtgtttatggtgatattatatacttttgccttattgagcccatgaaattgatagcatgcagatattgatcccaaacaccagtatgcttaagacatggctacgaaatcaaccatttacaggtaagttagagtaatttcttatcttaatgagcatgttaaattccttggaaagttaatttatttctttttgagtctctaaaagctactcttaattatcataaccttagtgacatgtgtaatagctagtgttagttattttgacggatctttgttggaattatatatataagtgttctgcatttgatgatattaatgaatatggagcttcgctcgtttcttaattaaatgtggtttgagctaatcatggcgttggttgaactgaagtaaacatatttataattgtcttgcacaccacctgtttgatgaaagtcattgtgatattctatagtttccctttgagtatgtttaataggaagtgtggacatcattttctgacatatgccttcaattattattatatatatatttatataaacacttgtagtgattcttacaattaagcatatgtgtatgtatgtatattatcagtgaaataacttaagcctgctgatatatttctttcataagtatacatatatccaaataattcatcattacttcatgatttgttacacaagagctatctatattaagcatcaattaaacttatgatattttgttagacactataaatattgtttgggtaaatgagataagctgtacgtggaaagtttgatacagctaaaattcaacatttactttcattttgtttattattaagttcggcatcaatgaattatgaatttttactttgtttataataaattatgaaaatctagcaatatctttttgtttttcatttcattcttgatagtttatgttaatgtgtttataaatttgaatttacagttgttacaccagacgtgtcaatgttcctggcagctcgagtcaccaatgcttggcggtttcagtgcccgcttcccatcatctctcactgtttgaactccaggcttccttcattagtatacgatgccaagctttataggtttaacaaggttgctttccttgttttgtccctgagaaccctcaagaaaaataaaattcatcattcactttaaagtttaattcttcttagtcatttacgactattttagtcgagttttgattgttggtgctcgatttttgatcagctttcgtatagcttggacaaagaaagtgatgattttctgttgtggttggagaggaaagctgggacccatgtgtcatctgtgctctcgattggaaaatcatcatatggcaggtttgtgattatatgtagacataaagttattgcttaaaattgttttgattgattgggataagcaattttagacgtttgagtctgagataaggatttcatgaatgtttactcttattgggaagagctggctcaattaactcaacttttgattcctttctgttaatctacaattgtacttttaccattctcttctctattattaatgattctattatgtatgcaagcatacaaaattgtctattattattgttgttgtttttaattgactgaggtaagattgaaatggtaaatgtagggcactgtatgcatcaaaagttatacgaaatggagattgtattttgagagttccttacagtgtggtaatgttccattttccaaacattttgttgaaccttacatttaaaagtattgacttggttttagcattttgcagcaactagcaccagataatctcccacatgaaatcaaaagtttgttaactgatgaaattggtcatgtttcaaagcttgctattgtagttttacttgagatgaaactaggaaaggtgacaatagttttcttgacatgaattttgtctcataaaacaatcacacattgcttaatgaatgtatttgataatttcattacagcattctgactgggtcccttacatcaactgttttccttgccttatggaaatgcatagcaccgtgagttttttttttctattagattactttaatgaaaagttattttggtattaagtaaatatttatttgaacaagtatcaagtcatactgttttttatattttgttcatcttataagaaatcattatatataatatgactctaaaattttagtgttgaggttctagtgaagaagcagaatgcttgaagaaagaactgagaacttcatagcaagtccacaacaaagctcttcatggaattagcattttgggatagcctaaagggctatgattcttgcatacagtaattgtttgtattcattttctttttctttctttttcagatgttttggagtaatgatgagttggaaatgattcgccaaagttctttgtatcatgaaacaattcgtcaaaaatctctagtcaaaaatgaatttttgacaattaaaaatgtaagaaattcatttctctaacttgttaatgattttgcctatgtttttgtccatttttcacttagattgtctatgtatgtgtttcttatcgtcttttttacaattcgctttcagttgtaactgcttttaacttcatagcattctaattgagtttattggacaatcaatttaaagccttctacaattttatgtttttaaggctcgtttggtacaccgtgttgtattatgttgtgttgtattgtattgtgttgtgttggattgtattatattgtattagtattatctaatacaatactatatttggtattaacttgtattaataggttgtgtaaaattataatatcttttcaataaattcgaccttggcctggactcggacccggaccacatccccaaacctcgacctcagactagggtccgagttcgggtggtagtcagaagtccaggtccaaattcgggtctgagttggggtccgggttcgggtctaggtcccgggtcaggttcgggagtttgagtcctagtctgaattcgtgttggggttcaggtgccaaatctgggtcctagttaggggttcggctccgagatccgagatccggggccgaggctgaggttgactttgattcctttgtaaatagaataatacaaactaatacggatcatttgttatgtattaaataatatgattcatattgtactaaaattttttgtcgtaataattaatacgatacaatgttttatagtgttattcgttatctaatacaatacgacccttatacggcctaccaaacaagcccttagttaacgaatatattagattgtgtttctttagtttgaacattggtcattataaatagtacatgatataccgtagtaaataatctttgtttatctccatcaccatttggctggttgaatagattattttgttatggatgcttgttttaggttttgttttgaatgatttgctttagggggaagtgaatgtggtggttaggctcttattttttgaaaaagagaaagaggttacttgtcttagactgacccaaattttatttgggagacttgtggcggagaaaaaccgtattacaaactaaattttagctactagtaaacttaactaaaactcggaaaaaaaaaatcaaataaataaatgtactcattagcaagaattacagctgtctatgatttttaatgtagtataagattccattctctggtcaaatcttgaaaagaaaattcctcaaaccctttcgacttaaaaaaccatgtagccactcaaaacatattcagccccattctcagttccttcaaaaattctcccatttctttcaagccaaacgccccagaatatagccaaaaccgctgctgttcacagttgtgtggttcttcgataggttcttgtccacatagcaagaacgaaatcttaatttcttttcttttgttgaaattgttattttatttaaccaattttaggaacataaaatatacaataaggtataatgaagtagaatcattgcaataaatttacttatataggaagaactagcagaaagggtctgaggtaagattaaattttggtttgcaagctggctgtacaaaaccaaaatgctttgaagtattttctttactagaccttagtagagaatgggaaagtttcttgtattagaatgttaaatggaaggttttttgtaagtttatttccttgctttatttttattatatcttgattattttgttaccatcatttttctccgcaataagtgaggacattaataaatattggaggtcacttatcgacatgtgatctttgtctaattataataatctttagtagaatcgatatcaccgcttaagttattagttgaatcatatacaacaatatgtaagtgattataatatatgtttggcgaggagcttttgaatttatgttttgatagttgtgtggtttgctcatatctaaacattttttttattagtatgataattagaagtaataatagtgataaaatctgtaacaaaatttcaggttattgaacccttttctgatatatttgaaaggatcacttttaaggattttgtgcatgcatatgctataggtaagcagttatactcatgacatttacatatatatatatatatatattatatttatatatcataatacatttatgagatgattttaatattgttcagaagttaaccatggattttacagttagttctcgagcatggggaagcataagaggtgtatcactggtatcaacattataagaactcattgattttaatatccacataatgtttcgtatttggtttcgtgttatctatttagtttgtattctttgaattaataaattatttatagattccatttgcagattttttaaatcatgatgggaatgtgaaagaatttcttttgaatgatgatgaaaaacaactatcagaggtttgtactttttacttttcatttagtacctttatgcggcatagtgtataaaaattaagaatagtattataaaactctctccaaaaatcaaccttgttactaatcttacagtatttattaacaattgcaagaatttttcatttttttatttgtttttttatgtgtaggttattgctgctcgtgattattgtcccggtgaacaggttagtaggtcatactttttttttttctattattattattatnnttattattattattattatatcaagtccttatatttcattgaagtttccattaattcaaatattattcgtttagatcttttatattatagaaaaaatacaatagatcacataatgtagtagaatgctaggcttggataagttttcaaggattttgttttgcatttagcatagtgtgttatcaaaagtgtcatttgaggctagctcgttgcacatgtagagatagcatactagacccattttcatctgttttgtaagcatcatactaaaaattagcttgtatcttacatgatttgttaaatcatgcatttatctcacttattaatcttgtgataatatgatttcaggggaagaaaaaaattggtatatatatgtacaatattacacgtgtagagatactatgtgagactcttcccatccctttctataaatatcaaatgaaacagttagtactttctattaaattttgtaggttctcataagatatggaaaattttcaaatgctaccctgttgttagatttcgggtttgctgtcccatacaacattcatgacgaggttagtgttattttcaattttaaaactcttgaattttaattttaaatgttaatttttttctctttaagattattttgtagttgtcatatataattagcagtattgttatagttaccaaaggtcattttaccttttgattatatttttcattaatatgttattaattacattcgctgggttttgaacccataatctccacctcacctaaagcctccttgccttcttgagactagctcaagtggtaattactaacttttttcggttcttaaagtaaaaatttacatttttcttgcttattcccaatttgccttttcaatttaatagggaaatttgatgaaatgtgtttaatggagcatagaattgaaaggaaaaaagaacatgcttttcgtttaaatttacaaactgaaacaatatgcttcaaaaaatttttggacaaaaatatatctctctctctctctctctctctctctctctctctccccacccttcataattatgattgggggtctcagtttcttgagctagacgatgaaaaaccccaggttctcgaggcatgatcctattctcatcaacaatcgttcctaagtgatgaacgcatctgatagatgagtgtaagtggacatagttggggaccaggattgaacctcgtatcaccatcgacaaaggcactgcgggataccatgggaccactgcttgagaggaagaagtggttggagctttagggtttggcttcttagtttcggagtggagttccggaatttctctgtcaaacgtgtggaaaccgtatttatgtaagtccctcaagatatgttgctcatctaaaaagcaagaatacacttagcagttagccctcatatcaaaccctaaacaaataatggaacgaaagtcccttaaccgctgagaagaggccccctccggatgctagcatatttagaaattggaaatttcctgtgctaagcgtcgggtgcaaattgcaccatgcccaagaacagtggtacaggggacaaaaagaaagaaaatggcgagaaaatggcgagtcctataaatcctgaacatggaagccccgacctgagatgaaaactagagatggctggggaaaatacccaaatcacagctacagtgtaaatatcacatttatgcaaacaagccaccaaataaagcaacaattctgaagataaatgcatatagcaggtgactcacaaataaaaaaagctcgaatggttgttggttctggtgcatgacgtcggtaaaactgagcttggcaacattggagaaaaagtagaagaaatggggtgtttggaattttggctagcccgagttctgagaaatatggggataattttttttttttttttggaacaagagaaatgaattttattccaccaactacttaattctggtgggttttatggatattcggtccaatttaatagacaccgttcatgattacttattgaaagagtagtatcttgtcctactagtccttgatcctttttatgggtgaatttaatgaggtgttttttgtttatttaattaaattagagcattctttatttttgatatttatgccaattggaataaaattcttagcccgaaactgatggttactctatattttgatctcatattttcagattcatatccagtttgaaatacctcatcatgatcctcttcgaagaatgaagctggaaataatgcaaagacaccatgttgtggtaaaaaaggatgttaatgcttcttctccttccatggattcattcactatcaagttagtgatgatgtcatctacttattcatatatgcaaaattaattgagctttgtgattgagagttgagatataaatgaagctagattaaaattatttgcaaaatggtaatgactctaaattagagatattttttctaagagtttgaaaacacatctaagactgatgctagatgatatttatgattaaccatgctttatttcatttcgtaggcttactgctaatgagattagactgtaaaaaaataaaataagacattagttcatataggtagaaatataataggggttgaaaaatttctttgaaaaagaatcaggctcttaaattttcatgtgtctagcatgtatttgcatttattttagaaagaatttatcatacgcttcccaattatttagggaagtaagggcaagtagtaaaaacgggagaggtcttccacaatcacttcgagcatttgctcgtgtcatatgttgttgctctcctcaaggtatttttcagattatatattctctctttccatattcctttcctacatattatgatagttttggaaataatatcgtcattacttttgaatatttagaacttaatgatttagccatcgaagctaaacaaacggatggtcgccttgctcgtcgtcctttaagaaatattgacaaagaaattgaagcacatcagattttattggcacaaatatctcatttaattgaggactacgaatcatctattaaggtgaagttgcattctacttttatcttgttaataattttggccttcaattttattcaccataaattattgaatgtgttatactcattcataactattataaactacaataagaaaggtttcaagagttttcacacgcacataaaattgctttgttaatgaaaattaataataaataaaagaactgacttaagaacaataaaaaattaccgaagtataaagtagcatgtcgaaaaagaaaaaataaaaaaattaattaaaatattaagaacaatcaaatagagagaaaagtctttaaactctagtgatataaattatcatttaaaaagggtgaaaattgctatcttatgggttcatttttgttataatatatgtatacttaactaatatgttgcactcatattaaaagtttctttcattttgtgtttctctatacaaatgtagtcactggaagccagtaactcctcttctcccgtaggtagggaaacagttggtatccgaaggcaaatggcacatgatcttctcaagggtgagctccgcgtcctcaactctgcttccatatggctaaaaaattattgcacaagtttgattaatacaaccagttagcatagatgattagagatagaaatttaagtagtggaaataggcccccggagtactgcgcctaatagggcaaggattccctgcctaaatagggagtggagtggagtgagaatagaaacaattttctatccccgaatgtcaactgggacgggaatgagataatactcctgctgcgacaagggctcgtttaatgttttttatttatttttaattattatacatatattattatgtgtttttgtagtttatcgataaatttttaaatatttttattttagtttacataatttttttatattttaaattattaacataataaaatatgttaatttgtatataatttatctgttttatttaattgcttaaaattattttctcaatttatgttcaaatgaaataatatatttatatttaaataaatataagttaataaaaaattaatcttattttattttcgatttgattaaaataatatatttaaataagatatttatttaagtctctttttaataatttaaataaagtaaataatattatttttaaactaatacaatgttttaataaataaatataaataattaaaattaattaattaaataataataattatcttataattatcattttaccttaagaataaaatctttcacaaactaatcatttcttctactgatctttctttagtcaatacagggtgacttggcttataattctaagataaattagattattaattaaactatcaatgtaataatcttatttattaattctaatataacttcagaatataaaatttatttttataaattatagaattataattactaaattttaactaggagtagcctattgatataataaatataagggcattttacataaatgtatatattttttcaaataattacaaaaaatgtgcaaaaaaacacaattttaaaaatgtacatatttaaaaacatattta

SEQ ID NO: 36273 - DNA, 3199 bp, Cannabis sativa
  modified_base (32)..(39): a, c, t, g, unknown or other
ttctgtatctgttcgtattaagaattgtcttnnnnnnnnttatattaaaaaaaaagttgtcgaaaattaagctcagggttctatttttaccattttcgaatatacagggtccagataatcatttaacaaaatagaaagtctaatttataacttttacaaaacacggggtccaaaatagtatttatcctttaaaaatatatttttgaataacttataaacacaattgtttcttaataaaaataaacgtaaatattttattttaaacttacttataaattttattgaaattatgtgataaaaactatatttaatatatatttataaaacataaataaaatttatgaatatgtttgtatgtatataaattattaatttgatatgaaattataatatatatatatattattttagtaatatatcaaaatataaatattaatttatatttttatagttaattatgagttttttaaggaaatcaattaaaaataattaatacgttaaaattgtaaatatttatatttatttttattatataatgtaaatatgaaaaattatttataaatatttacaaaattgtataaaattgtgtaattatttattttattacattttttgtaacatcgttaatttattaaaagttaattaattaataaagccgcatagggaagaaaagaaaactcagtgcataatcatatataatatagctgtaaattaatttgcaaagaagatcatgcactcactcacctcaataacaatgcttttggggccaagcatgagaaagagtgagagagagaagagatcactatttttgtgatgtcatgacaataaactgtttattattattttcttctaatattatgaagaaaataatcatgcaattgtagttattataaccccaaaattacatgcatttcttgccttgatattcatatcccttttctctttctttctaaagattcattctctcattttttttataatgtacatgcaagagcattggagtttgcatcacccaataccataatcaatcttttataatttaatttttataccaactttctcttctgatcttcactacttacacaaaatgggtagacctccttgttgtgataaatcaaatgtgaagaggggtctctggactgctgaagaagatgctaaactacttgcacatgtttctaaacttggcattggaaattggactttggttcccaaaaaagcaggtcttattacatattatatgtactttaccatattaatattttgatgaattgtacatttttttctttaattttgtatgaatttacatacacaattacaggtcttaatagatgtgggaaaagttgtagattgagatggactaattacctcaggcctgatctaaaacatgacactttcactcctcaagaagaagatcttattattaaccttcaccaagctataggaagcaggtaattaattttattttttcattttatggatttttttttttataaaagattagaattaaattgatttatatttatatatgtaaaggtggtctcttatagcaaaacagcttcctggaagaacagataatgatgtgaaaaactattggaatacaaagcttagaaagaagctgtacacaatgggaattgaccctgtaactcacaaaccaatttctcaaattctttctgaatttggaaacatcagtggtcttcctaataatcatcatatcccatccacaaatatgatcagtagtactactactactacaactcctgctagaattttctacaataataacaataacaatattggaacaagccatcaatttcaagtaatgactaaccaaaacctctttaacaataataataatagtaatgttcaaccacactttttcaatgaagtaacttccccttgttcttcatcatcttcttctcatgtcactgacttaagctcaccacaagtagttcttttcgccccgccggctctgcctccgcctctgcctctgcctccttgtaattccaataattggagtgagttttttcttggtgacaacactgaagatcaagcaaaggagaatgatttggagggttttttattgtcatcatcatcatcatcacatactaactcttcaaagttaagtaatggaaatggtagtgatcaaaatggttcaaacattcaagagggtcaatttgctcagatgatcaacaatgatcatcgtcatcatcatcttcaacccgaaaattcatcatttgtggatgcaattttggatcgagacagcgaattgcgagccgccttccccgagttcttggatggatcttttgaatattagtttccatactcattggaattgacaacaaaatgtttacaataatactttcttctcttcttcttctttgtgtttttttccctacaatttggtgagggaaataataggacttttatattgcaagtcataaaaaaaattattgtggttgtttttggtttacaaaactttttatggctttgataaaagcttgtatttttagtttattaataatgctatttgtgaggtactttagctattatataactgtttcttttttctaatgaaacatattttaatttgtggacaattaaataacaagaaatatggttagctgtgggaggcagtgtggtttagcaaaaatatatttttttggttaaacgatgagttatcttacatttattgtggatatttgtgtctaattatgtttaaaaaaatacaaaaaatatatggtaagctgctagtatggactaaattaataaagaaaaaaaatgtaacttgcttacttccaacaaattaagacagataatcttatattctaatatataagaagtcctaataatagaaatgaaatcacaaaatgatgaaaaagagtagttaattattatctaatggttacgtaattaattgacgttaacaataaagtttatatagtggagagagagaatgaattaattatgtatcatatataaaaactaaatctacacaattctcatccactaataatatatattggtttacaaattatatatgtgtattgtatatagtactatatatactctctctctcctcttcatcatcatcatatcatcatcatcaacaaacaaactctcacaaactgtgaaaagagagaaaataatcaaaacaataaaaaccgtacgttagtacgttcttgttaatttgttgaaaata

SEQ ID NO: 36274 - DNA, 3409 bp, Cannabis sativa
tgtctaaatttgttgaactttaattaaccaattgaaattaattatcccttgtatattttgttggttggttttttttttttttttttttacattttcaagttataagatattctgctgggtagtagaataaacattgagcttttgtctttcctcaaaaactcatagcctagttaatgtttccattactgtttctcttttgcagcaccattgtcgatgttgtgggaggacactgtgtaacgaacattcatcaaatcaaatggtaagtgaatcttcttgtgatggcccactcatccattaccaacttttgtgtttctctggagtttatctcattttggggtgaatattctgttttgtgcacttctcaggctttacctcagtttggcattcaatcggctgtcagagtttgtgctgattgttttaacaagtcctcgcggtactcaatccaatttcatattaaatttatagaatctaggattctaggaatttatttattatgaaatttgagtattagagtatggtgtggtgatattaaacggcctttcctcccttatgtattatatatacagctatatggcgctatttaatacgacactttagaatctcacttacataaatatgtcgggttgaaatgagagtgcaaccctttccttcaagcaacccactttttcaggaatgcagtccgggtttatatagagattttgtagtatcatggagatttatggtgtattgcatgtaaatttatggagttttaaattgaagttccaagttaaaataggaggaaacaaaccatagtttaaggagatttccagtacaatctcttctatttctgcttcttactatatttggaaaatgtggtattcttttggaagatgtgtttgcacgtactaggagctttcagcttctgtttccttttctttcttgttcattgtttggaaaataattttgttcgtcctggcttaagagttttttctttaattttttcccctcattgactttttattttaatcaaacttaaaagaatgtgttttttggttttgatacagaccagggcaaagcagtgtacgggtttctccaaatgaagctaattctataacagatgcagtttctagtttaagcattgctgacgatacacaaagtaagacagagccaactgtagagcatcaacctgcagtaggcattatagagtgtaagtgtggaatgcctctatgtatatgtgaagctcctgccccatctgtggatgtgcttcccctgccggtataaattgttcagtttccttggatctaaccattgcattctgtgtgcaccttttagatttaattatgtttcattggcagaagaaaccctcacccacatctatccctcgggcaaatcctaaaccgaagaaaacagaaactgcatccaagaataaaggttccacgtcatatagcaagcctaggtagggaccctcaggtgctttttgattctggtatctgttcttcctagcagagtgaatgattaaagaatgtgaatttatggattctccatcattcaatggcttaattttatttttaatttttagttttcgttctctctctgactagtacatgttttaatcctgaattgtaacgagaaaatatataatcaaattagagaggctcgtggaggatacttgtcttttaaatctgggtgaacataaaggtttatgaactttcctttcttttccaaaaataaaaaaaattatagtatttcttttgacaatctctttcagtttacttgcttgttaaagaataaatgattaccagagctctaatattattttgcaatgatgccaataatcctcaataaaaggaccagtttgttcttgactcttttgttgtgctataacaatgtgaattatggcttcacaccgaagctggctctcatattctatatgtgatttcttattgtgcagttcagttttcaatccaggacaagtatacaatggtatgtcagacaaatctcagatggattatgatgtcaatggagaggtatggattgtgaattgtttagataaagtgatattttgctttcactgcaacaagtaatattttgctttgtactattgtttgtatgtattgcttagggaatgagagaagctattaagaatggtgacactgctgcggtcaagaagcttctaagtcagggtgtagatgctaattaccatgacaagcaagggttgtctttgctacatttggtacattcctctttacatttggtgcctgttttggctattatctattatgtttcaatgtaaatgatactaatatctgaataaatggggtgcaggcggcagtttttaatcaaaccgagatagttttttccctcatggacagtggagccaacctgaactacaagaatgctcaaggtaacaatcaaatttcaccctcttaaaagtatagtttaggttgctaactggtagtgatagaggtcattgtaataacattgttattacaaagaggcagaaaaggtcaaatttacttactagttttagcttttggaaaaggtgagattctaatcagttgtgtcttgtttcaggggaaactccactggattgtgctcctgctactttgcaatataagatgcgagagaagataaaagagctggagcagttggggcagcagtagagctgagaatgttgtgtatatgattttcaccacattaaggctttaagttacttttgcaattcatgtgtttcctcttaattatgaaagttgtttgagagaattactatattcatgcatttgctttctgtaagaaccacggtataggacgcatgctataattcgtgaatcaataatcatgatagtgcctgtaagatgcccccttataattttataaggcaaatggagaattttctctatatattcatcataatccaataataatacgcacatttggtgaaatacaaaaagaatgcctcttaattttggaaaaatgaaaaataccccaagattcttttcgctgcatggatatattaaaaaaaaaacatatcatattccaagtttgtaatttcgaaatctcctttaaggaagaataaattttaaacgttcgaaaagcataatatgattcatgtacataaataagagctataattcataacaagacttctgccacttttacttatactagtttttagacgtgcgttgcacggattgcatattattaatattaatattaattgagaatagttcggttcggctcaacgacgtcttcagtttcacatttttatttttatttattaatttactattattagtttaatttcatttaatgttttttatagggttagaattataaagagtttgtttcttaattaattttaatgttgtgatcgtgtttatgtgttgaaactaatttagtttttccattagtcttttcttttgacatggtt

SEQ ID NO: 36275 - DNA, 4770 bp, Cannabis sativa
  modified_base (61)..(70): a, c, t, g, unknown or other
  modified_base (3746)..(3774): a, c, t, g, unknown or other
  modified_base (4620)..(4623): a, c, t, g, unknown or other
  modified_base (4724)..(4728): a, c, t, g, unknown or other
tttttaattttaaattttttaatttttaaagaaaaagaattttttttttattttttatttnnnnnnnnnntaattttttatttttttaaatatttatttacgtggagtaataaaatgtgccacgtatacactgtgtccatatagacattccaccatggcagttaacacctaaaaacggatggaaatgttaaactgctaacaaaatacgagtttagggggttttagtactaaaattttagaattggaaattagatgcaaaaatctggctacttaaagaggttatgccgcaaattaaactaaaagttaataattgtctttcttttatttattaaagacataaaagaaaagaaatgctcattttttgttgacgtaaagaaatgctcattttaaaataataataaataaaggtggtttcgttataaaaaaaaataaataaaggtggtttcttaattcttctcaataaatagaataaataaaataaaattcgtatatatgaagaaaaaacaaacaaacaaactagtaaaattgaagttgttgatatttgtgtatttgggtaggtgtgaagcaagagatgtcttaggtatattacggcatgtacaagtaacctgattgattactcgtgtcaaagtctttcaactttcatcttattttcagacttttagcctaaaatgttcctaatatgttaagatgccaaataccatgttaatgtaacacattatgagtaaatatgagtaatttattgatattatttattaaattaaaaaatataaaacttaatattaaattgcatcaatattatgacacattaaagatattccttttaacatgtctctagtaagttttgtggcatatgatatgagcgataactttagggtccattttaatcatatagtgtgtggttaattttaatctttgatgtgattatctaatattattattacacaaatatatatagctttatatgcaaatgattatttattattgttttttattgataatgacgatgatgacgattactatcttttaatctttaatatataaattagtaatttaactgtaattaaccatattattttacaccgcacataagtatggtatagtctgtggttatggcatatgaaactaactatgcagttgagattttcacttatcacacttgcaagttggttaaacttttcatcaatttatcccactcaccccttcaaatgagtaatgaccattaattgatgataaaagtcatttgttgttttgaactaataccatcaaagagtattgttattaaactttattggcatttagcacaattttgaggtagcaactttaggatgattagtaatattttttaaaaattattatattaaatactcatagaactaaagtgaaaaataatcccaaatagataaatattataactaattatagtaaatgtaacaaacaaaaattttattcttcatcaactcttatttgaatcactgatgaggtcatgtgatttttttttttaagattataaattaataagaatattaatttttcattatacaaacgaacttcaatacatattctttgcattaattaaaatttataatcttaaattctaataatttattaatggatctacaattgaatagatttactaatatacttcatatttattaatcctacacaactcttcttttgtctagtgcatattaatatgtttatatcatctcaatcttatgatttaaaatttattacttgtcaagttaccttatacaagtatctttaaatgtctatatgaaataataaatatagtgaataaggctattgatgaaaaattatataattccattttttagtttgaaatcaaatagtgtaaacttttggagttttatgccttaaaattcaattttaatgtaatcttatttacttatcaataaaagattagagatcatttttttttactattgtatattgatttgttcacatattactttcataatcatttaattaatatataaattatactaaatcccaaacataatgttattcacgataatattgttgtcaccacattaaagaataatcataattgtatgttttaaactatttaatctcatgatttatcagtgcactagatttacactaatgtgataatcagcaacgagatttacttatacttgcaccactacaattaacacatttcatttctctttttttatggaaaaaataaaaaaccaaagataattaaatgaaattttattagaaaaaaaaaagaaaaaaattatgcatgataaaaaattatgaaaataaaattaaaataagttttaattaacacaaaataatatgagaaaaaaattcttaaaaaaatattatgagtgatttgtaaaaattattttaagcttaggtggttttaaattttttaatgacaaaaataaaattaatttttttttaaaaaaaaaaaattgttttaaaaaaaaaatatgttccataaccacttttattttttaattgtaaaaacagaaaataaaagtatgttctgtaaatttaatttttatttgttgattttatttaagtagggtccgcaataggggttcgtggtcagtgtctgagtctaagtctaggtttgaggtccatgtctaggtcaggtccgagatcggggttgggagtccgagtctggggtttgggtccaggtctaggtcgggggctcggggtttgggtgcgagtcctagttagggtcaaggtcgtggtcctggttggggttcgagttctaaggtctaggttgaggtcggagtccaaaatatggatcaaaaagaaaatctatttaagaaaattttgaaagagaatttttttgttttcaaaatttttcaaattttaattctcaattaacaaatttaaaagtaaaaacaattttatagaacatgattttgaaaaatattttcacttttctacttttaaaaataaaaaactaattaagaaaatgttactaaacacaccattaattttttttagatattgtggtgtacttatcgtggaatacaaatagggctcctcttataatttttgtaaatgtgtaagataaatgtgatatccattgttcccaataacatatggaaaaatgataagaggttacaaaaagggcatttttaaattttaaccaaaaaaaataataatattacaaaaatacttccagcaggccaaataaacaaatatacattccaaataaaaaatttacacaaataccacttacacacaccttcaacccaggatctatgcttcatgggtaactatcgcgcaatcatctcacaaccacgcagcaacccaacgcaatcgaaacgaaaattcaaccagaaagagaaccatcattaattccaacgacttcacctgagaaaacaaccagaatcaattaaaacaggggttgtttcaaattcatgaaaaaagtgtagaaaaattactatgaaactaaaatttaatcggaaatccagcttagtttgtataaaactaatgtcctgacttcaatttttagatccatgaaaggaaaatcttaaaaagttgaagtggaattcccaaacaatccaactcaagtataatgaaaaaacaattacatcaatactatagtaaaatatttatcctggtgtattttcgttgttttccaaatttctaatggtgaatttgttcatattaaatcataaagagacatgtagatagatttatacgtacgtggacatactgttctatttttaatatttcacaatagttgcattacagtnnnnnnnnnnnnnnnnnnnnnnnnnnnnngtctgattgaaaccttcgtttgatacaaccttcagcaaaccacccaacaactacccagaaactttcgtctgatgcaaccttcgaccaactacccagcaaccaccatgcaaccatcgtttgattaataccttcgtctgatgtaaccatcgcgcaaccacgtagcaactaccctacaaccatcgtctgattgtgtaagtaatagtgtaagtggtattttagtaattaaaattacataaaagatataaatgttgtccacaccttatagaggtatttttgtaaataaattgtcaatttatatgttctatgtaataattccatttattagatgaaaagtaaattaaaaaaaaattattagatatgatattaatcaatcacttataaaaaataatattttttagacatagaaaaattattatttaaaaaaaatataatattaaaagataaataattgcttataaaaatatataaatattttactaaatgaaaaataaaaatttattttacaacatttacaaaaattgctaaacacctttatatagcatataatataatattcttagagatttctaaaccattgtggaatttttttttctttcttaaagaactctataattttgagttaaaattaacaaagttaattaaaaaaaaatgtaacaaaaaaaaaacaaaaaagttaacataggaaaatgaattattagaattccacctcacattgtcttgtgtcacataaactcttaggattcgtttggtatataggtttcatttcatagaagtaggtttaacattgcttggagagtaatgaagggattgataaacctaggaaagcaacattaccgtgtttggttnnnnttggaatggaatgtgacaacttttttttacaataataattactattttttttgtaaaatactaataattcaataactttttggggaattaccccatatacnnnnnttttaacttttttttttttaaatttatggtttgagtttctaa

SEQ ID NO: 36276 - DNA, 5410 bp, Cannabis sativa
aaaagagggtaaaaataaaagaggacaatataaaaaaagtatagagcgtaatttttgtggaacgggcccagcccagcccagcccaaaccaacctaaaatatcatttctccatttcattcttccttttcttccactctctcaagtctcaaaggcaaagccgccaccaccattctctgcagccaatccgccgtcttccgccactacggaccacaccccacgccacaaactccaccgtattctaagtagcttgtcagtaggtattgtatttctcagctgaataatttaacacttaaatacctgatcaaacaaaagcccccaattaagttttaccattttcttagttttttttagttgagcttatgatatattagtttatctaaagatttaatatctcaggaattgtgtatattatatgtgtaatatcatcttagattacacaggattgtttgatttttgctttcttaataattgatgtttcagtttcagtttcagttggcgtgatcgagcatagcaactgaatctgagcatggccgtccgtaagtttttctttttctttatttgtaagactaagatttcattaagctaactaacaaatgttgaacttgaaggtcttcaattcgagaactcttgtgaaattggggtgttctccaagctcaccaatgcctactgtttggttgccataggaggttctgagaatttctacaggtataaattaaatttctacaggagattccttgagttatttttgtctttttttttttttgtttgtttgttaaaattattgacaacaatcaacagcacgttcgagtcggagctggctgattatattcctgtggtaaagacctccatctcaggcactcgcatcattggtcgcctttgcgctggttggctcctaaattataactccttactccttactaatgaaaaagttgtgtgtttgtttatctcatggattgcatctttaattttgtcttgtacaaaacaaacattcaggtaacaaaaatgggcttctggtgcctcacaataccaccgaccaaggtactttatatatgcaaatgcgaaattcttaacgtaatcaacaacaacaataacaataattatgtatgtatatacaatcttaactaatgttgtataaatactgtactttatatatgcaaatgcgaaattcataacgtaatcaacaaaaagaagtcaacaataacaatgattatgtatgtatatacaatcttaaccaatgtcgtataaatactgtatgcacaatagagcttcagcacctgagaaacagtctacctgatcaagttgttgttcagcgcatagaagagaaactatctgctcttgggaattgtatagcatgcaatgaccacgtggctctcacacacactgatcttgacaaggtactatccatatccataattattggaatgtattgtttccagtttccacaactaactactctcacaagtgtacccttttcctttttgtctaacactactattacttttgttgtcaggaaactgaagagatgatagcagatgttcttggagtagaagtttttaggcagacgattgcggggaatattcttgttggcagctactgtaccttctccaatacaggtggcttggtaatgacaaatcgtacactctttttccagcttttgctatttgtatttgaagactttcgtccattaaaattaattacttaaaatgcttacacgacaggttcacccccacacatctgttgaagacttggacgaactttcaacacttcttcaggttcctttggttgctgggacagtcaatagggggagtgaagtgattgcggctggcatgatcgttaatgattggacagccttctgtggctcagacaccactgctactgaactctctgttatagagagcgtcttcaagttgagggagtcacgacctagcgctattgtcgatgaaatgagaaaatctttgatcgatacctatgtctgatttctgtctttgcattcgtgtttgattgcgctcaatgtttgaaatatcaacgctgctaatttgtgacaatggttgtcactttttgaagtatcttttgaagctctttgttgctatgtttactcatattataaaaagaaattttcaagtggagaatgtaatagtgtagtgtacattattttgttacaaatctaaaaatcttctttcattcattctaggagtcctacgattatgggagtaaataaataatgcttgttatcactagtaaccacaaatatataattaacatcgcatttggaaaaatggacaaaaatactatcctactagtcctagggtagttgcagaatatggtatgacgtgctttctcttctcctccaattgaagtagatgctggggtattgaaatcaatcaaccaaatagtgttgaaggatttttcttaggtagtctagcatttcgaattccccttcaagttcttcccactgcataagcagtagttgtttagtttgtgagacagaacaaaaatagacccataaagtgtgtgcatattgtatacatcattcaatatgtatatgttggtagaatttgaaactcacctcttgatgagacaatgataccactttccatccggcagcagttatgtagcggcgtttgagcatggtgtgtcccaatggtaccactgcagagaaagcagaatcaaaatagaaagaaacgtaccattttaattctagaatgattgttgtcatcactcatcatagagaatagaattttgaatatcaatagagaagaaagcaaagtagaatctaaactcacatgtattccttgagaagtgagttggaccatcaatctccaaagcaatcttcttatcagccaaaacagcatccaaagtgtagccatccacatcgtactctttcgaccattccaggcctgtgctggtgagaaggcgagcaacctctttttgaaaagatgaagttactttttgattaaaccttttagtctttccagcaccaatgattttctcctccagttttgtccccagagacaactcaagatgagggcactccatcttcaagcattggttcacaagttgaacctgagaagcaaacatcatatcctccctatactgttctgatatcctttgctcctcaaaccgggccaagcttgtccaaaccgacgaaaagaaactcctttccatttgccccaaaacagcatacgaccaggcaatgcttccaagctgatcccggctaaaactcaggtcgccaatactaatactatctagagatcccaacagatgatcagcaggctcgaacaaagcagcaaaggcccagagcagctgagcaagctcttgctcctgaaaggtgtggattatttgggatgcccgctttgacaattgggagaaaagagcaggagcggaatgcctcatggaagcaaaagcccctgcaacgttggccacattctgggaattgaagtccccaactttggtcaaggccacctccgcaactctatccatttcggacaagtaaagaagatcacccccaatcttggacaatgcccatgaaatgttggaaacgccctgagaggagcactcgggcaacactgtcattgccaaaccaacaagcatggacatgtctctctgacgagcgaaagccaacctccgagtttccatcaacgagactttttccatgttcttagcgattctatgaagggcagtggcaatgttgagaggagtgagcggtgaggggctgaggcctttctcaacggccgacatgacctcccaagtaagctccaacacttggtccgcagtgggtgcttctatgatcgctctgttcaagttgatttcctctttgcgattagatgggttagagaattgggatagcctctgagccagcacttgcattgtcttgcccttcctttcttcgaaaaccccacctgcaagactgctcacggttctccttaataattcatcgtctccaaacccagtggactcgtcatcatcctcatcatcatcatcactggagtctccttccaagtcttgtagcttggttttcttgaggattttgatgggcttcttcttcttcttcttgctcttctttttcttgttgactgtgaccaaatcttccatggtagaagagaggcctctggcctggatggatttgagagcaaccttcctggccctgaggcaccaatccatctcagcgtcgccggttttaatgtcaacagagcgtttcctctgcagtttctttctcttcttgggagcttggaaagccaaagggtcaagctccccaagaaactccaactcccagtcgaggtcgtcttctaggtctttaccattatcattatcagaagcagaaacggaaacaggaccaaaaccctccgaaacccctcttcttcttattgttaaagtaattggaggaacactaacctttctcggaagtgggtgtggagccattttgaaacaagtttgatgatggtgaaggaagaagaagctgctggtgttgatgctcataattgcttccatctttactttcacaactcacaattcacagtgttgacatatgggattagattagattggattgaattgaactgaacattctattcctaaaacttaacaccctctttggattgtcaatactataaaataaataatctcttttatctcactcaaatgtcacactcacaaccctcatttgcctttcctcacctttcaaaattatccccttaattaattacgatgttaaataatacaaatatatcatttacaacacattttaatgcaatgtcgcaatgtcaaaagtgatcaggattcaggaataaaaacctactattaccaaaacttagcatctacacactttgtattatgaattaatttaaaacacataaaccaacaattaaaatgtatttctaagttaatactagattatacttagttactttacatgcttttattattgaaagcactacacataaacatataggccaatcttaatagattatattttacaaaaagatgtatgataataaactatgtgggattttcatgtatgcaatattattcattaatacataattatgttattaatcaactaaaaaacaaattacactttgcgtgtggttatatttcgtttaatgataattaagttataaaattatatcaaaattttggtaatattttatataatttatttttaataatagcacaactattctacatagttttcgttattaatatgttaaacctaataattttctaattattttaaacttaataaataataacttttaattaacttatttattataaatatgtatcactaatattattaaatttttagttttcaaaattatatgaataaattaaattagaatctatctatctatatatctatactagtatattgttacgtgcgatgcacgtatgctatgttttatattaagta

SEQ ID NO: 36277 - DNA, 5203 bp, Cannabis sativa
  modified_base (4469)..(4488): a, c, t, g, unknown or other
aaattttctgcaacccagatcaatgatatgaaacagaaactagtttggaatattaagggaaactaaagatgacttgcatacagcttacagaaatatctactcaaaacatatatacaacatctcatgaaaatcattctgtacatagaagtagactaaaaaatttacgtacaaaaagcctaattgcaaaaagaaagaagagaaaatctaaagaaaacaatttactcatactcatattctgttgttctattttagaaccaatggtaccagaagcataagaagttggctaattaggctagaaatgaggtaacatccagcccacagtccatccaaggagcaaaccagcaccaacaaggctcaaccccaatgcgaaagcaactgcgtatttggtgatgtcctgatcaggctgccctcttttttctcctttacctttggcaccatcacagccaaagctcttccttggttttttaatgttgttagaagtcttccatggaaggactagtgggaaaagggtggacatttgctggtcattcttcctaaactgaatacaaagtgtttccagctgcagcaattggaaccactgtttataggcaaaaagtagagaggcctgtctgaagaagagtgtaacaatgtgctctttctcggcgtatgcttcctttgctgccttctcggcttcccttgctcttgtttgagaatggcagagtgcttctatcagctgttctttactaaattcactgccggaatcttcgaccccctctgtcatagtctcgagagttttgcagtaactgtttttcaggtaagaagaaatcaggaaatgtaagcttacccatgtgtaaaaacaaaccatttctctaatgcaaatcaacatggtgtcaaacactatactagggtagttctcatggagggtgatgaaaatcgtgaaatagtaattcttctctagaggtctaaactagcctagctattagaagacaatgcacatgaaacaactcaacataaatgaattagagaaggaaatttaagtattcaataactaccttgacttttcatcatataaatatttctgtctctcttgtgattttccagtgttagcaaatccctgaggacgaacagtcccagtggagagaccacaagtgtgagtttttctatctaacgatgcagaactttccttattgtcaaaacacccaatgtgggcaaatggatgacttctatggcaaatcttctgaggtgggggaagatcacagttctcaatatggtcaagtgattttctagcaactaaagagactaattcatctctatctgtcatacgccaccacggctcactcttctcactcccaatccaactatattctggatctaaacacgggtcattggctggtttggcatctgagtagtcagtagaatccatctgcataatctcccagctagctgttgagtcgacgagttttttaatgtcataatctacagtttctacattctgttttcctatttccaaagccttgtttttagcaacaatgttatgctcatcatgaaaacaatcactagtcgtttgactatcaagaagtgtgtcacctttttgggcctcgccaatcttaggagctgactttacaacaccaccttctaaggtttctttttcatccaccaaatcatttacttgttcatatgtaaaacccttatgatgtccataattaggttgcatttggagccaccatcttgtgtcgcgggatagactagaatacgaaggattcctgtttggaggcatgaagccaacagcaggatgatctggggcatccgctgttgctgctgcagtaggtcctgcttcaacttgtttagatgttgaagatgattggcagcaagctaacttgggagctcttttggcatcttcctgcacaaagcaacgattagctgttctttgccacacagctctcgcttctgctgctgccatttttctccttatttgtcaagcattctaatcttttaagaagttagaaaataaaacttccatcaggtaaaaattaattgtcaatgctacacaattataaagaaaaactagaccagaaaccttttggtttcaggtaaaaaaaactctccttcaatatttctttcccattaatggaaagattaaaagaggagaagaaaacactcataatgtgaaacaaagaaatgaatcacaattctgaaatacaatgaaatgcacattacagttatttcaatagtttataacaatcagatttttttcaaaatgttcactgagtttattaaaatgcatattttcagtttatgggattgctggttttaagttctaaccttggataatttagtttacttcttctaaaatgatcgagataccattgtaaacaattcaataattctccaaaatactaaaacatcccaactctatcctttgaaataacacaacatcgcaggtgaactattagtatgtgataaatataatctaagtcctcatctaccagtaccaccatgtttacttattgtgaaacctgaattttcactaaaaacatactaacaacatcggagggctatcattttagaaatagactaaacaaaaaagaaacgaacaacagaaaatttgagaatcaacaaccaaaacaaatgggcaactagataaacatgtaatgtcaataaaacagtataaagaaaaaaagataaggataaggacaaaatgggcaactagataaactgcatcagtgtaaggtttctctaattttaacaaatttggtaataacaatcattggaactgatagaaacccagaaagcaaaatcaacagcacatccacatcaaggaattgggaaaaccaaaacttagagctacaaattaaaattcaagtacaagtcaattcaagcaccatttgcaaccaaaaggagaactataattcaaagccatcttctaatatagaaacaaaaagagagtagagagagaaacaaagaaagagaacaaaccagagagtgaattgaatgaagttaagtgaagatggtgaattgggtgatccttatccttattcgaccttagatctgattaaggatttaaatgaagtagtaacatatgatattcataaattgaaggaaaggaaaaaaaaaagtaaaatggtctgacttgagagatccgaaaccaaagaatctaagaccacaaaagaagatgacccatgtcagagatggccatgagagagagagagagagagaaaaaggaggttgcttttttaatagtttcagttatcattctctgttgtcggtttcttcacactaatcactacttgcatttctttttctatggcttcactcaacacggccaacgacacttgtcacagtggttttccttttgtcgtttcgaaatacgacggtaaagttagagccttttcagtaagttgttgggtcatgacacgtggcatttggtggcgtgtcgagttgattatgggctccacccctcatacttattggataagacacctccatgagagtatctcaagattgaagcaaaacaagctataaataaataaaaataataaactcttatataggtgtctaagtatgactaactactcctttttctccactctagtaataatgtgtgtagataaatacgtataaatgtagacaaaatttggaataagtagtagaccccacaaagaatggaactcattttgtttgtatcgaaagaactgtttgagctaaattttgaggaggtcttaaaatggtggtaaaaagttaatggttaaaggaggatcttttttattcaccttaattgtacttgttttgaaaaagatggatcaaaataaaactatgtgccatatgctaatcctttgggattaatgagacaattgtgggctatgaagcataattgaatatgtgggtgtcgttttcttatagttaaagcaacacattaagaagttgtttgtgacaaatctattttccttttctgttaaatgcccacagaattgtttcccccaagtatttgaaacagagagtaaagtaattgaaaatcacatctagctcctccttagttctcacagcaattaaaagtagtgctcaatttcttttactatgctctaagccactcaatataatctgaataaattgatttttcattaattatagagtaatataatatataaaattctttatttaaattttagagtttatagtgtttcattttaaatttgtgaactttacaatttaaattatattactattttcttgaatactttaatgttcattcaattactttttatctcattttttactttataaattaatttttatactaatttttaatttttaatattcatttacactataataattttaagcttaatataaatattatcttctaatttatataaaatataattatttaagcactgcaaactaacaataataatttagggaaattctataatgtaccctttaaaagggatgcatcaatacatctttatctattttagtatctgaaataattnnnnnnnnnnnnnnnnnnnnatggtcatgtaaattacagttatttaagacaacttgtaaaattttaagaaatttagaaaagtttaatatgccgaaaattgagttcaaacagtatgttacacgcgtaactattttattttatacgcgtgtaaaataaactgtttgaaccttatgaaaaaaaaaatagactaaagaattcttctagatgccgaaacaaatcaaaagtacatcagcacatcccttttaaaaggatgcattgtagaattacccaatactttatactcaggtcaaaataaacctaatcaaaagaccaatgtacactgctacgtaaagtgttaagagtgaagaagcctttggtaatgtcatttcctctctgtgggctacaatggattaagaaatctaaggacaaagttaggctgccaaatttgtactctgtgaaaggtataaattctgccaaacagaattccctcgagtcacatctaccttctcacagcaattaaaacaagcgctcaccaaaaaaaaatatctcattagcataagaaacgagttattcgatatagttatataactaaaaagattgcaaattatttaggagtcatctaaataaaataaaaacaatgatcatattaacaatcacatggaaaaacataagcaattaaactgcttttaaatgggatgtataaggtaacttcgaagaacaatgatattgaaacaccaactctctttgaaaaaaaaa

SEQ ID NO: 36278 - DNA, 3659 bp, Cannabis sativa
  modified_base (2946)..(2947): a, c, t, g, unknown or other
  modified_base (3001)..(3001): a, c, t, g, unknown or other
caaagttgatgtgccaacacatcagaagtaaattctattttaccagcgcaataccaaacttttgtcagcataaaaatatgctggtaaaagtgacatttcttgtagtgtggaccttggataagtgcgaggctcatccttacttataggttgggcctagtatcttgttagagcttttgataggtcttctataattagttttgaattgggaatgccaagtgtctctcttctcaaaatatagataacaagatgcatgttaagggatttatatagtaatgcttgcttagtagctttcattattttttctattttagttctttgttatttttcaaactatacaacattttaaacatttgaatgtaatttttccaaattccaaataagtggtttttcaaaaaataaaaaataaaaattccaatcaaatggtattaaataatcacgtatcatattcatacccgtatgatgatattatgatcgatcacatggatagataatacacttaacctttgcatgagaatatatatagagagaggaagggagagagacaagtgagctatatatagtgggactagagtggtagtgggtggtagtactattaaattgtaaagagcctcatgatgtgagaaaggaagaggtggcgatggggctcctccacgcaccaactcatcaatcggataccccttttaggagcaggctgccaccccacgatcccagccggtatgattgcggacccttgaatgggcactatgtgcagcggttgtccccaccccatgtccacttggttgaatcctagtcttccccactctgatacaaacaacgtgttgtaactcaaaggctgcataaacgggtcctccctctcctcttccattccatcattttcattcctactctttctgtaattgtcaaactcttcacctaatttagccttcccttgttggatcattttcaccacctcaacaaccgaagcattagccacaaatttcttggaagcttttatagtcacaggaaagaagcaatttccgtagaacccttctggcaacggaggctgcatgagttgacgacagttggcgaagaacacaagcctaaccatttcctcctcaacatcatcattactattgctatttgttattgttattgctttggttcgacagctccaaaaactggctgcaactatctcgaaggtggagcatttgtgagccccgcctgttgattgttggaaatgttgcttcagcttttcgatctgttccatggaaatgtctacatgggcttccttcagtttgtagtttacgaatggcatgatggtgggcaacggtgatggtggtggtggtgtagaggtggtggtattattagtgagaaagaagtctctgcaccagacggggtcaacggtgaggcggtcaaatcctcgggcgaactctcccacggcgttgagaaactgcgcagcgcctaagccgtcgcatatgatgtgactgaatacgagccccatcacgaatccatcgcatgcgaaccgtgttaccttgtaacaatggtagtattattagactcattaatttccaaaattttatttaacagcattgctattgggtacccgtagtgtctagcacccttaatacgtgtcgctttacgattgactaacaatactctctaaaagctattatattaaactatatgaaactgatacttaattaaaccaatagcgatattaaaacctaagagacgactagtaacttttagtatttctctttatttaaataatattgatgttatatatatacatttgacttacctgtatttgcactagtggttgatcacctaaaagacttccatggatgtggttgggtagaagatgatcgtgtgatgatgagacggcggagtagttagaagcatcaataaggtcatcgaaataattgaaatgttcaagcttggagtcagaagatgcgtccacaaaccagaccccttctccacagcaatcgacttggagacctatgttgggatttgttgagtactccttaaggcgtccagcaagagggtagtagggaacaagtgctcttgaaagtgcttctctaatggcggaggcagcacccttgccaccctttttgtaaacgtggagtgtgcgagcgttgcatcttaggactgggactttgtccatggctgataactccagtgtggtgcatggagtcttttcccgtggttttaccaggctctcacttgatcttactacggacaaactcatgatgatgatgatcaagatttacttttaatatacttaccgattgatgatatattttttcttcttgagcagaagattattatggtgtattatatatatatagaaggaaagtgaatgccaatgccatacatatattattcatggataagctttgcttgaaagtctgaactgtgttttgtttatatatatatatatatatatatatatatatgcgcaaatacattaatatatagaaatgataacttattgctcactataaatggcccccaacgcttatatatattaatatatcaatcttttatatctgcaagtgcaattatatatatatatatatatatatataacttggtgtgcagggatatatatttataaaatatacatatgtagggtgtgatcatgctttgtgaaacagataaatgttgctttcaatttactcccattttctgatagggaaataaatctactacactatacacaatcaggaaactagaaaaaagaaacattttctcattccttagtggtgatctttatatattataaagcttaaaggtagcggttatataatatatagggtagcggttatataatatatagggatatgattttgtcccgtaatgtatttttacggaatgtatttcgtggtaaattagatggatctcagggtacattaaatgagtgtcagggtacgattctactttttaattacccctagatcaatctcnnccgtcagatcaaataacttccttatctgatgctgccgtacatcacggattacantccgtgaaagtacaataacgggacaaaatcatatcctaatatatatatgtaatgtatattataatttactttttttttggagtatttccaagataataaaacgtttatgctagatcatctcatttgttcaaaatagattataccatgtggtcagagtttgaattgaagtatagaaaaaatcaatgcaagaagtgttatagtgagtggaaagtaaaactcagctaaatttagtatgagttccttttcaacaccaagcactattgcaacattgaactttagaggtcattttttcagctgaataataaaaaaaaaggcagctaaagtatgttttactagttttggattccgaaaattttggtaaggcagttattttataaaaatcgtagctataaaataccccaatttctatggcgtttattttttttgttgggctttaatttaaaattactggtagagcatttatgcggtcagttatttattaataactgacgtcataaggtcacacgataaatgacacgtatctcttatagcgtcagttattaccaaataaccaataatataggcatttaaaattatgaaaaccactactacaaaaatagattttctcgacgtttttaaatagtcgtttaaagtattcccgtcggtttctataaccgtc

SEQ ID NO: 36279 - DNA, 9326 bp, Cannabis sativa
  modified_base (160)..(161): a, c, t, g, unknown or other
aacacctgaaggagaatcgggctcagatcttgataatactttgtgacagaaaggaacaagagtcaaagatctaagtggaaggatacatattattccacttcaaacaatgtaaggtgccttaactttgtatgtgtttaaattttattgttttagagaattnntatttagggtgttaatcaacatatatgttagtaaatctagatcctggtaaaataatctccaacaccttcaagaaatggtgttttatttatggcgccaatggagagttgaagtcgtgtttccatgactggaagtttcgatctgtaagaacaggggtctcgagagcaaagcctggatggtctgcattgcttaggtaatatggagatctgacatcttcataggcagggcgatcagttggaagaacgcgaggaacctagagtagaggatcatatcgtgtgggaagatcgacaaaaacctgagatggtgatggatcagtatgtatttgagtgtctgtggaagtgtgagatggtggctgagttatggtggcatcgaccaagagaacagtggtggtagcaaaggcggtggctcttgttctcaccattattgaattcttgaagcttcaattgatttcttagagctttaattgatttgttaaagcttcaccttgtttcatctgacactattaaaactagtataaacgaaaatagagcaatattattaattgatattattgatacaatggatttaggtccttatatacagtaacctaactgtgtaaaaataactaacttcttaacaaatttaatataaggtgtggaagtaggggcgaactcacattgaagcgagggtaaagttgttccttaataaaatatatatgtattttaattaattacaatatatatttataataaaagatgatattaatagataattaattttgatgtatattgtatatatgttagaggttaaagttaaaatcccactaataatcttttttgtttttaagtttagttttgctcacatgtcttaaaaacaaaaaaaggagaattcctagaaagcaccacaatatggctaaccatgtcatttatagcaagtgttggacacgactacccaaataacaatacttaaagaaataaaaattacgccccttagtgtaaatcttggtccgccactgtctgcagcagggtacaagtataagactactacttcactataaagtatcgcctgaatctgataatgattttctaaaaggaagtgaataaaactccattgaaataaaataataatgcatcaagcacgcacaaattagtagaatgggaaggagaaaaaaaacaaaaaaatcccttttataacaaaatttgaacgcattaattagaaggagaacacttaccagaaggagcagatcagtgtgtcattggctggcacatggcatggcagtgatgccacttcgacggagaagttagggtaggtagggttgccttcgaaattatcctccagtaattaattagtgtttatggttagaatataatgttgtcgtttcattttgaagaaagtaaaaattgataacatgaaaggggcattccgagaatcgaacttgggacctctcgcacccaaagcgagaatcataccccataattccagtcgtttcagatcaggctattgctaatagtttttaattttgatctctggggaccacgtctcgtggagttgaatgattcccccttactgatgaagcataacagagataatgtgacaatcattgagccacgctgtttgtttgggaatggaagcaatacagctagcctttggttaattaagagctgtcatttgatacacaaatgggtatggggtcttcttactttctttttttttttctttttaattccaaaaagtcttccttcttcaattatccttttccaaaagaaaatatcatttcaaacataaaaatgcatttgatggatggtccataacctttcagtatttatttacctcccccatttttgttttcaactgcaacatgtgttttctagtttctattactattgtcctgattgactttggacttgagcatggtttattataggccatgctttttgaataagaagagctaagaatgtgaccactgtttgaaaccgttctcgtgcatgtatgtcacgtattttcacttcttgtattgtatatacttgagaattctttttttttttttggtaaaatacttgagatattattagtagtgtagatgtagtagacttgagcagtcattatcagggcccctcaataactcaaaggctagctaactcctcaactaatctcatggtccatgtttgttggttttcccattaatctacaatcaattcagttcagtgaaacgggttttggacaattcaagcaaagaaaaaggttaaatttatactaaccataattaaatacttcaactccttaactaggagatttttttttttcattttcttttttttatttattataacaccaaaattgggtgtgatagatctatctcaatcatttaagtaaaactattttttaaccttttttaactatgcctttatactgttttgacaggtgagagagaggaaaaggaaaaaaaaagaatatatatctaagggacaccgtttggtaagtgcttgaaattgggacaaaatcattgccaattgagaccacctttaattatcttcactactctgctttcggtttccgcaatccctgcaatccatattccaattcagtttcctttatctgttttcttattttttcataccagagagtttcccttgagagttgaatccattgaaaagagagaagaaagaattgagtaaagcatggcatttgcaggaacaacccagaagtgtatggcttgtgacaagactgtttatctagttgacaagctaacagcggataaccgtgtttaccacaaggcctgcttcagatgccaccattgcaaaggcactcttaaggtatttctgctctgatttctctttcactctctctttgaaatgtttttatgttttacttttttttgtagttctgttctaaacaattcgagcccgaccagatgaaaccttggaactttaattagttgtgtgctgtgttaaattcatttagtttcgtcaacacaagacagacctggctgcttcgaatgttgtctctttggagattgacactctgtagatccaaaccaataatcgataaaagggaaagaactgcattcataggattcatttaaccacaattctagagcaagaatgtcatttaccttcatttcttttcagatgttatgttatccacacttatttgcaggattaagattatattattctaagctatctgttgagtgcaacttgtgagaatgtgattgatgtcttagtcttaaaccatctattaagttgggctacaaatatatgttggacttggacccctatgccattagatacatttgatagattatccaaccccaagcaatctctaataaataaagtcatttgcaacttttctgatcaaaagattatcaaacttgcagcttagcaactacaactcctttgagggagtgctctactgcaggccacactttgatcagctctttaaaagaactggcagtcttgacaaaagtttcgaaggtagaatccaacatgatgaattttacgaactctctcttttcttttcttaccctttttctttttcctgaggctaatcttggctgtttttatttcatcattcatctcagggacacctaaaattgtaaaaccagaaagaccacttgatagtgatgtaatgtctctttaaccagtgtatttttctcttatatttttgctttggcaaagaatctgtttcctaattattcatgctctcaatcctgattacaactatcttccaacagaaacctgctgtggccaaagtaacaagtatgtttgctggaactaaagataaatgtgttggctgtaagattactgtctatccaactgaaaaggtaaaacacgtgtgtgtgtgtgtttgtgtgggtgtgtgcatatgcatgcaggcgcatgtgtgtccgtatgcgtacacctttattcattaagtgtgaggcttatacagtgattatgctgaattgaaggttacagtaaatggaacaccttaccacagaagctgcttcaaatgttgccacggagggtgtactatcagtccatcgaactacattgcacacgagggtagactctactgcaaacatcaccatacccaactcatcagggagaagggcaatttgagccagcttgagggtgaccatgccagtaaggatggagttgcggagaaactcaacaccacagaagttgctgcagaaatatgaatgaatgaactacttctagttgtctatgttgctctcgtttcccttgcctcgttatcatttcactgccttcctaaacacatttcgttggattcctatatatagttgacacgtgcattcatttgttgcttttgggtttcgttgtgagatttgtaaatgaacaaatgagataccaaaaaacaaaactctgtagttgttcttatgatctcggttttgttcctcttgagagacctattgggtttgcttgtgagctcttattgtgtccccccatttatgttgaataagtattgaggtatttactttcccccctcttattattcttcctgtgtaagcattgcagaattgaaattagcaattttttctgcagttcaaatgatttccacggccaccgttcattcaaatcatgcaatgcaagtatagctagtattcacgattagagtagagcatgcttgcatgagatgaggtttcctttttcaaacacgcagctttacttctaaagcgggaagtcgtatcggtttcatgtataactgggcatcccaaaaatgaacaaagtattaacaaccatcgtccattcattcgtagcaagacaattaaaatttctttgaataataaatcaatttattataatttcacaacagatatgatacacaaagccacaaagttagtgacatctagctacactactgtttctgtacagaagttaccaaactagataataattcagtgaccagagaactccactgcatcaacaagactaccattctctgaaacatgcttcaaatcgataataaaattgtcccggagaaacccaaacccaaatgttccatccacatattgccaaacccttccttccacatgccgtgggttagctgttgcacctgccaggtgcgggataactagatcaaaactcgagttcacactaagaatgcgagagaccgtgttgctttctcttaatgatgagcattcaagaatgaaatctgtggctggaagtggtcgatggtgtatgcgactatagtaaagactttcttcctcggcagaaaatggagactccacaaacgatgtgcttgatgtccaaaacaccggaccataactggctatgttttcagatgaattccaaacctttcggcaggatatgccaccaattccgtcgtattcaactagatataaacccaagttcaagtcatcgtaaagtccctagaattgaaacagtaaagggtcaaactatccataatgaacttatatgaagcaagaagaaacgagcataccaatcagttagagtaaaaatgtccgaagagatctaatctaattcaaatccacctaagaattcgctgggacaaaatgagaacaaatactgtctttttctaactagttaaaatacgcattagaaaaatgcaaaggaggcaagccaagacacctttttcccaccacaggtcaacccctcagataaataactccacgaaacaaaaataaaacagaaatagactgatgatctatgacaagttcaaggaatcaaactaactataacaaatttatagcatactgaaaagagctaatggatttgagacaccaatcaggagaaactctccagtttaacagctgcacaagagacagtccctaaagattaggtaactccacaattatatatatatatatatacacacacacacacacatctgaagttcacatattttctcacaattaagcacaagaagttttggcacaaattagtaacaaaaactaccaattacatgtgcatacgcattgactaagaaaaaaaaagttaaggagcagtttaacaccttccataggccctgcaaaggtctagaatgagtgtgcgagtaattaacaatcttgacgaaatgctgagcttcccacttccttctagcttgcctttccttctctttcctcctctgtctccttgacgatctgtccctaacagggctcgttcggttcgcaaagtactgataaatctccgacattaaccggtccggcaaactcccgggagacccaaactctggttcaattgaatcaacatctccgaccccaccatcctccaagactaaattggccgagcttgaacttctttgaacaccatttctcctttgcccccgagagttcgaatacccaaaggtcaaatcttcttcaacaacaaaatgggttttgcccatgaaactgagattgaccgggatcaaatccttctccaaatagtcaaagcaccgggagttagagaaatcttcgtataattcgcttcgaccatcgggatcaaggaaaatcacctcttggccctcggacgaaagactcataaataaaaacggtgcctttatcacgttatatgttccgttgttcgacggtgaaaccctagaaccggtaaggcacgacgaaccccattcgaagaatatcaacagtggggatgatatgtcagtggttcccgtgccgcttcggcgccagaaaccaatcagattctcccactcgctgagggttttatagaggagcttgtaagaggtatcacccttaacccatttcgtgatctgggtcttcaaaccccaacgccgatcgcacatggcgaaccagagcttgtcgtcgtttcggcagagcgaaacgaaccttttcgatgtgcacgcgaatgtggcgatctcggacggcataaggaacgacaggacacaaagctgaacatcttcgggaaaatcggtgaacgaaaaggaaaacccgcactcctcaactgtcagatttgagtcctcaaccctcgccattttctcagggaagaagtaatttttcttcagaaagttaaagaagaaggaaattttggataactattttttggtgatgaaaattttgtttttattgtcgaaaagtggtgaaacttgtgttcaaataaaattggtagattcttgtagaaaatggaattattcctgaggcagaggaaatgtgccttcaccttcagtagactcgtggaagctacagtctccagacacaatgacgcgggccaaagtggtaattgaatgagtatgtatgattatctgcgtgcgggtgcaacttgtaaaggaacggtatcttggttttttttttttttttttgaaattactttatatattaatttttttttttttttttacaatttgagttgctccgataatttttatatgaattgcttatatataaatttttgtaaaaataaaaaaaaaaattatttaaataaaaaaataaaaataccccattttttttctctatgaatggggtgttattctttctttttttaataaacaaaataaaaagataaatgtatttttcatttataataaaaaggaaaaagtgcaaacataatcttccaagaaaatgaacataggcacaaagtcattacaacattctgaactttacctaagaaatttcgggagaaagtaagcactcacacatcaaatacgaagggaatttattgtttggtagtgtttcaaaatcagattcgcgaagtaaattacaaaggattacagcaaagatttagatggaatctaaacttatttaagtcaattgtatttgtaattatttgaaactttacaaattaatttcattcttaggcgtggccccgtggactgtgagtgtttgaaagaacacagataccacgtataattcttgtgtaaagttattttaaattttgcatttatttatttttggttttggtttgattctgtaattttgtgttctgtagtgacagaattacaatttgttgttgcagactattacagttgtgtttttactataatttagtaaaattattggcatttgcaaaaacaaattttttctattggtattagagcgggacactaaactcatagtgtggtcatttaacgttttcgtgtgtttttgtgcaatatgttattttttgcaaaaggaagttccatttcttgtccaccgctgctcaatgattctaattatcattattgaaagattaaaatgagggcttttatcaagtcttaagatgaaaaagcatggagaataattctttcaagatagtctcctcctgttgtggtagatttcgaaggtaattcaaaattaaaacctgaacttgaatggtctactaaagatgataagttatctgcttacaatagtaaaacgttacatgctatatttaatggagtaggtgaaaattttattaagcttatatcttcttgtgaatctgctaagcatgcttggcaaatccttcaaaatcagtttgaaggaacttctaatgttaagcgttctaggtttattatgcttcagaccaaatttgatgatcttaggatgtctgaaaatgaaaccatatttgagttttataaaagactgtctgatatagctaatgaatattttgctcttggtgaaaagcttgatgaatttgttcttgtcagaaaaattataaaagttcttccaaacaggtttgacactaaatttttaaccatggaggaagctaaaaattttaacacgatgaaggtagaagaatactgataccatgtataattctcttgtgtcaagttcttttaaattttgtatatatttatttctaattctggtttgattctacaaatctgtattttgcagtgacagaattgcaatttgttgccgcagactattataattatatttttactgtaatttagtaaaattattagtatttacaaaaatatgattcttttaatcttgaaacacaaatttgaaattgatgttgaggaaaaaagaaaaagaagaagaaagctttagataataatagacagaataaaatgatgttgaattttttttattaaattttaaattatttttctcaactaatttattaataattaattggaataaattttaaattaattttttattttatttatccatgtagcgctcacgaggccaagatacatcaacaagtaaataattacatcatcaatttattaggcacatatgatagaattttacaaaattcttattgttgaccgaggttttcggcaactaataaaatattataaagttatagagctgtaagaaaattagagaa

SEQ ID NO: 36280 - DNA, 5281 bp, Cannabis sativa
tctctctctctctgcatttctcgcttctcccttccactttcacaacaacacaatacactctgtcagagactacacttggaagaagaagaagatgattcggatcatccatgtgtagtacggtttgtataatgttggtgtagatcgaggttgaacatggcgaattttctagctcagttccagacaatcaagaattcctgtgatcacctcgtcattgctggtaaaatctcatttccttactcgattctattttcttctttactaaatttagcttttaggttgcaaaattttgagcttgattttgtttcccctgctaccgatcttattgcgattcagattgtgtttagacatacatactagatttgaatggttcctttgcaattctaaggatcatagtttgagctaaaaaatagtttgagacgttaatggctaattgggattatgaatgagagtgctaacaggtattgcgtttcgctttttatgttgttttcagaatttggaatccgggataagttagaaatatcatagaatttacgtgttttgagaatgtgggcctatttaatactgaattatggaaatgcttgaagaataaatttttgtattttctgatcatgtttgtaaaaatagtaacaaagattgggtttcccccttcgatttctcgtagttttaatattgagttattcgggatttcttaatgagtgtactcagtgatttcagttacgtatccctgtttagcgtaattagtttaagaaccatatggcatcattagcatgggtccttttttactttgcgagctatgtgtgaatcatctgaggctgttagttgattatatatctttactgggaagcaggctggggtaattttgtgtatgttgaacttttattgtaagttgatggagagttattaagtacgctcctgcaaatctcacttaactgtgtttgtccctctgaagttttacattctggttttttctgttgcttttggaagatgattgaagaaatgtattggtaatgcagttatcataatggtccttaaaagtcaataatataatttgaataaaacacatgtggtggtgcttttcagttgaagatgtgagtgatttatggcccactgtgaagactggttttgaggagcgttttccattgaaaagagcctgcttgaacaataagacccggaatcctgtgtttgtggagaatttgcctgccgaattcattttaacaacagatgcgagacttcgcagccggtttccgcaggagcaatacttattttggtttcgagaaccatatgcaactgttgtccttgtcacttgtgaggtaacatgcaattttctttacctcacctatgtcttcgactttttacttctcagcatagctctgcaggtgcaggtttatatgattttagatgatttattgtgtctctacctttttgtggttttccagtgatggtagtttgaagcaaagaatttgcttgtgtaggcattgagaatttatatatttataggacagttcgtgtatttgcatctcatatgttttgtggggaaaagggtgcattttattttctattgataaggttacacatataatgatgtttataagcatttttaactagctaaggatgaaattatttatttaaaatcagaactgtgagggggaagggtaggaaaaaaaaattatactgccatattttgttgtgtgtagtctggtgaagaggtagatgtttataggtaattaatggtgctatttgaaagtagtcagatctgaagagaaaggatagtagaattctgtatgcgagtgtcaattttttttattttatattgtgtattgtcatctataagaagaaaaaagaaaaaaaatgtactcttacatcttttttcttttctgctggtggaagacactaaaaggataatatttgatttttttttttttgttttttatgtcgttacttcttcaacgatttcacttaccttttattcttcttagatggtgatttctttttcttcatacactaatgcccgatgttattgtgctaatgcaattgacatattgtagagtgacaacttttttctttattaggaccttgatgagttcaaaaccatcttgaaaccacgcctgaaattaatcgtccaaaatgatgaacgggaatggtttattgtttatgtctctaaggctcatccaagtaatgatcaggctaccaaaatggcaaaaaaagtatatgctagacttgaagttgattttagctcaaagaaaagagaaaggtaaacttgctgctttcagttgttggtacattttcagttgatgtcttcttatatatagttgttatttttaatatattaaagagtagctgtctgtgatgctctctgatacttatttcatactcacttgatatcttttctttagcatacctttatcttaattcttatattgacttaattttgttttactactgtatatatattacgagaatatgaacttctcttgtaaatattgcttagatttctacagtttattttaacattgctttactcaggtgctgcaaatatgatttacattcccctgaagcaaatttttgggaagacttagaatctaagattgtggaatctattagaaataccttggacaagcgtgtacagttttacgaggatgagatacgcaaactcagtgaacaacgactcatgccagtgtggaacttctgcaatttttttattctgaaggttgtttaatcttggcaatatgtaaactataacaatttgataagaaaatgcatagtaaataggaattaagcatattactgaaaatattatttgtgatcctgtttgcatttctggcttgttcttgtgcatagatcttgttcataatattcatgactaggagtttgtaatccacttcttgcatatatgtaggcacaagctccacaaccctttgtttttgtagccatgtactctccgccgtctatgcattattttctttctattctagatacttactgtttttagctacttgttctcaggaaagcttggcttttatatttgagattgctcatcttcatgaagacgctctacgtgaatatgatgaacttgaaatttgctatttagaaacaggtacattttgtatttttctctcacaagataaatgttttagtttctgcacacataagagcattgatgaaaaatgcacttgtactgccagaaggtatcatggtcatctgttttacttcagttgatctagttcgtaaatcttttttttttcttttcaaggaatttgaacaatacatttcattgatatatctgaagcagctcttttattattatagatgctgttaactatcgtgatttagggctgatttatttccatgtattgcagttagtatacctggaaaacaaagggactttggaggagtagaccatggtgatgatcaggcatcactgcttaatcctgggagaaagccactaacacagattgtccaggatgactcatttagggaatttgaatttagacaatatctttttgcttgtcaatcaaaggtatgcaaaactgagatctcctatatctaacctatagtaaataaaaaaacaagtgtggctgaaataatccatctctttactttggtctacttctaaaattttatcgatctttatttataaatatctctcagatataaaatgcagacttggtttctatgctgttatttttgtgtgttgattcaactggcgaaatctgcccctaagcttcctttccacttttgttggagttttcccaaccagtactgtctgtttacgatctatatttaaagtacttccattattataccatggcaccttattaacaaacttcatatagaaaattgatgtacaaagttactgtacctgactgttccaagtgcatgcatagctaggatgtagagcaggataataggagtgtcccagaatttcattctgcagtatttgaaataatcacggatcaacttgactgagaatttaagcttgtttcctcttgtgtatttgataaaattgatctattagtttgaaattcttgctttgcttcacagttggtttcatgtttatttgaaatattctttaaatgtatgctgaaatgatgatttttttgatgcagcttttgttcaagctgggtcgcccctttgaggttgcggcaaggggtttcgcattcattattagtttctcaaaggccctgacccagcatgaggtaatggatttctgattttattattgtgttttcttacgatgctatattactgacgttaagcttcattaagtaatcatttgatttctgtctcaccttttttttccctttctcttcccctttttgacatattcctcttcttggagttgctctcagaatattctacctttttgtatgcgtgaagtatgggtaatatctgcttgcatggatttgatcagctcaactgcctcacattataacgaaggagtagtggcagctgatatagaaaaggagttctacagacttcagggtgacctttattcactatgcagggttaaggtaacagtttcttaagcttcaccaagtgttgaagtaattcatcatatatgattcaattattcaacaatttttctagtgtgtcagttgaagtaattcaaaatcaatcaacttaaagtttagttagattatataacatcacagcacaggttttatcaaatgatctaaatgcagttttgtgttgttctaggtgattgtacaacaaaatttgttgattttcttttgctccatataaagttgtaatttagttcacgatttttgcagttcacgagacttgcatatttgattggattcggaacaaatatagaaagaagccctgtcaacaggtacagatacaaccttttaagatcaaattgacctttaccttctccctactaatttttaattttttttgtttacgtggatctctagaggcaagcatgctcatgaaattgaaattaattattgtcatatttgctttagccttatactttgtgaatacttattctttttatttctgtttgaacagtgcatcacttagtatgctaccttggcccaaaccagcagtatggcctttacttccacctgatgcatcatccaaagtgttggtaaaagaaaaggtcagttgataggatattcttagagaataaaataatctaacaaaatccgaacacagagctatgaaatccctcctagagaaactctttattgatgaagaaattaaagaacaaactagccttcgagatgctagttctccaatcacaacctttcaagagtgccgcactctcttagag

SEQ ID NO: 36281 - DNA, 11555 bp, Cannabis sativa
tactgtaataattattaatatcgaatttagtttggtaaaattcagaaagctttcaaaaactttgattctattaacggtgcctctttggaaattaattggatttgggtgtaaataaaaataattatataatttgacatatttgtttgcatataattaaactgtaactatatgtaatttgagttaattaaagtttctaatcatactcttagctttcttaagaattgggtgtaattactaaaaatttatattttaaatattagctgctaaaaaacatattattctgtgggtacaagacattaaaaattattttaattattaactcatattcaaacgtacttaaattatatggtaattattaccctaataattacactatatagtaattatacaataatttttaaatatgtcctgtttttgagaagaaaacaaaggaaaacattttcctaatattaactttcaaatttactttcttaacatgtgttttttaaaaaagaaaagaaaaaaaaaacatatacatgtataaaaaaaaaattagtaggggtaaaatagatattttttattttaaaaaatcaaacaaattataaactaattacatgtacctgttttattttactggtacaacaaattattttaacttttcagatatatgcatacaaacatgaagtaattgtaattaatcattcttatttaagatgaatcccacatatatgttttatatttgtatgtaatttatgtttgcacatttcattattgtttaacttaactttctttttatttattttttgtgaattaactctgtttgtaaattttagaactaagacagcactttgtctcgtggaaaaaccgaactgcaggtaagaaggacgatgatattggggaatcatcatcattgaacatggaaggtgaagatgaacctaaaaacgacgaggattggatggcgggattcgagactgacgatgaactaatgtcgatttgctccatatgtgaaaatagaaggccaaagattggatggacaaaagagtttagttatgcagaactccatgcagctacaaagggtttttccaaagccaactatatatcagaaggtggatttggtaatgtgtttagaggacaattaaagaatggacttaagattgctgtgaagcaacataaacatgcaagctcacaaggtgagaaagaatttaaggctgaagttcactttctcagcaaggcaagacacaagaatttgattatgttgcttggatcatgttctgaaggacgccataggctgcttgtttatgaatatgtttgcaatggttcattggatcgacaactattaagtaagtaacaatgaatagactacttcatgcattctatctataatgcatctcatattatttccaccaaaaatattttaatctaattttttttatagtgatatttgagatatcttgtacagaaattccataataatttataatatagaaaacaacgtttaaaaactacaacacactaaaacaggtcgtttggactctattttgttaaatttatttaaatttctcaaaattttgcaataagttaagttttcaatattatgaatatgtgactataaatgcacaatatatcaatggtctctctctctctctgtatgtaaattgttttttttttgtttaaattattattaattatgttgtgctatgttatccagaaccggcacgaaaacccctgacttgggatgagagaatgaaaattgctagtggagctgcgaaaggattgttgtaccttcataaaaacaatattgtccacagagatataaggccaaacaacattctacttacacatgatttcaacaccctggtaagttaaagtggtaatgtaatgaaattataaattgtgtaaaaaaaattcatcaccatctctttttgttatacatatatttaatatttaatgtatgatcagctaggagactttgggcttgcgcgaagtcagcaggaagatcactcgtcagagacgagggttgttggaacattgggatatttggcaccagaatatgctgaaagtggaaaagtttcaaccaagacagatgtttatgcttttggggtcattttattgcagctcatcactggacatggcactaatgacaagtcccttgaaggaaaaagtcttgtgggatgggtaagtatactcaaaaattctaagctaaaaaacaaaatcttccatcccattttttttttattaaaaatctaaggaaatatacatttattttattccaggcaagaccactgctaaaagataggaactaccctgatttaattgacgaaaggattttagattcccatgatgttcatcaactcttttggatggttagagtagctgagaaatgtctcatcaaggatcctcacaagagattatcaatggaaacggtaagccatgatatgttaattgatcaacaccttaattcgcttactactaataaatgcttcataatcaggctagctaggctcatcaagctacaatacatcatttgtgcatggttgattatcaatattgtgtgcatagaagtcatcaatacaattgtaaatggataaataataacaaaatgttaagtgcactcccaatggatttcgaaaaatagagtttacttcctctttaatatcttttccctctttcattaattttgtggttttttaaatgtgatgaggacgcatatataacaaaactgtttatatatatatatatatattgtttaatggattcaattactgtttaattcttacatataattgcagatagtaaatgctttaaatcatctaagagagtcagatgtaatatgcaacatcagtatttcacctgcatattcagataattccttgcctggcagtgaagagtctcctgaggcatatgataatagaggtgatgatggtcatgataacagtcatcatatagaagtagaatcttataagtccaggcatagcatggcgtattatgatcatataactggaagtatttcacaatcatcgtggactcaatctacttcatcatctagatcaagtttatccccaatgtctgagcagtccagtttggatggtagactcaagtaaatagcatttatcacatcaccaaaagtatatatttatgctatatggtagaagaatgatgattattagtaatgagatgaatagtacattgtttcatgtaactaaattaattagtcataaaagagttttactcacatgatgagagaaagtgcaggacattataataagttgggccattttccaacaaagtagtctcttttgaattttgtgtaatattaaagttgttatgttttatgctcataaataaatattaaataagaaaaggagtagttctatgatttttatttataatttttccatggaatgggataattttatttacattggatgtgggaaagattttttcttttttgtaaaaatatatttcagtactctttaaaataggcctcctcatgttgctgcttatctctcactacaagacagatgacctttgtcgcactctcaacagtcaacaccaacgtatttcatcatttttataattgacgcaacttatggtcattttgcctacgcaacaaagcgtcggtattaatcttcattgttgtttaggcaagcaaaatgtaaaacttctaaactcatagtcatagtgcgtctaattaatacaacactagagtctagatctacaggtgtgaaaccaaaaacaaaaaatgagtgagggaatttaagtgaaataaaattcaccaataagcagagtcacttcaatcagaaagttcaaggttcaatgttcaaaaaagcatagttattccgcaaccactgaagatcctgcaagcaactaaacacttaaccagttatgcctttgcatatatccatagttttgcctataaaaaagcaactaaaaagagcataaccaatgaacaaaataaccacgtttatcaagtctcgctcaatcctgccgattcaggtattgagtaagtaccacttcaatcaaacaaatcaagaacatgaatgaaagtggtgagagatttatcaaatcagaggtgctcagacaattgacacacagatggcatggcattccacgaataatgaccaaagcccatcatgtcttgacttagcgatgcagtgctagcagccatgtacttgtagtcatttgtcgattcaccacctagaacacttgcaagggtattgtttaccaaggtctggtccacgtacccagtggtctgatcgaaccaatctgacaaaggtaacgagtcagggcgatcgaaatgattgaaattaatttgtcttattggttctatctcttttgctgcgactgaatctgcatcaaatggttctggtttcacagtgttccctagaacaataacaatggcagttgagtcacatgaatagttgttgtactagaaaaatctaaaaacaaaagaactaagcatttcataagcaaaataaaattaataaacaacaataacctttttctaaaccatggagaaggaaaattaccgggaaagctgtttaagggtaatggttcgtccagcgaacttccactggtagtaatgggctcattcaaaagtgaagtagcagaatgacaaaaaggggattccctgtagtcttcccattcagtttcacaaaaatttaaagggttattatcaaccacatcacaaggagttatacttgatgaattcggactcttctcagataaatgtctctttccactgctcaaattcttcgattcgtgaagcaaatcttctagaaggccactattgtgtggtgtagagcactctggctcaaacacattaactgatgggggagattgcataaaactatcaactgagtcaagtaaaggtggcggggcagaagtggcccaggcacctaaatcagtttctgtatattggagtgaagggagctccaacttcacattcccataaatgggattggaagcagaagagttgccatttgaaagggcatggctaccctgtgttacatcataaggtagcaggatcttattaggatcaagatcctcctggaaagttggccatgggttagcatctttgccaggattaacattttcacactggtcaaatagaggatatccattctggacacacccactggaatctgggaaatcatctgatgtttctcgaagacgcttcttgcggttaagtgtcatgtaactataatattgagggtgaactatacctttcataggcatagaattcatagacattgtaggaagttctgaaaaatattgcaagccatcagggtttccatttaagccattgaaaataacaggaggtatatgattcttagcattcatgtgatcactctgccctttatccccacaattaattccagcagtattttgcccttgattttcttgacgtgcttgaagacagaggtcagtaggatacaggggcaagcctgcacgtagacgtctcttaacgcgcgtattccaataattttttatctcattatcggtgcggccaggcaactacaaacagtaaaaagagactgttaatatgtcctgtgctaaatgaaagatattgcttatattactcatagtacataaagacttcaatatacatatattcaaattctcattattttttatcacaattaagatgaaatgcatacccttgaggatcacaattaagatgaaatgcatacccatgaggataggttgaatggtttaggttcagggttcagtaccatgagaatggggatacagatccacacgggacctacctaacaatttgctagagtttcctatctcccaaaaaaagattgaagggtccaatatcaaaaacaagtaacacaacaatgtatcaatacatgcatgaaaccataaagataaatatacttaacagcattgacctaataaatatatgtcatgcctctttctaaatttatagaaatagaaactatgtaaaaggttttaacaatatttgttgttattagttcatggactattacagtactaaacaaactctttattgcactctcatctggaagcatctaaatgcctttagaaaaagaagaacaaaattattagtctgcataactgtttataatttgttttagagaaaaattgactcatattattaagaacttaattgctaagaaagtagaagtttcaagaacttaattgctaaattactgcaaaataataattaagtgaaataccattaatgtttcacttgattattttcattaaccctaaaatagatcaagactcaaggaaatcataattagtaggctatgggtagactgaccgaaattgcatttcaattttaagtactttatgttaaagaattcaatatttttagaatagagatgcagtattagcattattacagaataaaattcaatgataactagatgctgttttctaaagagcagaaattgagcacttaacactaagatctattcaacagcaacggaaaagaaaaagtaattgatgtttatgaacgaccaatggatttcaagtaacttctgtctaatcaagcatgactgaaaatattggtgttgatagtaacataacaatatcaatttttcatcattgtaatcaagcaatattagttctccctcctgttataactttctatattcctaaaaacaaagcttatttaacaggaaaaaaaaaacttacaacacaggcacagttaataaaatgatcattaattatgcaatgttttagaagatattttggaagcacacctttgtgtgaaacaccaaaacaaaaaggcttacaccttaagactgaatttggattgttaagtttagcataggactgaatatacatatatgtataaatatattgtgtgtatacaaaattaaaaagaaaaaacctaacattgattcagaaaaatgaaatgaaaacacttaatgctgttgctactacaatctaaacttttaccttaaaattggatttagctctacgtattatgcagttttatgcacactacataaaagtgatctttttaataaataattttttgatgagagatctttctaacaaaataattgatacttactcgtgcagccatccttgcccacttgttcccaatctgggcatggagattaataatcaagtcctcttcatcattagtaaatgcacctttcttcaaatctggccgcaaatgatttgcccatcgtaatctgcaacttttgccacaccgagaaagccctgagtgcttctgaactgcattccagttaccctccccatgctgttgaacataagtcctcaaaatttcatcttcattggctgtccatggccctttctttaaaacatgtcccccacttgtgctccctccgttattttcatcaattaatgaagaatcactctgatagtgggagatttgcccatcttcactctcatttgttgaccggctcatctctaaatttgatatcaattaaaaatgcctaccaagagctaagaaccaagcaaatggtaggttgaacctgaacatgtggaaaataatatgttaattagtagattatcttatctacatggcactatgacagccaagaaaattttccacaaacaaaatagggtaccctgtgcaaaattttccacatggcactaatagttacttggataattatattaacaagttaattgcttaaaaatatgttgttctgattttcaaaaacaaaacttcaatcttgtaataaacataatgggttaatgatacatgagaaaaaagtgagtggaagcaaccataaaagcagaagccagaaaacaaacaaagaaataaaaattacaagtcattacaaataaacagctcatctttgatgaaatcagagaatgaaacacccttgaattcttagacatgttatataaccaaatagttacctgatgtctagtttcatgatcccaaatgcaaccaacatttctctctacatcttcaaagattctagcctaggaaatagcctttactgctgtaacccatctgtctagctttgcctcctttcaaaagctaaataacttaaaccagacctctttttttactctattatgtttgaagaatcatctttttgttctttctttcttacttttccttttttttaatgtggaatcatctttttcagtcacaaataatgattggcagttgtagatgttgatatcatttttaattaatatacaattttcatctcttgaataaaagtgataccatgttaatatttgctaactgcttgtgcgtgaccatgtttgctagttcctgccgatgtactatgtatttctatgtctgtccatccatacgagcaaaaagactcaaaacagtcagcagtgagagagagccttagatatttaccctatgattacacaaagtttggaagttgaattttggtagggaaagaaaaaagtacggaatgtaggggaaaaaaagtgaaaaataaataaagaaaaattcttatgtttggtatggaaagaaaaattgtattttaaaaaaaaaccccttgattcaaaaaattttccataccaaacatgaaaatttgatttttcttattatccacactttttttcctacatttttctttcctcacaaaaatccaactaccgtaaggaatttttaaaagcaaatccagtaataacaagtagttcaaggcaatgaaaactgggatcattgcaaagtagcacgataaaataccagccatgactaaatcttcgtacacaacttacaattcgatagacaacttgagaagaagaatataaaaaaagcgaaaattataattgaaaaaccagaataaccatacccagacaagaaacgtgaaagtaacatattcaccgtgtgcattaatttttaatttttttccaaatggccataagagaaatggaaagagaaataaataagtcatttattgctgtagtcctctcatttgctatttaaagaccaaactcattcaattccaaacacttaccaaaaataaataaacagatagtacatagaaagaattaaaaacaagttataaataattacctgattcaaatgggtaggatttaacaataaaaatatcgtgatttttctatatctgatgatgaattgacgagctgagctgagctgagcaaatcgcgaagacctaaatgtaaattccaatgatcatcagaagtcaattaaaaaaaacaaattaaatatacatatattttttgagattagaccctcaatatctgtgccgtcaagaactgaacaatgacagagaaaatttcattgatagatccaattgaaaagaaaccctagaaaacgtaattgaaggagaaaagagtgaaaattgtgatatgggtcgagatcggaacctcaatctacgaaagaaaataaggagaatcggaagcttaaggatttcaacgcatctcagcctttaggactgacactgtgattgagattcttcatgagagaaagtgaatcgtattattggaagaaagagaagagatgtggagagagagaaagagatgaaaggtataagattaggagataataatggaaaatcgaatgtgaaaatggcacaatctgaggtattatagcctaaatttaaggatggagagtacacataccttaattctcctccatctcaccatcccttttgctttctcaacttgccttccttagttttctttctcttacttccttctcctatcactttataatattattattaattattttattatatatttttaggatttttctggttttttagtattcactataaaaaaaaaatataaaaaatttaggatttttcaggttttagtaatcacattattaaatatgtacttatggaatcctctatacttatttagggaaacattattaaaaaaatgttgtgcttaaaagcataattgtattctctaattagcatgaactaattataaaaaagtcacaaccacatttgaagtgaagtaacatataaaactaatcaaaaataaaacaaaatgtataaattaaaagtacagtctgtcccagtaaagtaaagttatagtgttggagtttcagttttttttttttttttgttgaactttgagtattttcttttttataaaattagtatttattgtattaagtacaaagagtaatgcatataaattatatgttatttttgttcaaaattttttatattatttggtatataatggtatagatttcattttaatcataaatattttgtttgaacgaatcataaataatttttaagtaaagacttgtacaaaaatatgtgtaatttaaatatactaccatgattattcttaagtacaaatgtgacacatcaatattaagttcgaatacactcctattcattttctttttttctttttctcgcagagtgcatttctatctattcctgatttaaaaaatttattagagaattttttcccttacatttaggataggtatgaaagatttttttttttctcaaatatataggataggtatgagaagatttattttattttatttttaggatcaatattattgctgattaatttatttattaatttttatttatgtttcccaggcttttttattgtttttaagggttttttcatttttgaaaatcaaaataggttggtggatgttcaaataataataataataaatatatatcgtttttcttatgttttttatgttttttttttttaatatttagtattataaagtgattaaaatttattttaatatgactctttataattagttaataattttttgtattttttattaaggtaagttaagtgagagtcgatattaaattaataatagtacttgccacgaaatgctggtccaagaattttgtttaaaaaaaaaaatagaaagaaaaataaacgtaaaagttagatataataaaaattaattttaaaaggaatatataatatcaaagaaatatacaagaaagagaatagtgatataagaatatttataaaattaacgttaaaaaaaaaacactaaattataaataaaaaaacttaaatattaaaattttaggtgggtataaaccaccccagtcctatgcttggttgccactacttgccaccttctcacaagtgagttcaactattgaggcactcaaaaacaaaaaatctatccatgtgcatttggtaagatttttattaaaacaataaatatatcattttatattttgatattaatttagaaaaaataaaaatatgttcgatgactatatttttttattttaaaaatgagaaagaaaaatctattacgtaattatatttttttaatttaagtgaagagagagaaaataaatagaaattcaatgtctaagccagaagtcgagatttgaggtttgagtctagagtcggggtcgaaattgggatctaattgtaagtgcgagtgtgaatctaagtctaagccaagatttagtttactaaacactccctaaatcaaagaaaaattgataaatggtaatacaaaataagactagagaaattggcagctaatatatatactaggtgaatgtacgtgtcgagccacgtattgctaatttcatttaagattttagtctttttaagattttaaatatattttatttttaaagatt

SEQ ID NO: 36282 - DNA, 10541 bp, Cannabis sativa
tacaaaaatttcagaattataacttaggtattattagcgccaaaaaataaacttaagtatttattaacttgagagttttttttttttttttgataaaggattaactgagagttaaacctagataattatgccgtaaattactaaaaaaatcatatttttatttaaataccttaattaagagcatgtcgtactcgtattcaaaatactattaattatttatactaccaatggcaaatatgataatatgaatttagagaagttacattagatgttttaaaatagaaattctttaatatatttaaataactaacttataaacacaatatattagatgttctaaactcttttattttaaaacttttttataatttactatttgtgctctacatttatagagtactattattactctaaatatattttattaattatttagaattttaatctatttttttatataaggatatgtgtaaatgttaatattatatatttaaaatgaataaaatataatataatgtgaaaaaatgtaattttggtgatacattttaaaaaaatgatgtatgatataatattaaagtttgagataaaatagataattaaattttggcaatatattttaaaagataaactagaaaagatgatcttcaattattatttttatttaagaatgccatttgatatctaaatatattgtaggtttttttttttatttttattttttattttatactttaaaataatttttttttacaaaaatttacgtagtaactcacatagcaactaacggagcaatttaaatcgcaatcaaaatctacacagcaatccacataaaaaccactgaagtaacctaaacctaaatttgaaaaaaaaaaataaaaaataatatacaaagtaattctcctatatatcaaaagagaatgtaattattaaaataaacaagtcataaaatgttagtgaacaaaagtaggtggctggtgacactagaccaaagtagcaagaaaagaagggtgtctatttattttgaataaataaataaattttagagaaattttatagtacatcttttaaaaatggtgtattgatatactttttttgtgcttttgataactatatagttctcattttttttaaaaggaaacgttatatataataaaaggattagacctcatggtcattacacataatattttttggaattgacgaaacattaatcaaccacttgaggctagctcaagtggccatagaaaagtgcgtgtgtgttggaggtcttgggttcgagtctcaagttatgcattttgtaatatataaaagcttaaattaaaaaaaaaaaacattaatcatatcagatatgttgttgacatacgcccacttagccatattatcggcaacaagattacattaccgagatatttttagcaaaatggcaacccgataatagtttagtagtatatctataattactaatgtaactatcaatctcccatcatggtgaaagccttctaatcgaattgatgataatctcagagtcgctctccacaatcacaaaattatagcccaaagctactgatgtctcaatagcaagaagacaaactgatgcttcaccaatgaggggatcataaaggaaaactgttgacagctacccacacaaaagcgcccaaatagtcacgagccaccgctgacacacacatggtctccctccctcttcttacatcacaattgatcttgatctagtaatgggaggaagagcccactcaaacactgcatgcgcgacaatcggagggagaacagttgaggcataatctacataacaatgtttaatagaatcaatatagtacaatatgctagctacattattattgtgtaccttgtcgttttgcgtcctccaaattgtatcaataatgatggatgcatagagaaagatctcattaacattaactcctcttgaattaaggttccacaaaaacttaacacaatcccatattcttgcactagagtcactgatgggaataaggccccaaggggacgaacgccataggtggaacactaaattgcagtttaggaataaatattctatagttttctcgtttcctccgcaaataggacaagaagtgtcttcaactgtcatacgttgcccaagaatcttacaaataggaaacacattagacagtatgctccaccacatgatcttgtggcactccaaaattttactattccacaacctgttccatagagaaggagccacatcacactgataagctctatccaagacttggatcaaataagcagatttggaagagaattgaccttttgcttctctagtccaaacccagtaatccttgccccttccagttggtttacccactttccgaatgtttacaatagtttcttgatcgaacaacagggccaatttctgaaggtcccattccttattttccaacaagaggtctgctaccttttggaaccaaagggtggaaccaatcagtttagggtataaatccttcctatggattacccagggatcctcccaaatactagtgttcttaccatcaaccaccattttgcatgcccctttcttgagcacctcctttgccttgataatatttttttagagccatgagttaaaaccaccctcaagcaaattctttcccctaaggtacttagctttcaacactttacacgagagagatgactattgattacaaggttccaactccattttgcaaggaaagctctattcatttcaataatttatagaaaccctaaaccccctttagtcttagggagacatatcttatcccaagccttgagataaagacctttgttgtccttttcatggccctccagaaatccatcaccatgtcatcgatcttaactgccatcttctttgataattttgtggtttgcattgaataaattggcagagagagcccaatagattttattagggtggatctcccagccttcgagagggttttgatcttccatcctaatagattttattagggtggatctcccagccttcgagagggttttgatcttccatccttgaagaaagtgaggttgtcaagaatgaaattgaaaccagcatccttctgtattgatctaaaagagggagtctcaggtatttaatgttaccttctgattccctaattccctatgtatttgtaatagtccttttcatacttttgctggtattattgctaaagaagatggatgttttgagtttgttaacttgttgaccagaccaagcgcagaaattgtctaagcattgccagtacccctttgcttccctgatagtagcccttcctactaaaataaggtcgtccgcaaagaataagtgggaaagacgcgatcctccccgactaagagtaatccctttaatctccttctaactaatggatttctcaagcaatctcaaaagaatctccgctgcccagataaacaagtaaggagaaagaaggtctccctaacggatgccacaagacgacataattctcctcacttggctcctattaaggcaaatgttaagagacgttgtggagatacattgggatacccaattacaaaattgagcaggggctccaaaataacccatcacatggtccaggaactgccaactaagtttatcatacgctttgacaagatcaattttgatagcaaaccaaccttttttaccctttttccttttaaaggagtggataatctcctgaatagcgacgttattatcttaaatgtttctccctagcacaaacgccgattgagtagggcaaatgatctgtggaaggaacggattaatcctgttggcaatgatcttggatataaccttataagttacattgcaaagggagatcagtctgaattgcgtcaccttgttcaggttatggagtttagggatgaacactacatagtagcatttatacctttatgcatagtccccgaccgaaagaaatctaaaattgagtcacaaaagtccccacccactgtatcccaataatgttttaaagaaaagcactgacataccattcgggctaggagctttgttgttattcatggtgaataaagtcttcctaatttcatcgacatctggcataaggagcagactcctctatttctctttagagaagccatctctaatggtcatgttcaaactaggcctctctgtgtcaaaattttcaacaaaaatacctctaaagtagtccaataattctttccctatttgattccagctagtaatccaatttcaatttttgtgcaataaactctcaattgcattttgccttttcctaatagtgatcgagattaaataagaattttgagcatttatccccctcttttagccacgaaactctggccctttgtttccaatataaaacttttcgctacaaggcctggtttagagaatttataatctcagcttcctctttccaatttctaatacctctcgtcatagtttggataaaattcaacttcgattccaaatctctaatcatttcgtcaatcttttcgaattggtgcctattctagttgagcagtgcaactctagtagccccaatcttcttaaaatttttaattggagtccaattatgattaacgaaggaccaagcatgactcactaccaggtttctacgatcatcgcgagtctaagcttcttcagatctaaactggcatttaacattgctttcccgacccttagagtaaatgcataaaggcctatgatcgaaatcgcaagactggaaagagcataacatcgccttagggaaaagggaaatccaactatcatttgtaagacctttatccaaggtcgatttaacatgatttctaccatctcgatgattatcccaagttaagtgatctcctttaatgggtaagttaataagacctcgagagttagttaacatcgagataaccgagataaataggtctctacctttggaaccaaccctctctaactgatagagagcaaagtttacgtccccaataattaaccaaggaccactgaactcgtcctccacattcatgaaatcagtcaagaacttatttttggcatggtaaaacggcaggccatagacacaggaaacaaccaagggtagcactcaatccttgtaatctggttacgagaagtagtaatactttcgaatacaaaaccaactttttaggctaagattaaaccacctgcggtaccaatagcaggaatagaaatattaaaataaaaatgtaatcagtttcgaatatgtaccacaaaattcgcacaaacttttagtgcggttaaaaagatgaagtatggtgagcacacccaaactagagacttaagttctagaactgtagcggtcggtcccaatcctctacagttccaagccacacctttcatggctcttgtggaggagatgagttatcctcctccacaggggtatcatttttgacaacaactcgagagctagcatcatccacattcacaccatcattaaagggcacaaataggtccgtaaagcctactttcgacttccactaagacaaccgaacattaaatccaacagatgaagtacacttatttctagtagcattagcattattggaagcaaatgtaatgatcccttcctttccttgaaacttcccattgcacaacttctcaagagaaggaataaccaactttgtgtttccaaagtgtgtagactttccaacctcgcattcccaagaaaaatctcgaaccacgccagggtgtggttggagagccttctctagtcgtggacaaagagaaagtgcactctctgagaattttctttttctaaatgaggtagttcttttgttgacttttgaagtagtatggatcccaatgtccctttccacatgcggtatatcatttatctcttaggctccaaatgctttaagttcttctaaaacaatttcttgggcttgagaagtttttgttagggcctgagtctcacttaaattaccaccaccctaattcaaaacttgttttgttttgcacattagggacaaacacatgagacagcccaataaggttcacacgcccaacccatttagatccattagggttattaccatcaataacaatcgccacatcttctaaactttgtctcggcattgctcctcttttaagcaaggtaatcacacatcttgctttccaatttgtagagaagtcccagcttgattgttaccaggaaaggtatgttttgcccttgacccttcttaacttgtcttgccaatcttggggacccaaacaacttttgttgtaggtctcttaacagtacgattcctagctagcccattttgaaacttcctcgtggactgtgtacccaagccgttagagatttgactcgagaaaccaccgtccccagtcatcttcgtcagagccgtaagggtcaaggtggttcgttttgagccaatcagtaacatatcctccatcagagatctggggagtccctgcttaccaaagaagcagtcaaagaacttggtggttgggttgagccacatgccaaagagagaaaatggcatgccttgggcatttagaatcgtgtccaatgtagtccaagaacatctactccgctggtgacccaaacgttcacacatgaaatagaaattttcaagtttttcatatttaaattggatccaaattttctccccattttcgagtttgataaaacatcttaagaacagcggcttggccatcgtaatttcaaccagaactctaagctatttcgcccaagatgctagtttagtttcatcaagttgtatagaaataaccctttctacctgagagcccaaagtattggcattggcgatcgagaaaaaatcatgtgggagacggtgtatttgggcccaaaatcaaattgtaccaaacaacgaatcataagagtcaaagctagaggaccaagcttttaaaatcaagttatcacctttgatgcaccatggcccattattaagcacccattgtttatttgcagctttctcgaaaccaaaacggaagagattggggcaagaaaaccccacatggtgaagatcaatcttaactgggaatttctagatctgggtagcaaagtccctaatcattttctcatcacaactttagaagttaacactttactaaaaaggcaaagctttgagagagcttcaatagaaccagcactcgggaccaaatcaagagtggcttcgtttaaggagacacacctaccttggttgaccacaagatgagcattaactgtctccataacagccaattcagattccaacaacccataaaacagaggctttccaacccctcacacacacgagatgacacctcacccacaaaaattgcgagagaacgaaagcagtacacacataccccacacaccagtcaccagacaagcaaagggagcaaaagaagaaaaaaaaaacctttgaaactccaagacaaacccactaaatacacattaagaaaagtcacaaagcataaagaaacacaacataaccacaaagacacactacgacagagatataagaagcaccactaaaaaacacaaacaaatctaatccaaaagagaattattaaaaatgcactattgtcttttacttttcaatatattatattgctattgatataattaattatctatcgagttttatataatttttttaatgttccatgtaatttaatataataaattttatgaaatattggcgggactagacaccaaatgatcggttatgctatatgctcaatccgaaaagaataacaataaagataaaaaaaaatataaaataactgacactagaatagcacttggcagaaaaaaaaaggaggaaagactttagaagaatagcatcccaattgtcaggcctttggcatttcgatcttagggtttgtctcttttcaatccccaattccttccatggagatcgtaagaaggccatcgcatgctggttcttggtacaccgataatcgtaagtctctctttctttcttgagatttttccatcatctatcaatttgattgtatttctatggaaaatccaaaagaatatatgattacctgagtgactgaactaaaaaacaagtttatgaactgtgttatgatgtgtagattacagtttaaaatgcctataaagttgaaatttttaatggaaggcaaccagaacgaggaagaagagtttactggacccattttcttttcttttctttttttttttctttttaaattgattttcctttcttgtcttattaccagctacacccaatacttgatacaatcaccagtatcaagtttaatctgaacaagtagtgtttttttatatatttttgcataatacatttaccaacactgaacacttggttgtaaggccattttactattttgactataattgggcgtggctagtggttccttcccaactccaccatccctttatgcaaatttggattttgagtattccagactttatgtgcatttaaacctttggtactgcgaaaggtcgaacataattttttacttttccattttgacagctactaagttagcggaagaacttgaaggttggctgagagaatctggcctaactaaatctcctgaagtacggggtgttattgctccgtaagttattctcgcaatgtgattctgttttttcttttatataagagtcacagggagtttagtgcttattgtttttgggatggtgaggtcttaggcatgctggctattcctattctggtcgtgctgctgcctatgcatttggaaatattgatccgacgagcatgtgagttattctattatttgttattctttctcttcaaattggtaaagattaatcttagttttagaaactaatttgtgataaacaaataattcagtactcgggtgttccttcttggtccgtctcatcactattacaccccaaaatgtgctctttcaatggcttcagtttacaagacgccaattggggacctacctattgatttggaaggtattcttattcttctcttttttgtatttgaaaatttagaaaagacacggccagggtttggcagtgtggttagtcttttttgttacctatacttatagtttcatcatgcatatctgttctcttatatttgtatcgcttgatgttctcaatcctcaaatgcatcgataactatgaatacatgaattgagttgcgtcatatttttcatttgtggaacctgatcagcttcaaaatagatttgttttgtgctcattttcttcattatggtgttttcatcgaactggggtttctttttcttgctatcagttattaaggagctaaaggctactgggaaatttgaacaaatgactattcgtgttgatgaggctgaacatagcatggaaatgcatttgccatatcttgccaaagtttttgaggggtacttttcccatatggtaaagttctatgttccaaaatatttataccgcgactgacttggtattattgcaggcaccctgtcaaagtagtaccaattttagttggtgctgttaatgcagaaaatgaagccatgtatggacagttgctttcaaaatatgtggatgatccccaaaatttcttctctgtatcttcagatttttgtcactggggttctcggtaagtactcttctgaaatgtgttggtactataatttatttaaatatactcttaagatgactgtttctgtcgtactatatacatactgacctgtacaaatcatcatatagctcatagctgttttcccccttcatgaactgcaaaaacttgtattttcagtttgatttgcttattaccagtaccattcactgagctttgtttagttgagattgaaacacacaccttagaattatgtgtgcataaagcatgatatcattactttagtgacttcaaattttatggccagtgttactgttgaaggataatcgtcaaactctgctaaattttcttgttggatttttttctatgcatgtatgcacatgatttttgtatgaagaacataatgaaccattggcgtctgatcgatatcatcgacaattcaatcttgtttacattgatttgtttaatttattccagatttagttacacacactatgacaagaaacatgggccaatatacaaatctattgaggctttggacaagatgggaatggatataattgaaacaggagatccagatgcatttaaaaattatctgatggagtatgacaataccatctgtggacgacatccgattagtgtttttcttcatgtaagtttgtttcaagtcatctcctatcactttagttcttttttaatctgacaattaccatctatactatagctacttaattttaccataatcatatttcaaatcttcagatgctgagaggttgctctacaaagataaagataaattttctccgatatgagcagtcgagtaagtgcaagagtatgagagacagcagcgtaagttatgcatcagcagctgcaaaggtagttccttgaagaagatttgacaattcttcactgtgggaattggaaggctcttcaacttcaatatttcaatttaactattgacgtttaatttcaaa

SEQ ID NO: 36283 - DNA, 6802 bp, Cannabis sativa
  modified_base (2907)..(2909): a, c, t, g, unknown or other
  modified_base (6726)..(6735): a, c, t, g, unknown or other
aactcaaagctaggtccatagctttgaagaccaaggacgtaggtggcttaattctatcgaaccttgtaaaaattgagagtttgcaatttccatcgctaaactctttacatttatagtttgttatttgtttatacatgtgattatctttgttattgcattaaacttgaatatttgtatgaattgtctttggaatttttaaatttatgaaattatcttaaatttctaattcactcccctcttggaaacatatcttgggctaacagttggtatcagagcaaaggctcttatttttggatagatttcacaatctaagagtatgtattttccaatcaattcatacaataacatgtctacaaccatgttatgatacatttataaatcatttaacatgtttatattctatttaattaactaaatacaatttacacgtattaaactataataaatataagagtttatatttaaataggttattgctgtgtaatttttaaattaaacatattaattcaaaaaataatttatttaataaatctcttagccatgtcaactcaaaaataactcaaattcatctaaatccaaacgtatttattttagggatttttacacacatactaaaatttttaacttttttattgtgggacgaatttttttttcaaaaatactgtattttttttcaaaatacagtgtaagttttatattgtgtattatattaaattttcacggttgttccacggttattttttagttattctgcctgttgttttaattgtttgtttagttgttttatagaaagacaatatttttgtaaaaaaaatttgtgtgacagtaaaattataaactttttttttcaaaatctaatatttttgtaaaaatccctttattttaggagagtcttgttatcatgtctcacccattttgaagagcaatttttttttttaggctaagataagaaggtaaaaaattaaaaatacgatttttttttttgttttgaaatgaagctaaaaatacttattcattaagaaaaccattataattctttttaaaagaaaaaaaccattataattgtttcccgagttaggtcccgtattttctacgcgcgcctttcttcaatatatatctttcggcctgagactgttagagaatttgaaacccaaaacccagaaaccaacaatgggttcccctcctcatctgaagctcattttaatgtctgccttaattcttctgctcttcccttcgtcttcatcattctctgaaccaaccaccaccgaccgttctttaggtactttctttctttttaacattactttagttaaatcttcatcgtatttgctcaacttccgtagctctagggttttcattttgatttcgaaatgaatcattggcgtcttcccttttctcgtatgaattatttgtttctggctgtgtaaatgtataaccgagtaactaagcttttaatagagtttcgaatttagaggcgtggtgttatttggtttgtttggaagaatgggaccaaatttatgggaaatctttttcttttcattctgtaatcaaatttttaaacatggtacacgttagaattatgttttgaatttctttggtttcttattacctgttgttgttgatttagagtctggaatttattcaattcgaactcgaagggagattgcatgaaactgtatttttcatgctttgtatgtcatgcatattttaatatttaatttagtttacagttttagatcttatatatttatgtgtctctttgacattatgagattctatattagactgttttagctagtttaagatgggatatggggatttttcgccacagcctttactaatcttgcagggttattcttcagttgtgattaggaacagtgagattttttaaaatgaggctcttaaatgacaaagtaaagtagtaccagttactaacaggttatttggcaattcatgcgttactaccaaaatatgataggaaatctggaatagatgatgtggtattgatttccatgatcaaccgtgtcttgttgtattatatcaaagtatttttgtgctgcaaagtgcaatgctgaccctaccaaattagcattggagatcataatatgtgcgtgttttggattttggtgctgtttccagaagtcgactaaacatactcatgtttctaacaattatatagagatgcacaaaaagtattcctgctcttacaaaaaaaaatgttctcaactaatgactctcttgatttgctttgaattttcttgcagttgttgcgccatcctctgtccttcaattatctcgtgggttaccggtgcaaaatactcctggaaagcctggaaaaactgtggtttgtgaaagaattcatattcgtggattgtcaagggttaaacatttaaagaagtttgcacactctgtgacagttaaggtatcagtacgaaattcaactgtccatgcccctaatgcagaggtttgtttccacaggtgagtcactatattttggctttctcaatttgatagctgaatgacttaggttactgaaatcaagatggttttgagggtttgcatagttaataagtggtgtacaatttttttttgcaatgtaatggttttttttttccggatagatgttgacctttctttcctgtccaaaattaaaggctgtttagtttatgtgctatatttttggttttgtgaagtatgttcgcaattcctaagcactctgaaaattcattaattcttttgctacatgtttttaaacttaaaatatagaaattttaagcgcagtaggaagcagaattttttttttatacaataaagtgcttgtatatcttaggtggcatttggttggaggtaataaaatagaattgaatggaaagtaaacgattttttattccattcttttgtttggtnnnattttaaagtattggaatgtcattggaatgactttttcatcattttggtggaataactaatccattttataaaggaagcaatgaccattctaatgcaagatgagaaaaatttcaataacttttttatcaattttttgatgcattttaaatttgattccattccatttctattactattcttatgttttcattccttcctatcaaataccaccttaattcttagctgagaaagtacaatttttcccttctacttcacatcaacacacttaatcaaaagataaagattgcgcagcatgtgatgtggatgcattatgagattttgttgatctgctgcaggaatatatctctggcaataggaatgtgccctgaaggccactgggagaaagtttctaagggttcctgggcccgacccatgtcaccatttgaccataaacttctagatatacggacagctagctcatccctggaaagttttgaggtgtccattgaagaaggtaattcttttcagcttattgtttgcataaattactctcgatttaaatctttatatgaataattggttcacctactccatctttttgttttgcagagttttatctccatcgtataatatttctggtatttggaatattaatgatgagtgtggcttcctttctgagcacgtcattagtattttactatggcagcgcaatggcagttggagtcattcttgtaatattggtgtttcttttccaggtaatgtaactgcgttcctctaatattgcttattagacattgagcagtagagagctatgtttctagaatttgttgttcttaaagtatgcaaaaataaataaataaataaacggactggacttcaatttatggttcgctcttctttagagatcattatgttatatttactattattgcaaatttcgtcggcaatcattatatttgctatataagattagatatctgtgtagttgataatgtgatacttatgaattattaatctgtcctgggataaattttccagaatttgttttaatgcaaatctcatggaggaaaaggtctcctcctaaccgctgttaaattcttatagtagacagcacagtatgtactatgagtttgctgttgtatttcattatttgattttataatgtgaccatcagtttagtttaggctgatacgtcaatatttttactttgacattagtattgaattctggaaaatttatttggcataattgtttccttctgcaactattgtgacacaatgttttctggcattggcagggcatgaagctagttccgtttggtggaaagaaatttgcaatattttttccctcatctattgtgagtatctgtctttagatcaatttatttgtacagtatttacatgagttcgattaaactgaatcttactggtttgtgttatatcaggctggtcttgcatattttctcaagctctttgtacctggagctttgcgctcagctctggagctgattgggatcgatcaagaaatgtatgatcctgtatgtgagttttcttgattctggtaattaccttttctgctatgaaataaacaatatatttatttgtttgtgtttcagatagggggcaaaactacatacttaaaaaaaataaattattttttgtatttcagaaattcttttgcaatttttttattgtattagagaagctactacagtccagagcttatttaagtttttgattattgattgattgcttatggcagctggtaaaatttctcctggcttttgttattcttgctggagcatggatgggcttttgggtggttcgcaaacttgtcctaacagaagatggatctgttgatatgagtacagcaatattggtcgcatggtccatccgaatcttagctgctcttatgatccttcaggtttttatcactaatcataaattttatcagatgtttttcacattaccatatttttcctggattatttatttgttacaagtgacccattaaattgatcaagtatacgctatccacagagttctgcagatcccttactagcaacagtagctctagtatctggaatagtggtctcttccatgttaaggagaatttttcgatggcgattcattcgtcgtgtttgccggtaagtgttcgtttccttaactcaattatggttccttattgaaattcacttcattacattcattaagatatacactataacaatttaagtatcatttgttactatgttatgcttctttttgtttgtttaactaatgacatccgaaatgctgttgcagaaaattactgaaagcagctaaaaagagccacagtatttcacccgtgcctgattacacagaatctgaagattctctcgatgactacacgtacacaattcataacaatgatgattcaaacttacttaggcgttcatccagaaagtttgcgatggcatcatcaatcagtcctggccaaggtttggttctctctctttcatataattttctgataacgaaaggaaccacttaaatgccaccctaataagtactagatactaatatatatgtgttttcttcttcagggtttggcaggagaactcccagtaagctattggatacagaggtgtacccttctagcttccataatacaaatgagaggaaacaattctcgaagcaggggtgggaagagttcaccaaagactacacaaaagcagctttggaagaacttgtttcttcacccggtttcggtaattgggttcaccaaaatgcagatagaatcactgtaacacccaacagtggaaaatctgaagagaagcaacgcaggtcttactggttttaggcaataggcactaggcagtggctgttttcagatacttttttcggtcagaaatggcgcatgtgagatgaggagcacaagtaattaagaagagtttgaatggtggatttcagttaggatggagaagaagtagtagctgcattttgtaattacatcatgatcttgatggtatgcattgcatatgattaagaatgatggccatttagtccttttcccccaatttggcccattttgagcattaggaacttacggtgtaacttatgttcagtagcttaggctgatctttagacttggtcccagaattctttttctctagtgttttgtttaactaacccacttaagtagccttttccaattattgtaatcttcatctaatatattatttgtatcgaaactataattttttttaaaaaatcgtgatgttgtatttatcatataatctagtgcggatgtatgcaaagtaaaggaaattcaaatagctctttgggagactgaatagtggtgtaaatttgtgtgccgtgttaaatcgtcttgtgtcgtaccataacaaaatataggacgtgttatactatgctcatatttttaaagggtccgtagatttagtattttggtgtcgtgttttgctcctattttttatgttttgctcgtatttcttaaacagactaattagttttcatatcgaatttatgttttattttttcatatatatatattttataattgttaaattatacatatattttatagatttatttatatttatataactttttaatagatttaattatatttatattaataattatatataaaaattattaataatattaaaatttgaatatttataattttttatcactataactttattgatatataattttagttttacatgttttaatagtttaaattatgaaactataatattcaatattatatttaaattttattattatttttataatcaataaatacatatctattattattattattatnnnnnnnnnnattattattattattattaaactttgtttttcaggcttgtctggtggtgcgttttttgagctattcg

SEQ ID NO: 36284 - DNA, 5848 bp, Cannabis sativa
  modified_base (5806)..(5811): a, c, t, g, unknown or other
attaataaatgtctcttttatgaaaaaattaacaaaaatggccaaatataattataaattattactaataataaaaattattataaaaatacatttactacatattaattttttttaaaatatatataataattaaattaaattatatcatttttttagtattgcatattaatatattgtaacaaaaagaaataaatatattagatcattagaaatataaaataatatttgatatatcgtatcactgaaaattaatttaccgtagtaataaaattatataccacaaagaaaatataacaatatatattaaattaatactcaatataaatatcatgctaataaaattatatataccactattaaaatatgtatacataccaaaaaacttatgtataattattatatattataaaatagaaactaaatatcatcttaaataaatgatatactatacacaacgaaaactacataccatataaaaaaatatatacctacaataaaaaaaaaaaaaataaaatgatataacattattaaaaaattgtatataccatattaagaaaattatgtacaaccataaaataattataccatacttacaaaattaatatcatatttatatataataaaataaaaactaaacatgaatgatctaaaataaaataatatactatacaataaacttatataccatataacaaaaaatataaaccttacaatagaaatatgtataataacaacaaataaaaataaaaatataacatgaggcaagttttcttccgctttttctctctaggctttcagctctcgagctgcaataatggcgaagactagattgaaagagatgtggaagcatcaatttggaactaagaaagtaaagaagaaggggccagactcatctatggatgctcggaaaactaaatttatggatgaagtgcttggaattgagccaattatcttctcagatgacagagagggactgtgtcaggaacagctgagatccagctatgatccaatgctccttgatgtgtttcaacctcctttgtctccaagatcaactttgagaatgataacacaacaggataatgctcgaaaagactttgagcaatttttagctgctaacagcgaatgtaacagtgacttagctcaaggtaagattttgactccacctattctgcgatctggatctgtaattagaagcttagaaacttcctttaattgtattgaaaagcctgctaaggttaagataaccatggaagatattgaggaagaagtggaattttggagaccctcaattgtgtgttatgtgcttggttctaacccgccattacacattgttgaaggttttgctaacacaatatggaatggaaaattgatagggttaagcttctatcatatggcatattcatcattcgatttcaaaatagtgaatatcatgatgaggttcttaatggtatatcttttttaataagaggccagtaatcatgaaaccttgggatccaaacacaaattttaaaaacaagacattcgcactgtcctaatttgggtgcacttggaggatttggagcttaagtattggggacaaagatctctatttaagatcataggacaagttggcaaaccaatcatggtggatgaagtaacaaaggatcgtgataggctcaactatcctagggtgctaaatgaggttactatgaaccaggccttgccagacataattgaatttgaagatgaagtaggggcaaacacacaagtgggagtccattatgaatggaaaccaatcacttgtaatcactgctttggcttaggccattctacagatgattgtaggaaaaagggtgaacccaagaaagaatgggcggttaaggaagataaaaggaaaaatgcaaaggcaaaggcacaacaaaaaccagataaagaaggctttcaatgagtatccaaaggctggaaaacaaaggacacaattattagggatgtgacacagataaaaaataatttccaagcattggaggagaatgatgaacaaagacagtttaatggagatcatgcagagtgtagtacacagcaagaaaatgccaagacaggagaggggggaggtccctctcttgccaatggataaaattctatgctggaatgtctgaggagctaacaaccagcataaattgagtcaaattaagcaatttattttagctcagaatgttgattttgttggtcccttgagacaagagtcaaggcttagaaacttggagccttgtactcaaatgtattcactggttggtgtttctcaactaatttgccctgtcataatggtggaagaatagctctggcttggaattctctaatattccaagtaaacattatttgttaggactgtgggtggacactttactagctttatcaccatggtctatgcatttaatgatagacaaggtaagaagatactatagaatgaattacaggggtataaaacaaaagacaagtggctcatcatgggggattttaatgacattttggctaaggaggaaagaattgggcatagggttaaatatcatgtagacagggacttcattaactgcattgatgattgtaacctggaagatgttaaatattctggatattatttcacttggagtaacagacaacatggagaggatcatatattctccaaaattgatagagtgttgggtaaccaatcttggttggaatcatatccttttgctgaagtagttttcttaaatgaaggcacctttgatcactctccatccttactatctatgcatccagatgtccaatctagaaagaagccattcagatacttttgaatgtggaaatcccacaaggattatgataaaagaataaaagaagtttggaattaccaatacactggcactaacatgttccaactggtaagtaggctcaaagatctcaaaagggtgctcaaaggaataaacagggaagggtatttaggttttcttgcagatacaattcgagccaaggaagctttagaagaatgtcaaaatgaaataagacatgatcctttaaatgtagaattgcacacggaagaacatgatgcaaggaaattgctgttgcagaaacaaggggactactagtccatgctccaatagaaggccaaggttgattggattaaacaaggagatggcaattctgcaatttttcatgctagcattaaagggagaagaagacagaacagaatactgacaattgaacaggctgatggcacaagagttaatgacccaagtaagataactgatgcctttcttgcttattacattgagctattggggtctaaaatgcagaatagaagataagacatgaaaactgtcacgacctaacttcacaacaagctgatgccttattagcaaagtttatacaaaggatgaggtgaagcaagcagtgtttgatatcccaggtattaaagcaccagaagttgatgggtactccagctatttctttctggacaactgggatatggtggaaaatgtattgtgtgtgaagcagtgatttcatttctagaaacagggaaaattttgaaagagataaactccacaatgataactcggtccctaaggtgaaatgccctaatactgtgaaggacttcaggcctattgcatgctgcaatgtgatctacaaggtagcaacaaagctcatctgctcaagacttaagcatatccttcctagtttggttgcatagaattaaggggggttggctaaaggcagatacattggccataatattataatctgtcaagatttgattaagcattatgggagaaaaactaataaagctacttgtatgatcgaattagatatttagaaaacttatgatacaattaaatgggagttcattgaggaaatcttaattgcatttaagtttcctactcagttgattcagcttgtgatgaactgtgttagaactcccaaattctccttaatgtttaatggtacaatgcatggattatttgcttcaaagaggggattgagacaaggggatcccatgtccccattactatttgttttgggaaggaatagagtacttgacaagaattatgaagaaggtgggtaggaaatatgatttcttttaccatggcaggtgtgaacagctgcaactaaccatctcagctttactgatgatgtgttattgttttgtaatggtgattacaagagtgtgatatacctacttcaaggcctgaagctattttctcacacttcagggttttttcctaatgcttctaagtctgcaatatattgcagtaacatgccaaagcaagatttatcttgagttctagcagcacctgcttcactcagcaggagcttccatttacatacttagaggtgccaatctgtgcaaagaggatctcgagtaaagagtgtgaaatattagaagaaaagattactgcaaggattagaacttagagtactaggcctttataattagctggcagagttattttgatcaactctgttttattaactattcaagtctattggagtcaagttatgcttcttcccaagagagtaattaaagacattaaagcaattttcagggccaacacttattccaagatgtaggtgccattgcttgggacattgtatgccaaataaaaatagcagggggaattggattcaacagagtcaaagaatggaagaaacctaaatgattaaatatttgtgggcaattacaaaaaaagaagaaaacatgtgggtcaagtggaatcatagtgtctacatcagagaggagaactggtggagcttccctatcccatgccatgggagctggtactggaggaaatgagtagctctgaaaaacctgcaggtttgctctttcattgatactcatcaatttttggcagagagataccaaatttctacaggttacaatctcctttgctctgctcaagacaaaaaaaggtggtgtgagcaggtatggggaaggttcaatactcctaagcatagctttattcagtggattgttgtgcatgaaagattgagaactaaggaaagattatatagatatggcattgtcagagaccctcaatgtgtactgtgcagcaatcatgaggaaacaaataatcatttgttttttggctgtagcaggtctatggtatgttttactaaaattatagcatggatgcaatggagagccactgatacaacattgcctcgaataattgggtggatacaaagagtcaaagcaagcaaattcaagaaaaatgtaatggctactagtcttgctagcctcgtatataatctctggaaaaccaggaattaatgatgtaatatggcaaggaaaatagcaaaacatggctcggttagtcaatagaattaagaagaatgtgaagtagaggattgaattagtgtggcctaggaaaattagtcaaaaagatgaggaatggtttaagtctttgtaaatcttgtatagaaaagagttaggccataactaatttgttatggtgcttatagtttgtacaattcatagataatttgcaataaaatttcttgattcatcaaaaaaatatatatatatataacatgttaataaaattatatatcacttcaacaaaaatacaatagaaaatagaacttaaatattattttaataaaaataatatatcgtataacaaaaaatacatataccattcaccaaaataaatatactaacaataatagtaatgataataatatattgctaatagatattatactaactaaattatatacaacaattaaaatattatatattatagcaacaaaattatatactatcattgtatataataaaatagaaacnnnnnnaatattatttaaaataaataataaatcatacaattaa

SEQ ID NO: 36285 - DNA, 6639 bp, Cannabis sativa
tacttagttggaccaatatcaatattgatatataaaaaggtactaggtaccattggtgcccaattaccatttctccaaataaaatcacacttattaattacaatatatttcttattcaattttgtataaagaacttctcttcatgtaatgataactaacaattaaactaaattaaattaattaataaagtaccatatatatatatatatggtcgagtattccattataaacaaaacgtgggcccactggagccttccacagtttcgattacgacctcacattataattgcctcttatataaacactcctcaacccccatctctattaatttcatagcagtactgtaatactcacactctcctctctctcatccccaagaagaaaaaccatatattcattctaacgataagtaaataattaatatggtttcttttttcgaccacaccgaccgagcccgagccaccttgttaacatgcctagccgcagccttcagaaccgcaatcgcttgctccatagtggcttgtacaactctgtacggcccagaatccttccgcagcgtggtacgcttcccagcattctcttacgtgacggtgatccttgtcgtgacagacgccactctgggtgacacgttgcgcggctgctggctaggtctccatgccacggtccagagccttgggccggccatgctcagcctctggctgataggtccatctcgtttctcagaaagcgtgactgccctggccgttgcgcttggagctttcgttgtggccctgcctgaatcgactcatctgatctcgaagcgaatagcgctgggccagattgtgattgtgtacgttgttgggtttattaatggtgagctagacgaggctgttatgcaccccctccgcgtggcggctagcactggagttggcctctccgcttgtgtcttggctttgctgcttccttttcctagactagctttcaaggaggtacgtttatatattgattaatttgatattttttctttccaatctgaattatatgaaaaattattaaagtttagatgaacactatagttatgcacgttcatccatgtacattaactagaaactttttcctcgtgatttatggggctatatatctgaatattccttgagaatatatatatatatagatttataataagaggtagtataactgttgaaatatataatcactcacgagatgcacaacgctcattaattatagatatggttaaaataaaaattagacgtcatgtattaaaaagataaacgtttattttcaaaaatatatatatatatacgttatgttattaattagcagatttaattaattatatattgcatgtttttaaaaaaaaaaactataactgatatcaattgaaaaatgcaaattatttggattttttagatcaattgaattttcttatatatatgttcatcagttcggattaccaaccagtcaatagtactgcatcaattagtggaaatatcaagtttccctttcattttttgtccaatggtatagatacatatatgtagtattttgacaaaaaacgttttgcttgtgccttagatagggaaaatattgcatcacaaatatgtttatgtaaatatttatataggaagaaaacaaaataataattgcgtcacgagaaagggagtcaaatctagtgaagtgattgtccgagtctgtagtcactgtatacagccaatagggccgactcataggccatatagtaaatataactagtggtgtacggaaatttcagatgttgacattaattatatttaattaaagccaaagtatgttcacatatacatagtcatacttaatttatatttgtacatgtatattcaagctgctaattttccttgcatgcatgtttcttcaggtgaaacacaattgccatctctacggagagaatgcttcaaagagactaaacaacttcgtgaaggcctataccgcagaggataagacaacggcacttgaatctatatctcaagcaaaaacattggctgctaccggcaccaaacttattcaaaacataaaaagattccaagtaagaatattatttatttatttattagatcacacgttaatataatatatatatttcttatagcaattactccacttatatagcaccaattaattttgtattaattttaccttccattgataatcttactattaaaatgtttctacaggaaagcatgcgatgggagagacctccactgagatgtttgaaaccaagcagcatcttaatgaacccaggagacaaaatgcaagatttggaagtaccattaagagggttagaaatggctttaaaaaccacaacttcatttcctgttaaaaatctaacgggagagctcagagatggtctagttgtaatggagaacaacatgaaccttggtactgtgggaagcttacacttgaacgaatcctttacagtccctgaatctgttgaagaagataaaaacttccttcaaacattgcctaaggatcttccaccaacccatcaagaattaccctcatttttcttcctcttttgcatgaaactccttcacataaaaaagctagccacaaaaacaataaaacccagtaccccagggcagaaggcttcaaccgatagagatgacgatagtatttgggcttatatttttccaaaactgagcagcaaccaaaggctcatgtacgcattcaaatgctcgttttcattgggccttgcagtgttctttgggcttttttacagcagagccaatggtttctgggccggactcccagttgccataagcctatccgctggcagagagcccactttcagagttgccaaccttaaagcccaagggactgttttgggaaccatttatggagttttggtttggtttctattctccaacattttaccattaagacttttttcacttctcccttggttcattttcactggctttctccaacgtagtcggatgtacggacaagccgggggtatttcagccatcattggtgccatcttggttttgggccgagaaggttttgggcctccaagccaattcgctatagcaagaattgtcgaaacctttattgggttatcttgttccatcttggtggacttactcttccaacccactagagcttccacacttacaaaagtccacctctcaaaaagtctcgacacgttgaacgagtgtattgggtctttgagtacaagcaccaaagccctattggaagagaaccgaaagaagctgaagatgaacattagggagcttgagaatttcattagtgaagctgagctggagcccaatttctggttcgtgccatttcctagtggctcctacggaaaacttaccaactctttgtccaaaatggtcgatttgcttgactttagtgctcatgcattggggtttcttcaccaatattattactccaatgatcatgataacgaaatcatgatcaaaattgacggtgatgtcgaccttttcaagaaactggtttgttcttccgtaacatgttttcaagaggttagtttgataaaatcattgcctattctcgaagaggagtttgagaagaacaaaatgccacatgatgtggagatgggaaaatactcaaataatgataactttagcaacactcaattgaatgaagaagaggtggacatgattttgggttcttacctccaacattcaagagaagttatagagaagattaataatgatgataataataataataaacaacaagtagtagtggctaataatgatcatgatggggagaaaatgatcaaaagccaaatggtgactctgagtttgagtgctcttgggttttgcataagtcgttttatgaaagaaactaaggagattgaagttgaaatgaaggaagtcgttcagtgggaaaacccttctagccgtgttgatctgtataatatttcctgtatgatacgtgctttgaagaaataaaataaaaagcattgtaaacattataattgttaagtacatgcaatattttttgcattttccatcttcacaaaaataagtaaaataaaaatacaagcttttctttttaaaaaaaaatatatatctatgtctatatctattttctatataaaatgtgatatctaacagaatttttagtttaatgttattttttttttttgaatttttaagttaatattctttattaattttatgatattattatatatatttaaaaataaaaattatataaatattttttataaagaaatttaaatttaaattgaaaataattaaaatattatagatatttttaatcatatttttaaatttattggtttatataaagaaattgaaatttaaaatattataaatattttcaaccatatttttaattttattattttttttatatattttatattgaaatggttgtaataagaaattaattgttttccgttttagttatggtaaaccgattcacacactatatttttcgttaagtttgagaataaaaaatctttatatcaaatttacgaatccaacctatatatatagacacactcaaatttggttatatgagtattgattaagaatataataaattacaatatatgaattatcaaatgctttacctaattaaaaataaataaatttaaaaattacgtatatataatcacattcaaatgaaacaccaatattgcaatagttaaaaaaaaaattcttaaaaatcaaaatctcaaactttattttaaaaattaaaaaaaatacattacttaattaaaaaaaattaaacatacatatattgcacttaacatcacctaattaaacataattaaaaagaaaactaattatacgtgtattgcacgtaacatcaacctagtattattacaagtgtggataagcaactcctcaaccactttatttttgtcattttttaattcttaaaatttcatttattttttttaattaccaaatgaatttaacaaataatttaaatattgtagaaatgtaaattttttgatcagaataaaaatatgctctagaaaccattcacatagtttcaaaataataatgtagaaagaaaaattatacacgagatttttatatttgctatcaatattctttcagatattacagctagtctaccgtgttatatcgagaggatgaaatctattagtaaagtctcaaagagttacaattgtatttgacttatacaacataaggctccctcttaatattatcgcatttcctttgtattccactctactaatttgaattctttgaaacgttgttgtgttggaattccttcaaagcaacaacgaatgcactcttcctcccgatgaaagacttcaaaaaaggacttctctcgaaacttgtatcacatgtctaatgaacaacaaaataaacaatcaaaacagaaagaaagttgaatgatacataacactactacaaaaaaaatatttccgtgcctaggcgcggtccccactttgtgcccatttatcttttatttgatcttttatatttttttctgtttttttcctttgatatttttctaatcttcttctattttaaatctgcgaaaataaaagataaaaagcataaaattgctctaaacacgaggaaaactaaattaaaattacactaaaattaatctaaaaataatactaaaaacaacctaaaaaattctcccaaactaaacatttactcgaccttgacacgaaaacaaaaaataaaagttaaacaagtcaatctccagaacatgagtaattttcaagtagactcaataatatgattatgaaaaatttcacttatgcatacaatccatgaaatcatagaacacaactaactaacaattgaaccactttatgcatgcctatttcaacatcaatccgctaacccgaaaaaatattccatatgcttgctatacttattattctccactaatataaatcaatgcacaactaataatcaaaaggtctttttaggcttgtagtgttaggcttaggtaagggtagtcgaaatggtcatttaggcttacctataccataagcttctccaatcatgtcacccaaaaactttcacgcacaatcctaatattttttttttctaattacatgagagacattattgcaacaaacaactttatatttatttattttcaaatttgacacttattgtcagattttttttcttttcaagttgttgtcaatctaattttttttttttttttcatattctctcaatttttacactttttcccacacacatacaataaacttcccatccaacttcccccaaaataaagattcacttatggtataagtagggttaaatttttggatattcatgggtttatcttatttaggctcaaaatgtgtagaaacaaagaataagttaaggctcaaaaagggtaactaagataaaagtacaaggatggcttgaaaggcacaatcgatccaaaaaaaattacataaatcactttcctagtcatgcataatttattatatcacctccaatagcaagcaagcaagttttagaattttttaaataattttccacatctcacaattagcatacataaaccaattcaattgctagaaaattacctaatatgattccatgttcttttaaatcacaaaattgaaattagtcaagaatgtaa

SEQ ID NO: 36286 - DNA, 12457 bp, Cannabis sativa
  modified_base (12008)..(12008): a, c, t, g, unknown or other
actaagaaaaagggaaactaaggaaaagagaaatgttgattacaattcatggtaataaataaaagatttggacatccacataattattaatatttataacatatacctttttcttttattttatttatcgaaatacatcatgcataaataatgatatcaaatttttgggttgatttctgagtacagattagccaatccaggtggggcgggttttcggcccaaatgtgcaaccctaccctagccataattggcaaaaattcgaacaaaccttctttagatataatgtcaccaatttagagaatcaatcttaaatcaagcaatctctttgatcacattattgtatctcagaatacttcgagtcgaagcaaaacaaaccacattaaagggcatgctttataatgtgacctttaatatttaataaaccacaattaagcaatgtgttgaacacattattttttaagtgtacattatatactcatatagtttatttaaatagctttttgagggaatatgtagaatagtctttagtaaaagcaagaaattattagaaaaaaggaaaaagaatacactgtatagaataataataataataatacgcttagcctactgtattctggctttttttgaaataaatgaaaatccagcgaagaaatgaaaaaaataaaaaccagataccatacaatgtgacacgtgtccaccatgcaaatagaaaacgacaatacccaccacactatttaccatgtgaagtacttagttatatatcatatagtaattaattaataataatagcttgactatagtaaataatttgaatatttatatacacaagggacatgtgaagtaagtaacggtccaaagatgatgatggtaaacgtgaagtggtggcgttaaaatctaagtttatgtattgggttgggtttggggttataaatacacacatttttgtgtagtaatctataatatattatttaattattaatagatttaattaataatatatcaaatgggtacttcttctactcttattgctcctctgcactacgattctgccgtggaagatgctgaagcacttcaaaaagcatgtaaaggtaataaaatgtatcactatatgtttggcacttatataaaagtttatgtaaatttattcaagtttttggatgttcctccttatatgtttggcacttttttatttttcaatgttgtatataatgtgaaacgaatattcctatctaaaaaatgacatgcattgtttttatttagttataagaaagaaaaaaaagtagaattttcaaaaaaaaaaattactcttttttttatgttttaattataaaaatatggttgtaaagttataaaattacaaaaatatattttgtttagtaaaaattaaaaaaaaaataattgaaaaacaacaaaaaaattaacatcatgacaactatatatcaactataaaaaaattaaaaaaatatgtcaattataatataactataaataaactataaaacaaaaaaaaaaattactgtttttactgaagatttatttttgtaaataaaaaaaaattaaaaataaaaatgaaaatttttctgtgttgacatatttttttaattttttagtctattatgtaaatttttttaaaaaaaagtgaagtatgtgtatcattaaatgacattaaaaaaatatattcccatacaaatttaccattacaatttggcttccccctttagaaggaaattattataaactgaagggggaaacaatctacaaatattgcagcgtatgtttgtttgtttttgaggatattataggaaatacaatacagtgtctcattattacatgttgaaaaattggtaaaagtacttcaaaaaattcaaataattataggtcacaatgacaatcaatatagaaatatggccattgagttgttcgaaatggaattatacatctatcatatatagaatatatatatatatatatttatggaaaatttataccaaagaaaagaatgatgcttaattatgtgtgtgtatttacgcttaaattcatactatatacatatatgcaaatgtcgtatcctatatattacaaattgccattttgacaaatttcacctaatattttggtgaatatttaatatgttcaatgtaagccaactaattcacacctaagctagcccttcttatctctttaattgttttggtaaacctggtgaagagatgttgatttttaacgtatattccattaattaattatataataaactaggtactaaaaattgtcctttaccctaataataaaatagaataatattataatgagaaaggcactagtggtaattaatactttcttacgtattaatattgttatagctaattacaaaacgaaacatttaaaagtatttagtatctctgatacctaataacaatactctattataataggggtactatagtcacttactactcatcaatcctccctatataaataagtgaatacatatacactctcacttcatacacatatataagaataaatatcatacatatctataaactatttttcttctcaatacactataatatggcaacactaattgctatggacaatgcttctccaattgaagacgctgaaattcttcacaaagcttgtaaaggttgaacaatattatatatatgttttatatgtgtatattcattttatattaatgtgagtattattattaattttgaaatgggtaatattatatatatttataataggatggggaactgatgagaagttgatcattaacatattgggccatagaaatgcaacccaaaggaagcaaatcagagaagcttatgagaggctctatgaagaggatcttatcaagcgccttgagtctgagctttccggtgactttgaggtttattatttaatcatattcatattcaaaaataaaataaaataatatacattaatctaattgtaaaattgtaatgaaagagatatagtactgaaagtgcaggccaggccatattataagaatgatttatttaattaattaatatacccgtgtgatgtgaaccgttggatcagagagctgtgtaccgttggatccttgacccagtagaccgagatgcagttttagcccacgtggcgatcaaaaagtcagaggtggatttcaaggttttgattgaaatttcatgcatttattcacctgaagagcttttgggtgtgagaagagcttaccagaatcgctacaaacattcacttgaggaggatttggcttcccatacctctggtgatctccgcaaggtaattaccacattatataaatttatgtaatctctcatttaatttagagaaatattaaaaagtattagtggtggtagctcttttttctatatgtcaatatcaatatgggtccacctaattaagtattgagtccatataggttaatataataacttttagatagtattgttagccaatcgcaagacaatatatttagaagatgctaagcaccactggtacctaataacaatgttttattaatttatgagcattgctatcgctattaggcacttgggctctctaaatatgccgttttgcgattgattagcaatattctttaaaaattattacattaaactatataagcctaatacaatcaataaccatattaataaatagaaaagtattagacactactaactattagtaatttttaacattttatatatgcaaattaaatacatgtatgttaacattttaactaatgtgaaataggaatgctctaaaattaatacatttataaaagttttcaacagctagcatagtagacactttacccctttgctaaccttttcatatgtagaagttttcatcatgtgaaggtttggtaacctaatatatattccctacttattttagtaaatatatataagttatgtatgtaagattttgaattcaacattttcttttaataataatgtattgccttttattaattagtaagtgatttatttatattttacttttggtataaaacaaaaacagttgttggtggctttggtgagtggttatcgatacaatggggtagaggtgaatgcaaggttggcagattcagaagctgacatagttcacaaggcaatcaaagacaactgcttcaacaatgatgaactcattaggattcttaccacaaggagcaaaccccagctcaatgccaccttcaatcgttacagagaagaccacaaaacttctatttccaaggttttttttaatcatcacatcaaaattgtttatgtttttatcataactttataatgagatttcaaaatgttaattggtatatatatttttttgcaggatttgttgggtgattctggtaacagttttcagaaggcacttcataccacagttcgttgcataactgacccccacaagtactatgctaaggtatattcatttcacacataattactatatccaaagccatcttattatacaatttggaaaatgtgttttataataattcaaaaaataattagtttttttataactaattagaatttttactcctagaattttgtcatgtactaaattatactttttgaatttttttaatcgttaaaaaattttcttgaaatatttagattgttggatttagggatttttattcaatttcatttaattttactaattatgtgattttccatgtattaaattatgttttctaaactttgatatctactaaatcatctccttgaattttgacatgtaccaaatcatgtctcctgaactttcatctttgttagactttttttattgaacaaaaattcttaaatctaacaatcataatagtttagatgaaattttttacagctttgaaagttcaaaagacatgatttaatatatgttaaaattagatggacaaaaattttaatttgtattttttattgtgaaagataaaaatacaataagtgatttgtttatataattataggtgttgcgtgatggggtgaagaagatgggcactgatgaagactcagtgacacgtgtgatagtgacaagagctgaaaaggacttgaaggagatcaaagaggtttactacaagaagaacagtatttcccttgatgatgctattgccaaagacacttcaggggattacaaagactttctcctagctctccttggaaaaccagaccattgttaattaatttctacaaactatattgttatggcctctttttggctttcctcattttctttcgttttgtattgttgagtcgagatcagtactttgttgttacttgctgagttgagttgagtactctgtttttctttgtggtgttgtgttatggttttataataataaactcattagtgtttcaattttcaattaatgctactttttgttatggcttatgttatgggtgaaatttttcatttttattttttagtttatctatattttattgcagtttctaatatagttcttccaaataaaaagtctctaaagttatgcctagaaaattaggtatttctcggatgttgtaacttgtccatcctgaatggagtattgtggaatgatagttgagtccggaagggggttcccgatgactatcatgtccacttcgggtttagtctttaagatagctagcctttctctagaaaagagttccggacaactagttatttttccaagaaagcagttctgaaaagtcaactccatttggttctaacctatccaaaagcctctttaacgagtgtctttggtctgagatctcgaaagctcgtatatgtttccagatgcactaagactgatgccgacgtggagctctcgctcagaggagagtttgttaacttagttattgtctaactaacttaacaattttgatttttgcagccaccgactttaaaaagaggtagatcgcccaagaaagtaagttcgaagagtaaacaccatcattctcaatcaagatcgaagtccagagagaaggaaacaagaaagtgttacttctgtggacagtctagacacttgcaaagattttgcaagaagtacaaggagcaacaagacttcaacaaatctcacaatagagataggaaggataagttgcgtcaccacaggaaggattcagttgtagtcacaaaagatagtgacttttccacagatggagaattgttctttatcttagaatcttcaatgaatatggagtggattcttgattatcatcttgttggtgaattcagaagcctcgacattctagataggtccaactttcttggaaatcctagcaggtgcctgcaacggcagccttggccttattctgagcttcttgggcttcacctaagctaagaagcgcagccaactcttcagggtccaaatagcaaagtcaacttttagattggccttccagagctcataaaaaactatgttgccataagtcttatagtttgagttgtctcgcagatgagccaaccttttaatcttgagaactttcgtcttagtctctaaattctgttggcccatctaaatgagttttcttctcagccttcaatactctttgagcagcttccaaagattggtttagctacttggttcggtcctcaagagagacatgaaaccgaccaacacccttccgctcttcctcaagctcgtggactcatttagtttctaaacactagtagcggtagactaaggggtccgccactaatgaccttgacattagcggtgaattttcccttcgctaataatacatccactgctaatactcatttttgttgtagtagtgactccaagtgtgatcattctctcttcatcatatataaattatgtattttttttgccttaattatttatagttatgatattattattaccactaatgattttaatgaattaaataattttaaaagctcccatgatgcttcaaccttgaaaaaattatgaatctttgtaggacttaaaatagctcgaaataccaaaggcatttttgtctcacatcaacctttcacccttaaaatcctccaagaagaaaaatatcttggcactaaacgtgcttcaactccaataaaaccaaatctaaaactcaataaagattcaggtactctcttaacagatccaatgctcagtacagaattccaatcggtaagctcacatacctcacaattacaagactcgacattagttttgcaatcaataaactcagctaatatattcaatctcctaggcaacctcacttgaatgctgcttaccccatgctccaatacctgaagggctccctcagccaaggccttttcttccttgttgctcgtccgcaaacttaacatttcaagcatttgtagatgctgattagggtgcttgtcttgacactataggagattcatctctggttactgctttttttaggcaattcctccctcatctcctagaagtccaagaagcaagaaactattactcaatgtacaagtcgagcatagagaatttgccaatatcacttgtatattaacatctgttttcttgtacttctcttctgtgataacaatgtagcaattcacatttaagaaaatctagtattccacgagtatacaaagcatgtggagattgattgtgttattgagagaagatcaccaataatgatactttgaagatgaatcttgctgatatttttaccaaacccttcctagcttatttcaatgaaattgtttctaagatgggtgtaaaaaaaattacactaaaggggcctactaaatatggttagttagtcaggttaattagttatttgttccaactaactcaactagctaactttttacttgcctatatatataatggctttcctattgtatttactgaatcaattcaatctcataaaactaaaaccgagctgtaatttccccactaacactcttgcaatggaaaagcttaaatttgtgaatgattcaatccatcaataatattgaaatcgagaagtaggcgcactttgattaacttattacatcttattggtaaaagaaaaattacaaacagaactgagaaactctccaaatcataataactgaataagaataacaatattagagagaaaacactaattcgaaaaccaactttattaaattctccaaattattaagacaaaccaactcatgaattctccaaattctccaaattatcagtgtcccctttcaatcaatgcaagtaagaaatccttgtagtttccctttgaggtctcaccaattttggtagagagatcaacactaagcttctttttaaactcttctttaatatccttcataccattatcagctctagtaacaatcactctagtcactgccttcttcaatctcttattaccatcattattctgtagtgattgctccaatacctaatttgggcaagaaaaattaatattattcttttcagctaataacaaattaaaagtactcaaatatatgtacgctcattcttagtcaattattagatggattagtatttatttttgtatagattcgatgtgttttcttcaagtgtacaaatttgtgcttaaaagataattttgttatggactgagatcttcgaacccatttttgataatattttcatcattttttcaaagagattataaaacccaaaatgataaagtttgttcccaattttccaaaacacgttaaattatctcatttgaagtccgaacacaaaaattatacataatttattgagtaaggtcaaaatagtaaaagagcgatgaaaaatggcttgtggcactatagcgccatgtgtacatgtttttgtcacttaccttagtgaagtatttttgtggagcacatagacattgtactgtctcttggagcctcaaatcagtgataccaaaatcctataattggagaaaaatcagcataaatgaattatatagagacaataaagaaacatatataaataataattatacctcatccaagttctttccatctgaaattttgttgtattgttcacacacttccttgagatggagtttgctttttgtggttagtatcctcaagacttgttcatcttcaacaaggctcttcttctctgtgttattctttatgacactagcaagagtttttgcatcggattttgcatggtcttccttaacctttccaccttcatatctatacgcactcactagtgcaaccaatagctgtcgttgttcataataattaatataatataatgttttttaattaattaaaaacaaattagtatatcaattgggtgtgtttaattaattaattaattaattattaccttgttttgaggggtggagtggagtttgaaagcaacatcttcctcgatagagtgatgaaagagagaatggtaagcttttctagcacctaagagatcatcagatgatctactgcatgcgacctcaacaagtataccgtacgactcagacccctgttttatggccttcttcaccaaacgagcatctctctcccatggatgcatcgtccaccaaactacagcattctataataataataataatcaatgttacatattttttattatattatattattaattaatatacacagaaaaatactaaagggtagctgacaagcattaaaagaagaagagacatactaaagttaatattgttgcaaattattattaagtgagatatattttaatttaataaataatataaaaaatttgctaaccacttataacaccgcaataaaatttataaaagcatctctaataggaattatctattggagtaatctttctaatgtgtttaattttcaagagtaattttatgagaagattgtttaatataaacaatggtcacatactatttttcttattttttttattttttttttattaaaaaaattatattttcttaaataattattaatttaatgtgatgtaagattataatgggcaaattttaatattgtcaactattgaaatatttttttaagaaaatttgataaataggtggatgaaaaaaaatatatatttttaaataatgtatgtattttgataactataaaccctctaataagacttctctaagttatggttatgaacttataataatattagtggccccactttcataataattttattttacaaagtcaacagaaagatagaaaacaaaaattgtttttatttacataagaacaaactaattattatcattttaatgataccaaacaaatcaaatatgaatcaattaatcaaacgattttcatggtttaattaaaaaatttaagaacaaaaataaagtttggataaataattaaagagagagatagagaaattacattaaaacgcaagaactcgttttgaaggtgtttgagatgttgttttcgccagtgctccaaattacgttcgttatctttttcaaacaaatcactgctcttcctgaatgaacttccttcttcagctttccattttcccagattttctatcagacatttctcatccactccaactccttttttttatttacacataaaaaaaatattagaatatgtatcgattataataaaattcatatattggaaaaataaaaataaaaataacctttgaaagcatcggtgacattttgaaccgtgtcggagagagccatattgatagtgttttggagttaattaaaaaaataagaaatagagattatattgtgagacatttttcaaaaccagctgcgttgctaatttatatgaatggacaagggtattttcgtcactttcaacttattgttgtttttttttgtaacgactaacaaatgtatttaaagaccaaagtaattatgaggttacttttgtaaacggatatccagcaaattcaaccttctggttcaggaaaagaaaacgttaatcatttattccgttaataaattttactattttgtctttaaaaattaaataaagaaataataaatgttctgtttttcctttataggaacatttaatttaatttaaattataaacgtataataatataaataactgaaatcatgaagccagctttgaatgtttaaatgttgaagtttcgaacctggagaataataataaatagaatatttctttcttgtataatatttaggtaatttataatttttatgagtacttgcttttttttttaattaaagaatatttgtttctcattttgcaagcatttataaaatattaaatggtaacctgtcttagtattagtattaatggtcaaattacaggatatatatatcactgtattagaagaattgttcgaagttacatcaataatatgaaggcttaagaaatttcaatagtctataggcttagaacacttttatctctttacacaataccatatattagatgttttttatattttttttctatattatttaaatgttattttttaaaaatatataatatcaattaaaataaaatagaaaaaagcaaaaataataataaaataaataataggggagagacaggtaaaaataaactaaaaaattattaaaaaaactaaatgaagaaccaatttcatctcattgctacatgtagctacaagtttcttggtgtaattgcatatgtaaattacttaaatgtttgtccatcagctccttcatagataagtgttaattcaaaaatttaaactagaattctaaaccacactctagagagatctctcgctagattgacgagaatgaatagaaatagttaagtgattaagagagacacatctaatttatagtaattcaccacctatatcgcaatagtaatggagttacgactatttcgagtttttatttttcacgagataataatcacagcaatagactaaatgtcagaaactccaaactctagagagagaaagtactagagagaagctctgatcttgtgggtagttttttgaattgcttgtggaactctttttttatataggtgaaggaggcccacgaaaataggaaaaaaagtacaaataagttgttttcgacagatgatgatgatctaatggtaaaaattagcttctggtggtgatggcnaatttttggtgcccgacaggtcccgctgcgatttacccgaaacttattttcgtaactcccttggggtgaattttgacgacgattgcttcagaattacgactggggtgtgagacataagttgacttaatagagagtttaagtagcttcaaaactcaagttgaatcgcatcaatcggataaacattgagtgagttatggtccttttaccattgttattgacatctttctaaaatagctaaccatattaatcaccttctacttcaatcttactttaattttttggccttatcatagttgacgagttctgatcgtctacacttatatttattatatagagtttatatttaatttaaatatattaataagaatatataaaaattaggctaattagtaatttttccctctgaactttaacatgtaccaaatcgtgccccctgaatttttttggcc

SEQ ID NO: 36287 - DNA, 9827 bp, Cannabis sativa
  modified_base (34)..(39): a, c, t, g, unknown or other
  modified_base (1185)..(1206): a, c, t, g, unknown or other
tatgtgttttacatttgtgatgctctaaataaannnnnnattttggttttaatgattatgaacaagtttaatgtatgtttggatagttgtttggatagttcataatctatgtgaatgtttaacaattataactaaaaaagttttaaaaaatatatttttgctgtaaagttttaaaaaaaaatatttgagggccaaggcctccatgaactcaacatagcttcttccctaattataaaatgtctaaaccattgacaccaaaaataaaaaaactcaaaaaagatggaaggaagaatgtattattgaataacatctactattaataaattctaaatacaactcgataatccaaccattaaatagtgttagtaaacgtaataaaagtaacattagctaaagtgtgggatacaacattaaaatctttaaaacaataaaataaaaaaaataaataaacttttataaaatcagtattttgacctttgttttagtactttgacttgtgaattttggcttgcagaatatctctcattttccttaaaaaaaaaaaaaacaatatttatatgtaaaagtggttgggaaaatttacattttaatcttgttgaatagatttgtccataataaagctttaattagaaatgaatatagaacataaaaaatagaaaagaaaggcagattggacaactaagagtgagagagagtacaacactcatttgtaaaataaagacaaaatgtatatttagtattaattatgatggctacccaaactttttgtctattttcgtttgggcactaatttttatattcttttcctcttctcccttgtgcaatttattttacaacaattaccctccacattgtctatctataatatcacttcaccctttcttattataattttttaaactaaattatatttacaaatcttgttaaaaaaagaagaagaaagtatttttataaattatttgtcaagcatctttttgtttatgttgaatttcaaaatattaatgctcccattttaaaaacaaaacaagtcctaatgttttggtgataaaacctttttaatgttacaattacatctcaattcctatttcctagtatttgagtcaactaatttacaattgctacaatttttttgacagacagacaataactataaatttgtcaaaactattattattattattattnnnnnnnnnnnnnnnnnnnnnnttattattattattattttcaaataatttccaaaaacaatcctacaaattaattgtcctaccgaaagtctagccaattatatcaacacctctcattttttctacctctttttctcctacaagctcacctatgaaaagtgtcaaaaaaaaccacggagaaattatcatttttacggattgaatttttttatttcaaaaatatgaaactttactaaattgttcgatattttttttagttattttacagtttatttagttgttttgtagttgtcgtgaggttgattttttttattatttttggttatttaatagttaatttataattattgtgatgttgattttttattttttttttataaatcgttatttttttagttattttattactttttgttgagaaaaatatatttttttttataattttaaaactttaaaatcgtattttgtaaataaaaattttaaattataaaattataaataaaacataaaaaaaaaattcttaaaaaatatatattcaattttaataatttttaagtttttttttttatttttacactttaaaatagcgttttttgttatttttttacgaaaattcacataaaaactcacatagtaccgattgaataacttaaattgtaatcaaaattcacataacaatccacataaaaattaacagaacaattcaaaccgtaaatttaaaaaaaattaaaaaaaaaagtatatgaaatattcaaacaatattttgatagatgcatatttcataatgtgagacgggggctaattataaaggtatggagaaatgttaaggcaaagaataaatatggaaaatagagtgtagaaataataatatttaaacttttaacttcgattattattttatttatttatttatttaaaaaaaaaataagtattgcgtttgaataaggcagcggcaattcaaagagggcagacatttggaacaatgacagagctttaggcacacgaattgcacctcagactcagactcataccaactcaactcaaccatcttctttacccttcttcttcattacatctctctctctcaacttttccacatcgattaccttttctattttagggtaattttttttttttgggttcttctacagaccaaatattctgggtagagcaatatcttcttccggtaattactaggtttctatctatttatatatttattaaatagaatttttaagccgttaatggcgtgctgattatgaatcaatgtaacagtttacaactttacatgtatattgtttcattttgcaattgggtttttttctaattttgattttgaaatttagttttgtgaagataatgttgtcgaaaattgaagctgggaaaaaaattggtgaagattcaagcagcggtaagttgttgaatgagattgaggctataagtaaagctctttacattgacaaacacacctcaaggagtttgattcctcggccgaattatggaatcaagtacggggggaaaacccacctgcccgatacgaattcgaacgtgaaacatgccactgaagagccatctcgcaaggagaagaagtccatatggaattggaaggcattgaaggcattttctcatatccgaaaccgcagattcaactgttgtttttctcttcaagttcattcaatagaagggttgccttcgaattttgacgaagttagtctttgcgtccactggaagaggagggatggggatttggttactcgacctgtgaaggtttctcaaggcttggtggagtttgaagagaggttgactattacttgctctgtctatgggagtaggagcggaccccatcattcggcaaagtatgaggcaaagcatttcttgctttatgcttctgtgtatggagcccaagaaattgatctgggtaagcatagaattgatctaacaaagctgcttcctttgactttagaggagttagaagaggagagtagctctggaaaatggacaactagttataaattatctggaaaggctaaaggtgctactatgaatgttagttttgggtatactgttcttggggataatttaggtgcaccaggaaatagatctactgctcctgacatgttgaatatgagacagaacaatctgactatggtgaaatcagggaataaatttcgtcaagttgatggaaggggaaaggtgaggcgttcagatagtcttcccaatatttcccaagaccagcttcataccctgtctcgatctgtagaggatataaaggatcttcatgaagttttgcctgtgtcaaggtcggaacttgcaagttcagtagatgttttgtacaggaaattggaagaagagactttggataaaccatttgttcaaaaacctgagtttggtgagttgaccaagccccttgaacccgtaaaaccagattcatattcaccttttgattctggtagagaagatgtagacaatggctgtgatgagagcgatttttctgttactgaacaaggagtagaattatcattagctgaaccagggaattcagagcaagtgattgtagaaactgctaatgagtctccagtagtaagtcgtgatgttgttgaagttgagactgatgttcaggtagatacagaagcggacaccaaaatttgttctcgggttgaggaagatagcagtaataaagatgagcttgaggttcaggactgtgtttccgagcaggatgaggtatatacgaaagaatcactcatgaaagagttggagtcggctttgaatggtgtctcagatttggaggctgcagctctagactctcctggagaggaagagaactacgaggatattaaattggactttgaaggtgatatgaaagggaaatcacttagcttggatgacttgacagaatccgttgcaaatgaattttttgacatgctaggaatagagggtagtccatctggcttgagttcaggaagtgagcctgaatccccaagagagcgcctattaagacaatttgaaaaggaggctcttgctgggggttgtcctttatttggttttgacttagaaagtgaggaacaagcgcagcccagctacagtgatactgttgaaacagggtggagtaactcggctaaggatcttgaattttcgtcacttattcaagctgcagaagaggagcatctcttggcaagtcaggtggaaatgagcaaaaacaaagcaaagattttggaagacttagagacagaagctctgatgcgagagtggggcttgaatgagagagctttccaacattctccaccagaaagctctgctggttttggtagtccaattgatttacctccagaaggaccacatgaattgcctcctttgggagaaggtttaggcccttttcttcagacaaaagatggagggttcttgcggtctatgactccgtccctttttacaaatgctaaaaacagtgggaacttggttatgcaggtttctagccctgttgtggttccagcagatatgggttcaggtataatggagatcttacagcaattggcatctattggaattgaaaagctttcaatgcaggcaaataagttaatgcctttggaagatatcactggcaagacaatgcaacaaatggcatgggaagctgatcccagtttggagggacctcaaaggtttgttggtctattttaagcatcagcagccgaaatttccttacacatagcatttttatttgggctaacacatctattaactgtactttcttattggtgcagtgaatgtttgttgcagcatgaaccaatggtcgggcttgatagctttgctggccaagtgagtaatgaaagatcgtcacggctgaagtctagaaagaatactcccagctcagtaggtcgtgagacagcatcggaatatgtgtctttagaagatcttgctccactggctatggataagatagaagcgctttcaattgagggcttgagaatacagtccgggatgtctgatgaggaagcaccttcaaatatcagcgcgcagtccattagggaaatttcagctctacagggcaaggggattaaccctagtggatcccttggcttggacggaactggtgggttgcaattgttggacactaaagaaagcagcgatgatgttgatggactaatggggctatcactgactcttgatgaatggatgcgattggattcaggggagcttgatgatgatgaaaatcaaatcagtgagcgtacttctaaaattcttgcagctcatcatgctcactctctggactacattcgtggaaggacaaaaggggagagaagaaaaggcaaaggatctggtagaaagtgtggtctattagggaacaattttacagtagctttaatggtgcaacttcgcgatccaatgagaaactatgaaccagtaggaacgccaatgctttcgcttattcaagtagaaagggtcttcattccaccaaagcctaaaatatacagcacggtttctgagctaaggaaatataccgaagaggatgatgatgaggctacatcagcaattgcagtaaaggaagaaattatagaggagccaaaactggagaaaggtcctgaagaggaaggtaatcctcagtatagaatcaccgaggttcatgttgcaggtttgaaagctgagcctggcaagaagaaactctggggtaattcgactcagcaacagtccggatcacgctggttggttgcaaatggaatgggaaaaagcaataagaatccattcttgaagtcgaagcctacttcaaaatcgaatggtttgaatgtttcaaaatccaaggctccagaagcaactacaaaagttcagcctggtgagaccttgtggagcatctcttctcgcattcatgggacaggatcgaaatggaaggaattggctgctctaaatccacacatacggaaccccaatgttatttttcccaatgaaactatcaagttgtggtgagtagatgaaatgtgagtctcattgtttagtggggaaatggtaaattacgtgaacaggcttaatctctctatgccagacaaaaggtccgagtttgtgtttgttgggattctattcatttgctcaatggaacaacaccacccaacgaaacattaggcaattgattagtattagacaaaatggtttttgatgttttacatttttgtaaattcacatggtctttcactgtatgcgtgcatttgtaattgatgtcctgttgaaagaatggaaaatttgcacttcacgattcataatatgtcaagtttttcttttgaaggaatggcgaaattggttatgggaatcattagaatgtgcgactcttttaattgaaatacccaattaaagttaagcttcttttgcaggacagttacaatacaaggacatggcatgagacaagttcaggcaattattattattaacattattattaatgttatgtcatcacaactaattcttatatttactatataaagataatatattttaaattttatagaagctagagcttacgaccgatacttgaatgtagtcaccactaatgttttttttagcatttctctaatttaaaatctttagatgaccacaagattactcagggagggaggagcaaccataataatacaatggagactataaaatttaaacttggtgtttaggaaaatggaacctttttgtgtatttttacaagtatgcaaaagacacggagataattattatgaagcaatcaataatgcttaggcactaaaaatgaaaacgacacccattgaaaaccaaaaagtcaattacttagcttaggtactataaatgaaaacgacattcattgaaaacaaatggatcttctttcatttcaattaatataataaaacgacacaaaatatgtaatattttacagttgaattatacaattctagattgatttgatctacattgtatttaaacttcgcttagtactatatcaagcaaatggagaaaataatttgcctccataccattaccaataccaatatgaagttgttggataaatttatgaagatttgagagcaataacaagtatatatataaatttaagtaccacatttataatgtgtgaaaagttaatttcatatataaaaaatatgagttatttttttattcttattcatttttagatagaatctcatacattttatcatctgtatactgtcatttttgaggtacatgttcttaggcagtgatagctatccaatgaagacgattatactttaaagaagaaaggaatgctgctagtgtgttgaagatcatgaaaaggtcataccattaccggctatcaatattatcactagatgtcacgatagatttccaaccttttgagtttatttgagtcagttgttactatctcttggtggggttattgaagcttgtaaagctactgtaacccttaaagcattttgctttctaccaaactaatcagtgtgttgatgcttaattcataggagatttgttaaagctttggtcatttatattaatggataaaattaaaatttttgttattccacgttgtattggtagtttttcattctgcaaaattgaaggaatattttatagactatagtatttactgaattaaacttgtggaactaaaataaaccactctaactcggggttacattttctttaagacttactttatttcacaaatacaaataacttagtagtatcaaaacaatatcttctacaaaatcacgaaagttaatgggaattggccactatgttacttcattaaatggttcatgatggctcataagcaataattaatatgcaatggctgagttggcttatagaaaaagtgggaacaaggtgtgtcacaacggctatggtcagtatcaaaacgaaaaaagaaagatcttataggtggaactaattggacagcttgatcatccaaagaattaagaaaggaatcccagctggttgataaaataactcctgtcatatataaatattctttttaacaaaaaacctatgtactcatacaactggagattaaaataaataaagaaaaaataatgtggcctaacgattctgttcaacaagccttcccatgcataaacctacctttcattacgcatggtatggattaaagtgacaagactggatctattggctaaatatcccaactacaacataagcttttagttgtagatactagggaaactgtcatacataatagtttgtttaagaatttcaaaaaatggaatgaggatcaaaaccattgcattttaattcttaactaaaagttgatgtggtcatcactatcaccattattttgagtttaaaagttcttttagaatatgtgagtaatacttcataataacataataattagaataaatgagtcattaataatattaaatggtaggagtgttatgattgccctgtgttgttcatgactacgaatatggatagtggatacatttatgacgaagaccccattcttaatcttacagaaacttccattttgtccaactactttcttgttaaacttttatgagttttaaaaagaataatgaaactcaattcctatatatgataaaatgtaatagatacaattgcgtccttaaccggtaactgcttggcaaatcgaaacactaaacagtaaaacatcaaatgtgaattacatcattgccattagtagaaaaaacaggaaattgttattattgtaatattactttaaatgttgataacatgtgatctcatgattgaaatcttccctgattgtgaatgatgtagtcaactgaataaaataggttacaattaactaattgatgcgatttaagagcagataacagtaatacaattatataaatggacacagttgtagtaactaaagaatagtcaaatttaacaatagagcgattatcatagtgatatattggaataaataatgatacaaaagccaccagcacataccaatagagctttataaaaatatatatttgcatttgtagtgaactttcttatttcatacaatgagtcagttagaactgattagttatggtacctgtgtcagatgtcttaaaaaagagttgtataccaaagggtatttcacatattttttcttctgcatcttctgaaattcttaaaaccaacaaaaatcaccaagaaattcttaatgggaagcaaccgcagcaggtctcggaaaatggcaactcctcctcacaaagtgcttttgactgctgcagcttcaatagaaagtacaaaaagttgttgagtcctggaagagccaacgaataaaacttgcaaagaataaatttcttcaaatcacctagccccagtatctgaaagcatgaagagagtttaaacaaaggaaaaaagatgatatattgtagataagtgatgacaaacaagtgggactgatttagcaaatgtattataccattaccactcttagatgattcatttctttctgaagcatgctgaagaaggaactctttaactgttctccagtagcggtcaccaccggaatgccaagtatccatatgcatgccatcaggaaattccacaaaaacacactgcctgttgcgagcagctgctttagcatagagcatttgcatctgggatgggggaatcatctcatcttgcaagccagagataaaaagaataggctgcttaatctgc

SEQ ID NO: 36288 - DNA, 3916 bp, Cannabis sativa
ctaaaaatagcctaacaattatcccacatgtaatttaaatgaagcgtggggattgtctacgtttcatgaacaattatatttgaattaatctaaaaaaaaataactgtcaacctatattcatataaataggggcagattccatgagaaaagagatgaaaaatttgagaagtaaattattattattcaaattctgaagttgtactctgtgttcaaaaaaagatccctaataataaggactcgtggagtatgtacattttaactacaaaattacataaaaatatctgaagttataatttcttttattgcttattaatttctgtggaatattaattactaaaaggctatttaattttggttaatgaaaatctcataaacacgtaattttttaaaaaaaaaaataaaaaattagtatataaggtaattttactttttttattgttgccaaaggaattctcttttatgcatgttcttacaataataataatttatcagaaacgcttaaagacaccagtaatgtctagcactttgttaaggtgtaatattattagtggtacaattaaatgtcgagtgacatgtattttaatataataacttctattgagtattatcaatcacaaggcgccacttttaagtggtgctaggcgtcactgcaagactgaccttttaaaattcgcgagccataggaaaacaatatttttggacccttatttagaaaaaaattgtgctatttttcaaaattagtaagaaaatatgtattttaaaagatttttttttgaaccctgagctagatgggccttagacacaagcttaattcgcctatattcaaggcctaacttgtacaactggtatacctaataacaatgctctaattttataattaagaaaaaaataatgatataaaatatatgaaacacaaacatcaaactataaatttttcctaacaaatttatggttagctattactatataaaaagattatataatttaatttaactaattatttaaaatggcaacctaaaattaagccttctaagccaaactgagtgaagcaccatatgaaacacatcaaagggcttagctggtcgattcaactcaaagtgtctactcactttcatcaccctcttctgtaatgtcaagtatttcgagtaaggaatagctttcaaaatggtcttgatttcaggtattttgctaggtgggatttgtacagagaatttggtccaatcaagaacatcctcaaagggtatggagtagtaatcagatatgagaactgggacacagccttgtcgcattgcctcaacaactcgaggactcgccacttccgaaccactagggcacaagcaaaacttggtctgtcccatgattctgtggtagctgtagttttttggaagttgttcaaagacgagtacttcgttgtctttttccttccaatgcttgaataattttgctcttatgtcgccgtgagctgcaccggcaaagaaagctagcaccggccgctgattgggcggttggcccaatcgcggcggtcctagttcgaatttctttaggttgtattcgggtatggatacgtctcttgatggtttgaagccttcggatgtgttggcattgcataatactttcatgaagttgtcatatatgtgatgatctatacgtgaaattagtggtgcctatttatcattaaaaataatttaattagtcatgatatgatcataatttatgatagtaatgcaactattaattgttaggataaatatttgtgtgattataatggactctaaataaaagaatggagatcagtaaaaaataaaatgcaattaagttcaaaagaatgtataatgggttttcatatttacaaacattatgaatagtcagcttaacaaaacttaataatcagaaaatatacaaatacaaattaattagaaaagaagaaaacacattaagaaaaataagtgttgttgtttaatatcgatcttaagatataaattaagcttactttgatgcattaaaagggcagttaatattagtctaatttaagagtatggacaccaattatatgaaattgcatcatcatatatatggcgtgtttgagcattatacaattaagtttcctatattttaacatagtaatctgtaacctacgtttttcgttttcatattttatatatgatcatgagatatgatacaaaatactattaatattaaatggatggagaaagtaattaaaacaagaaaatacatataaacaatagtataagtaattaacgtagtagctaagttatgtacgtacccagtcatggcaagagacaaaaaagtggtcagctccattagttcgattccaataaggatatttgcgagagagaacataaacgtagtcagtgaaaacacgagagagagtttcagagaagcgtccacctttactataggttgggtagagtgagtctgtgagttttgatatactcatgggtaggaagaaggcatgtgcttcatcaggatgctttgccatgaatgaatgatttgataattcactttccaactcgaaaatgaattgtccttctattgagtaaatgtatgttgttggcccattgtggaccattggcatttctccttctctgtaactccatatcttcattctctttaccatctctatatgactcctacaatacatgtatataattaattgttatagtttcccatatcttatgtggtactggtgatagcatgtgacctatgtagtgtatggacaatcatatataatatatataggtttagtctggctaaatttctacttttacttttgtttatgataaatataagtttgactcattatttttacatgtagataactattataagaagatcatttttaataaaaaatacttttcaaagtagtatttgaatggcattataaaaaatatcttttgtatgtaaattaaaaattatataaattattaatttataaaatagtttcttaagaattcttttagaagaaactacaaattctagcttcttttaaaaagatttttaaattaaaaaagtaatgttttttttagaattgttaaaaggtattattggtacttaatactttgtccagttagcataataagtacgctctacgttatcataccatccgctattggtgtaattatatcgaatctcatataatttaaaaagttagattttaaaaaatatcactaatgggatgttaacaaagtattggacactactagtatctaacaatacctcttctttttgccaaaagactctaaagactttgttaattctaaaagtttaaaaaaaactttataaaagctaagacaaattggttatagtatgattacattttatgacatttaataaaacaaacataattaagttacgtagcatatatgcacacactctctctctatatatatacatatatattagaaagattaaatagataaattcatgccattattgttagttggttattataaagtttatgatcttgaccttttcaaatctatcgtaaaaattcgccaagtgtttccactggaaaatcgagatgagttgagttgactaattatatagctaaaaatttaagagtcaatgtttgtgaatagtttatgggaaacaaatttacactcataaattttaaatatttaagtagataattttgtgtaaattttagattgagtcacttaataatatattccaaattgggttagttttagctttgggattttaatttaggttcaaattcctagaaagaactaccgattcaaagcaagaaaaagaaaagataaatcatttatttatggtataacaaagactcaattagctagttggtaaattataatactaattcttttaatttgccaaattaggcacacatattacgaaattatatttatatagacatgaaaacaactcttccccc

SEQ ID NO: 36289 - DNA, 4602 bp, Cannabis sativa
aaaatgaatcaaaatgagtaccttgaagcaaaccaacacaatttcactaaaatatccatataaataaagaaacctctgtgcagaatcgaaacacttgaacttctttcttttgaccaatcctgtgagcacgatcctgagcttgcaaatctacttgtggattcctgcaatgaatttcaagcattagcatatgaaatgtaatgacagccaggaaagaaagagataaaggactcgcaccaatcactgtcataaagaatgacaacatctgctgtggcaagattaataccaagacctccagctcgcgttgatagcaaaaagacaaatttctcacttcctggcttgttgaaagcatcgatggaagcatcacggtcctccccacctgtattcccatcaatacgacaatacaggtatccacgaaacatcaagtaatcttccagaatgtccaggagccttgtcatctaagtttaaaatcagattcaatcccagttagattagacactaaaaaatagtaaacacctgatcatgcaaattaacagttgagaaaaccatatggacatttcaaccaatcaaagtaacctacaactgtcactgacctgtgaaaatattaagacccttgaatcacgctcttttagctttgggagcaacttatccaagagaaccattttacctggagttaaatatcaagattagtggttactagcaaaacttattagttaatatcatatgaaaacttaagcttaccagcatttgtaatgagatggtctcctgttgtgtatggagggccaggttcagcaccttgaaaaagatacggatgattacagcatttacgcagctgcattgctatattcagaaggcgcttgcgttctccaccagcattaacaacttcaagatctttctgcagtaaagccttgtagtactgtttctgcatctgtgacatgccaactttaagaatagtctcctttttggggggcaaacctttctctacatccgacttcagtcttcgaagaagaaatggtcggagaacctgtttaaaaaaaaaaagacaatcagtatcaaactaaagaaagcatataaatattttgtaaggatctcagtagcagcatgcaatgagtgcattaaagtttaaaattgaatagtaaatgttttaagtattaccttgtgaagctgttgaacaacctcttgttggtcattttcaccagaaatctggaaccactcgtcaaatgtttcagctgaactaaaaatctcaggcagaagaaagttcaagagagaccataattcatgaaggttgttctgcaagcaaaaaaacaaagccagttaatcatcagtcacaacaagaacacattcatttttatcaagcaaataattaagatcgtaagttatacctgaagtggtgttcctgtaattaaaagtcggtaatttgtattataaagcctcatagttttcgaaagaagagaattttcattcttgattcgatgagcttcatcaattattatatagcgccagctgaaccgacgtaaggtagtcttctccttaatagccatctcaaagcttgttacacatacatcaaacttcccagcaacaagcaagtcctctcggatatgtttctgcacagattatggtaaatgttacagtaagaatcttttcttttactaataaaacatctcaatattggagtcaggccagaaaaagagttaccctttcatcaggatttccaagaaacttcacagcccgcagagttgggcagaaacgtcgaatttcattcatccagtttccaagagtagattttggagcaactaccatatgaggaccagtaattcccctaaactcatgcagatagcccatcagagaaatggtctgaagcgttttaccaagaccctgacataaaagaaaaagaacaatggattcaaatcttagttgaaacttaaaataattaatagatagtaaattctttctttggaaaagcataacacaaagagaacaatcaaagtatgggcactaaccatttcatctgcaaggattccatttataccattctcatagagtcgtataagccagtttaatccagcaagttgatagtctctcatttttccctgtatacctgcaaaccaaaaaagacaaccagtcttttaaaatttaaactacaaattaactgatgggagaaacatatctggaacagcaactaaagtaaatacaaacaaaaagtacagtcaacttggtaatgatagagcgcctacaagaaggttgtgtcaaaagccttgtagttcctgcaccaactaaaccatcttcttcttccttgagacattcttcatcctcttcctcttcagttatttttgatgcatgacgacccctaagtcatgtattcatttaaaagaatttcagcaaaaactaagtaaaactttataaaaaaaataataataataataattcaaagcacactggcagtgtttatgcattcaaaaacttaaaactaaaggcaaaccactcaataaatacattaatgtagtaccactaatagtccaaatacctacaaactaaacaaaaatcaaatgtaactacaccttctgctgtcacatttaaaagtgggaaaaggaataaaattttgtatttaaaattgtatacaatgaataagataaaataatgttaataagagaagatacagcaaagttacattttttctgcacaaaagtacagccttgttaggataaaacccataaattatgtcatcccaataatcaactaaaaatttgagacaatgaaaaagcacttcataattgagacagaaaccttttagcaaaaaaattaagacagagaccaaaaaaattgagtcaacctctaagtgcataaaagtagaggtagccataaatcactatacagagttacaaggagaacaacacataaaagacatagcctaacacgtaccttcccttggtcttctttacagaagaagattggtcacctttagcaaaatgagcaaataactctgtttgttggagaagataattcaagcgtccttttcccctattgttctgaaaacagataaacaaactggtaaatttaactgccattaatgactgagcagatacaggtaatcagtcctccaaaactagagacacaccatgtcagcttcaatggcagcattctgagcatccaatatctcctgaactttttgtttctttactttctgcatttctttgagtctggctttctcacgcttgctaacttcagcattagtaccatcatctccatcctgcataattcaaattaaattaagcgcaaacaaacattaagatcaaataaccttgaatcaaaattgttgtataatcaataacaaattattgcagcactactttaaaagccactgaagaacagaccaccaacattacatgcttataagcacttccaattctctactttcgctacatgaaacacggtagtatgtaactaccataaataatagccaatgctgaaagactgtcaccaagactgaactaaaaaacacttccttagctaacaattttattttaaatcaacaaaaccagtaagccaaaatacccattccccaactctttcttaatttcacaatattttcaataacaaataagaagcaaagaaaaccctagcatgtaaaactaccgacgccctagatccaccacaataagatatcgcaaaccacataaaaaacctcataaacgtagaaaatacagctctacctcttcctcgtcgtcatcgccgttctcagcggcggcgtcgtcatcgtcggaaccaggagagatagccaaggcaggctcatcgtcatcggaggcagcagagcgcgttacagcctcaagttcctcctcgtcttcctcctcgccgttgctctgctggttaatctgctcctcctccgacgaattagaagagttagagaaagcttcgtcagaagagacctgcggtttggagagcttcgccatggaatctctcagatcgagggtttcgttggtagagagggagaaataaagaaaacgatttgtaaaagggcacttggcagtcgggcagtgttgtaaataaaatgataaaaggttgttataagagaagggttgaagtatttatagccgtgtgatttggaaaagtaatatgcacggttgattgagcggttttagtccaaaaaaatttaggatttcccgccaataatagtgaaatactgaaatgtggtttcccgcctctgttagattgggttagccatggctcgagactaacgccttggctcgaaccaatggtgccacttgtgccgaaccaggtgtgagcagggttggctattggctaaagcatgttagacctaagtaaaaggttctcaaattagtaaatcagaagttttaaaaatatttaaaattactatgtaatccctaaaatatttttttaaggggctttttaattttgcttttaattagaaaatatttaaaattactatgtaattcctaaaatattaataactgaaaatgtaattgcttttgttcttttcttcttaacacttgaggcatacaagaaatggtggtggggagctgattacaccttgcagaattgcagcttgcctcatatcttgtggcatgaaaatttcaatatgaatttcat

SEQ ID NO: 36290 - DNA, 6134 bp, Cannabis sativa
tcttcttttccagttgatttcaccagaattaatagttgtatttttatcgttttgatttcattttggttgttttgcagttttgaaacgatcgcggtattttcaccttcatagttcactctgtacagatgaaggcttagtacatgtggtatttttgtaaatatttatatgtggactgtataaatgtttaacggccggcccaaagtatttttgtaattttttttccttttttatatttttatatttttttccctaaaatatatgaggatgatggaattggataattcatcttaataaacataaaattttcaaaaaacaacaaaaaaaaatgcgtcatccaccaaaatttttcaattaagttaaaaaaccttccaaaatataactaaatattgcgtttcaacgggtctttatttttttcattataaagaaaacgtatttttttggtttatcttcaaaaaaaaaaaaaaaaaccaagtcttttaaaccaattattaagaaatttccaaatcatattcatatataatagttccattttcagcatatttaccccaacattgcataagctttatgggttctttttattttctctttctccaaagtctgcataaaacatatctcctctatcttcggaagattgatccatcgagcacatccaagcaaaactatttcaataatcatgacatcgagcatcgtcgggccattaaatttgtaactaaatatacacaaatatattcaaagggcatatattagtgtcttaagaatattaatgtggtcactataatgtgtaacatttatgaagttcaaagagaacaaaaatgaatgaagagaagaagaaaatgtaagaaattggtcatagcggcagctgttttggatgtaagaaatttttggaaaacaggaaagattagcataactttttgtcgacaaatatgaagtagtttttcacattatgatatctcatagagcatataaagttaaaactctgcgattttttattaaaagggtatgaaatcaaaataataagtggtcaatgatagaattattgaaacttgaaagttattagatatttattcgtcttaaatcattcctgtgaagaaataatatagaaaatagtgggtcatatgtttatgataacccatttgaaagtagtaatgtaattaagcaaatataagtttaactaaatatgccgccaaaaaagaaaaaaaaaagtgtcacaactaaatgaaacagtgtgttacctacctcacttgggcctactattaaatgagtatattaacaaataaaactcagctacaagcaagcaatagataagataatattatataaagaagaaaccaactgccgaattaaacaaatcatggacacggatgttagtaaaataataccatcagttatattcaatcctaaatgctatgaaatttatcttcattgcaagtaatattgattgataatatatgtgcacctataaattaggctaaagcattatacaatgacatgataattttttaaataaaaaatatttatctaaactgaaatctactgtcttttctgtgtaatgttttggtgtaatttattaatgcacctattattattattctaatttaaatatatatttaagatacatttctggaccagtaattggtcaaaagaacgagtcttgacctatgaaatgtgccaacttctatagccaaggaaaaatatatgtagccaccaatgtttttcatccacttgaatcaaacatgtggtgacacattgacccagcaataataagcatttttctcattcaacaaagtttattaaatgatgccacatatgcttacgtacgttttagtcataaatctacttgttctttcatggctagtgaatagtgtcaatttatttttcttccatactttaattgtgcataacgctcaaagtgaacatttattaatattaaaggaaataaacgaagcaatggagaaaagaggaaagaaagaaaaactactttaatttaccccaatattgcaggagcttcatgggttctttcgattttctccatgtctgcataaaacatatcttctatcttcctattccagcacaagtttttgcctttgctactcaaatttttgaagtaaaaagaagtaagtattagacaatctaccaaggtaattcaattatttcacagctatgatctatttcaacaattacctggctcctgagcatcaacaataacaggagggaaaacattgaactcagtgaaaatgattgactgttgttctttactttcatcaaaatttgtagtagaattatcacactgcagctaagctggcttgccaactgagtgtaaagaaaaaagggcaattgttatggcttgtttattcagagaagaaaaagttttgaagaagtcatcaactaatcgaaatattaacaaacccggatgagtaatgggcaattgaacttgtttttcttaggcaagactcacaaaattgattgagccattcagaatctgctccttcactctcttggtggcaaaaataacattttttgacttcagccacagccaaacttctgaagttaacaattggaaagcaacaatacatgcatggaaaatatgagacacgaggtaatatttcaactggatcaggagatatagcctaaatattaattaaaagtaaaaaaacaagtcaatagaagtgtaaagttttgtgaagataaaatttgaaattccagcaggcctccttaacaagcacttaatttaaatttaaataagcatcataaaattcaaaccaaaggaacaacatggacaagaagtcttgtaattattacctctacacagctgttgaacaaaaaccaaattgtctcattttcctgtctacaagtgcaaacctataaagtaaacagcattggaaacatgtgaattcccattcgtaactactttattgtgcctatgaagagtgttagatttgaacacaccaataccattgcttttgagagaggctacaccgatacgaggctagctaatcggaagagtgttactgctcgtgcacaccagaagtggttcttggacttagcatcaagcaacagtagaagattctcaaatcattttacccaaatgataaaagagcttgaaagctgaaatactaccagccttgtccgtgatcaaagtaatcaaaaactagtgtctaataaccattactttcagaccaaatgcatagacttcctatacatagcaaaaatacttaacccaacgtgctgacacaagcgtatgcaaaatctcattttcgaactcggtccattgtgaaataactatattgtttaagttcaaatactacttactgagtactgacagttggctaatttggtcagcaaaaaataacaatattagaaaatattattttgaaataatgaagaaaatcaagacattcttccagcttatgagctttcaacctcataacgggttcatcttgacaatcacaaccgattgaagaagagctcttccagaacaaggaagcaagcagagaattaatcctctatcataataaggatttgaaaattaagctactctgtgccccccagcgatgtagggaagcctgtcaaacattgtaaataatcagttgatcaggattacttcaagtaaacacaatggaatccccaatatacacatacagaggatatgataaaaaggatttaaaattcacgctataccattcaactatatcggttcctgtttacatcttaagactactaagataaccaaaaagaaaacaactaagttctgctcccctgcacatcatacccctatccgcaacactaaatttgaaaaaagaagatgatgaaaaaaacaaggaaatcagaatgtgtttccttccaactgttttttctttcctttctttcttttcttctgtacgtaaattcatatcctctctttacaaaattcattgcgttatacctcaattgaggtctcaaagtcagatatgcaacctttcgccctgttcaagcttcaagtcacaattggcgtaggactcatctacctctgcaaaataataacatacaacaaagcatattagcaaaaaattcccataagaaactgcaacaaacacagtcaagattgagagaattagaaccttaggaggagcctcagcgatccggtaagcatcagcagtaacacccaccaaccacaatccagggaaaacagcctaaaataaacaatgaaaatcagccaatatgtaaaaaaaaaaaaatgctttgaagattgagaaagaccagcacaaacaattgaagtgaacgatcgagaaaacatgaagcaggagaagaagatgatgagtaaaaaggcgtacgtcaagctgtttctgaacattcttgggacgcttcctcggcctccgagcaggccttgacccagtcatcaaaaagatatcttcttcaatctcctccctagacagcgcgatccaaaacttcctcttctctttcttctccgtactctgctgctccgagaatccccttagcctcagcgatttcggttgttgctggttctgattctcactctgattctgaccacttcctacaccgctgccagtaacagtcccacctggttcctgaaattctccattcttaacaccaatcgaagcaggtttcgagaacaaaaccttcctcggcctcaatttccacggcttctgaaccgtctcctcagcctcaacttcttctccatcacgatgctgctgcttcccttctctgacaacctcatcactctcgttgctcccttgctgtttctgcaccttctccgctgaagagcaagacgcaaacccaaatctgttgcgaacagtacgcgatccgaccttactagtccgaccagcttcaggctccgaatcgttcctatccgggtcaacctcaccatgatcggcgacgggagagttctcagccgagactggtcgacggtaacgatgatgaccaccgctagtgtgattcttcgcgccgccccatttcaagaatgtgagagggaagttgtgcaacggagacttgacaggtgctgtagccattgttgaaagaaaccactaactgagcgtagaactatatatgtatataatatacacaacaatatatgtatatctctgagatttttctactagaacagcatttactcgacgttctctcacatagaaaaacaataaccctaacagaagaatgaaatctcgaagctcaaatggtctggttcggcacagagagagagagtataggtttatttatacgagagcgtattttagttctttcttcagagatataaacaatatacaggcgcacatagtgagttttcctctacagcctacgccgttacactttttttattccgaaaatacccttacactcttttacttatttacactattgccaaaagaaaaagtataggtatctttgttgggggaccattttgatacgtgcttctacatattgtaccgtagatcaatcaaatttgtggagtagtcatgaatgtacaatacaataaagcagcaaaggaatagtgagtgacggaaggctgttgtagaggaatatgtcctcgttcctgtctttcgctttttcgtgatcaaccggtgaatgtattattggccgttggatctattgtgggacccacttatgtgtggagatctacggtaggatggtatgtatatgaaaacgtgtttgaagaactggtgcgatggcagagcgtgacatatgtatggaggggtgatcgtgtcaaagtaatcaataattcttaaaatctaatctgaattttattatttaaactaatgtgagagagggacgattgagtaaagtacacatattttagactaatgaggattgttaggatttttagtataaatgtttctataattatatgctgtttggataactaaaaagttttttttttaattaatttaataatcaagttagagtaaggattccttacccaaaaaaaaaaagttagtaaggattgtgacacatttaaattacacaaattttatatttaatgatgtatgtttacttataattataaaattaaaaataatgtgatttcaactcaaaattatttatggttaaaaatgaagggaataaaattaggaaaaatttataaaaatactgtgatacgaaattttttgttttactgtatcagttttacaaaattactgtat

SEQ ID NO: 36291 - DNA, 9832 bp, Cannabis sativa
  modified_base (42)..(74): a, c, t, g, unknown or other
gtgaaccatgcaacataaaacgttatttctgatctttattannnnnnnnnnnnnnnnnnnnnnnnnnnnnnnnnatttagggcagaaaacccaacactaatttgtgtcaaagtgaaattttaggaacttttgccgcaaatttctctagaaaaatttatagctagagcactattcttgcctctattatatagttacttagactatttttaaaatttgtgctaaatttagcataaaaaaatgagtttgtgttatatttaacccactatttacaattgtggttcaatgcataagatgtaaaataaaaaaataataattgattatgtaaatgatcatttaatattttattgagaatatacaaaaattattatttttttaggctaattaggatttttgtcccctcaactttgatatgtatcaaatcatactccctgaacttttctagcagttaaaaatttcccttaaactattgagattgttggatttaaggacttctgtcaaatttcattcaatttaactaattcggtgattgtccataaactaaattatgctcatcaaactttgatatctaccaaattatgcctcttgaactttgacatatgccaaattataccatcacaatctcaatagtttagggaaaaattttaatagtcttcaaagttcagggggcatgatttggtacatgtcaaagttcgggagacaaaaatcctaattaacttttttttttatccttttattatttaaataatggtattatggtaaacaaatagggtaaaatttagtaaaagtgaataaattataataattagttgcattttgataattaaaaaaaaatagcatttattgtggcctaagtttgacacaatgctatatcttgtgtcaaatttggcacaaattttagcatatacaaaatttaacactttttagaacaccattggagcaataatttttcttaagtgtgctaaaatatatcaatacactacctttttggcactctattagagatactcttacattctatctgttatcctaaaatctacacaaggtgacatggtgtttatttgggtgacacgtagatcattctttagacctagacggaggaaaaactcgttaaaatgtcgttatctatagctaaattatccatgaaatgttacttatttagagaatatgacaaggtaccgtgcagggtaaacaataccctccaaccagagtcgtttttagggccattccacatatgctacccatggtaaatgcggcactaacagcctcaaaaacactttctttttatttatcaattaaattcctatttccacgggatttttacacgcaattgttgtattattaaaagtaattaagtttccttatttatctattatttgttttaggaagctaaattgatataattatttcctataaatagtggagtcatttcactatttagggatctagaaattatttattcaatagagcacttaagctgctaaaaccattgtaagagcttttgagaaagatcaagaacttttttcttctgttctcacaagtcaatacaagtaaaaagggagtaggctattccaagtatcgtttactctgtggacagtgtcctcatcctagtattgtttactcttggcagggtcgagatctttttccaagtggctgattcaatttttgaattggaatcccgatttctgattccaatcattaagcctattgacacaggtggattgggtggcaattagacgagtgatggcgcaaggtgaattttgttgggaaacccaagaggattcaaaggtcttatcctaactcggctcactgaaccaaacattttcaaaaaggaaacgcttggttttaatatgagagggcaatgagagtgtactatcagagtcaagaagtaaagctcgatggtctgtgccaaagaaatctttgtgttgaaggctaacgtgggggaaatcgctgaaccaaggtgcattagcaatgcaccaatataagcgctcctggatgttattgtttttcacattgtgattattccaggtgaaaatggggccaagtggatccaatggggacatgttaaaatgatctaaaaaatctttcaaactgttagagggtcccctattgggattaccacctatcttatcatccatggtaaggatagcattaaaatcacctatgatgatccacggattgagataataggattgttattgcctattttatgcaagattttccatgtgtggattcgtcggttctcattgggaaagccgtaaaaacaagtaagatggaaaggaatgaaaacattagcaaaggatgaaacataacaatcaaaatggttcatggattgagataataaagataaaaccacatcattgttccaaagtaagaagagtccccctcctcttcctaacttgggaaagaatagtttccataagaaataaaatattaggattacaaacattggtgagacgggagagattacggaatgcatgatcactcccgatgccacatgcattccaactcagcagcttcatggctataagcaggcctgtgtgctcacaagtcctggctctaagaaggtgatctcagtttcagcttggttctctaatctagtatgcttgatcaataccgagtttctccattaatcacttctgcctatctttcgaaactctctttgcctttggaagagggtgtccttttggtgcttttggagctttttggggtgacaattcctagttggaaggagaggggtagaacttttgggttgctgcttgtgtctaggagaggtatattagttggtagggggacatggtagaatttagagcttgtggattttgaactggtggagctttgggaagtgttggatatgctcaagttggtggttttgacagtttgttggtcatggagtaaggtcgtgaaggttggtggggggttcattggtgtttgatggttagtttcttggctctgaaggtttttgttcatccaaagggtggtgtctggtggttgttcttggttatcagacctgtacaggccatcttgttgggaaaggttgaaagctgtctgttggtcatttggttgttggagtggaagtgtaagggtggtttcagggagtgagacagaaacattactagcagggttggatgtcataaaggtggtgacagagggacatgaaaaatgaatctactcaggacaagataggagaggattagtagaaactttaactttaccctttatagtttatctatcatacctgagatacggtggaagaggggcctcatcacaggctttcatatagtccatgcagccattgttgtagctatgccccatgcatccatagaagaagaaaatatcaagtaagttttcatatttgagttcaagccagaccactttgttaataccggtaaagttgataaggatgcccctaggcagagggagggcaacatcaaccatgactctaactcgaaagtagggtccccaagtttctcttagggaaggtctacatatttgtaggaggggccctaagtttttacaaaaccagctcagctaacttctcatattgtttgagaaaaggagtgttaaaaaacttgaacccagagtgggagcttgattaagctatctccatttagagcatccacagagttcgggatgtccatgagaatagtgttgctcagataggtccatggttgttgtaaaagaaccctacgccgctctcctacgcatccaaattctaccagaaaaagtcccttagttcgttcagtgatggtgacagggaatcgggaaatgttgttctaatcctctgtcattttttccataaaaacttttttgttaaaggacttgacagtatgaagtttggcatccagaaagatatttgtggcaagggcatctgggtcagggacaactaagggtgtagggtcgtggagggtgtggactgtactctctgtatctgtaagattaagggccacagataaagaagaagctaagtcatccattgaaagagactggaatttgcacgatggtgaaagggaaaaggttagtgctactttaggtttgataccagaaaacttgaggtcaagtggtagaaccgaaaatggtaaatttccttttatataaaaaaaaacattagtcgtagcaattaattggggagggattagctgcacatcccatcctaaaattgtagtgacaagatcactaacagtcttattcgcaattaatgggaaactaaaaaccatttgaaaattatagatgtaatgattaaaaaaattaaggggaggagtgtctaaattacctagcaggagatagttatacaatcggataaggggaaattaatgcaaaaacacccattaaactataatctcatgatgagataccaggcatgggttttggatttgacatggagagtagagattgtagtatggggatgtgtacctgcaagaacaccattaatgcattggagcattggcgagagaactcagtcgagttgagcttaggttgatgtgacagttgtggttggaaccgaaccgatgatcggagttggaagaggaggaggagtcaccagagcctcgggatctggaactcggagagggtttcaccatgggaaaatggtttgggtttgagtgtgaaaaggaaaataaagaagttgccttgtacagttgcatgttgagagataaagaagagtccagaaaagtaatatgtggtctttcttttgtaaatttcccacacattagcacttagcaaataaactctatttcaattcataatctgatcgaaggtgaatattattgttagtttatttgatttttaatcattttaattacgtataagtaaacgtacattatacataggaggacatttaatgatatatttagatgagtttctccctgaatgtgaataagtaattataatattttgtatgaatggagatggacacttcattcaacacaagcaaatattttttgcttaaaataaacattcattaaaaaaggcaaaggctacccaaaaagataaaagttttaagtgaaaacaagagattcacctcctgaggataaataaccgtaaaaagaatgagcagagcatgaaaatttgcctattgatatataaaatcatttgctatcattcataacaagtcattttaactactttttatttgatatgtaaagtccatcctagttagtttcattaccaaataccaaaaagctagacttttatatgcttttaacgccgtgaagttaccgttaacgaagaacatgcctagaggaaagggtcgctagagccgtcaactcaagtggcgtcagcgccgctagctcgtcctgcctctcaaagccgcgtattagcgggtccccactgctggttggtcccagcacatcaaccaaacagttctaaaagcattaaatatttttaattatttgaaaacaaaatataaaatcaattttataaggccagtttgggagtgttgaggtagcagaactctcatggcgtttttccgttattagtttattcgtacgtatccctcgttaagattctgggtatccatcaaactaatatctttatgaaaacagctgttttcttcggttgggttgggtttatgggattggtacagagttagagtatatagaggtttgaagtttcatacctttttcttcttaaagtgggtcctccatcttttctgcctctgtaaatgacagcctaatcaacagcctggaaagggtggccatagccgcaccaaatgagaaaaatctcagctttgtgggattcttcatttcatgttgtctcaactgggttttacttattttttattcaaggataacccaattctctctctctccctctctctctctctctccaatttgtttattgttttcggatgaggtaagaattctgagaaaactaaagttcttgtcttctttattttggattactctaaccaaaatagagtgtctggtgctgttatgtttgagcaaagtttgagctcttttattgttttcaattgttaatgtttcttctggcattgagttagatctggggttgctgaagttgggtaatctttgtattacttattttgaagaactgggtggttgggttgtgatggtgaatttgagggaatgtgacttttgttatttgaaatcttggtagagtggttgggttttggttctggaagttatttcggttgttgagttgggagcataggtattctattagattttgttgaggatctgggtttttaagatattagtgaaaatgaagctagttcaatggctacctgttgttctagctgttgttttgttgatgggctgtaggtcatatgccttgttcactccccttgataactacttaataacttgtggttcatctggaaatgtcacctttcaaggtcgaacttttgttcctgattctgaccattcttctattgttctaaaaagtggaacttcaatagttgctacctcaaattccggtgccccttccccaatttaccaatctgctcgaatattcacgggcattggttccttcaaatttgacattgaacaagaaggccgccattgggtccgcctctatttctttcctcttcaaaaatctggccaaaacttggcctctgcctcaatgagtgtagttgctgacgactttgtgctcttgaacaacttcagtttcaagaactacaatggctcttacatgttcaaggagtatgccatcaatgtgacctcagatgttttgactctcactttcattccatcaaatggctccgttgcgtttgttaatgcgattgaggttgtctctattccagattctgttcttcctgaccaggcattggctgtcaatccatcttcccctttcagtggtctatctggattagcattcgagactgtttaccggttaaacatgggaggtcctgtgattacttctcagaatgatacccttggaagaacatgggaggacgatgagaaatatctccatgtgaatagttctgcagtgaaagtttcagtcagtcccaaaaacatcaagtaccctgctgctgtcacacccgagaccgcgccaaattgggtttatgccactgctcaatccatgggagagtcgaatgttaccaatgaaaactttaacataacttgggtcttcactgtcgatccaagttatatgtattttgttcgggtacatttctgtgatattgtgagtagggccttgaacactctagtttttaatctctacataaatgatgatgctgcacttacaagtttcgatatgtcatccattactggtgatttggatgtgccaatgtacaaagactacgttgcgaattcatctggtggttcagatagcttgacagtgagtgttggtccagattcagctgctgatgctactgatgccattatgaatggattggagattatgaagattagcaatgatgttggaagcttggatggccttgcatctgttaacaaaattcttcctagttcaccttcaaagcacatgaagactggagtcatagttggttctgctgtaggagctgtggctgctgtggcattaatcggtctttgttattgctgcttggcctcgcgcaagtcaaagactactcctaatcaaggacatccatggcttcctctgcccttgtatggtaactctcagaccatgacaaaaatgtcaacaacttcgcaaaaaagtgggacggctagctgcatctcgttggcttcatccaatctcggtcgtatttttatgttccaagagatcctagatgcaaccaacaagttcgatgagaccctactacttggggttggtggttttggtagggtttacaagggaacacttgaagatggaactaaagtagcagttaaaagagggaatcccagatctgaacagggtcttgctgagttcagaaccgagattgaaatgctatctaagctccgccatcgccaccttgtgtctcttattggatattgtgatgaaaggtcagaaatgattcttgtatacgaatacatggcgaacggacctttgaggagccatttgtatggaacagatctaccacacctatcatggaagcaacgtctagaaatttgtattggagctgcaagggggctccattatcttcacactggggctgctcaaagcatcattcaccgagatgtgaagacaacaaacattctcttggatgagaattttgttgcaaaagttgctgattttggcttgtcaaaaacaggtccttcacttgatcagacccatgtaagtacagctgtgaagggtagctttggttaccttgatcctgaatacttcagaaggcagcaacttacagagaaatcagatgtgtactcatttggggtggtactaatggaggttctctgcactagacctgctctaaacccagttcttcctcgggagcaggtcaacatagcagaatgggcaatgacatggcaaaagaagggaatgctagatcatatcatggacccaaatttggctggaaaggtaaacatggcttctctcaagaagtttggcgaaacagctgagaagtgcctagctgagtacggtgttgacaggccgtctatgggtgatgtgttatggaatcttgaatacgctcttcagctggaggagacttcatctgcactcatggaacctgatgataacagcacaaaccacatctcaggcatccagttgacccccattgagccatttgataacagtgtgagtatgattgatcggaactcggtgaccgacgatgatgcagaagatgctgccacaagtgctgtattttctcaactagtaaatccacgaggaagataagaacaaaacaccctttcggatcaatgatcttgtgcggcagtggatgtcataaaaagatgtggttgtcatcctggcctcaagagtgcttggaaaatatgccgagaaatgaaggttatttcttttaattattctgtttcgatgcctcattatcttccatgattattttgtaatatatagatatggctggtgccaattagttcgacagaaattgcattttccatttccttattagaattatattgttgtctttatacaatttatcatacctcttaagtttcccagagatacagattgattgtattaaccttcattatatccacgttcaggaatgagtatagaaataaagcagcatttgtgatcaatgagtataaccatttcatgaccctttcagtatgttgctctacattttgttgatagaacatttaaaaagtttctgttgaagacaatttatatcatggaatcgatgaataacaaggaaattgtccaatgtccaaataaatgactagaaaatcatatcttgtgtttgagtatattcaacattgatttataaagatgccagcctaagccatgaaatgctagcacaataaagaacgaaaaacaattctggcccaaaagataatggcaaacactatacatatgatatagttgagttgagcttgagattcgctggaagcaaatataatttcaaaagttgactttgtttgcactatgtaactccattcatatgctttaaaatctacatagactttgactcctgaagcaatttttttttttgagaaagactcttcaagcttgaacggtctaacatagcggtacaattaatggcaaatccacaagacacgtaaacggtctaacatctacccgcgcgattcacggtagatgtttaaaattttttaaattatattattatatatatatttttttttataataactaagtaataaaatgtagaaattacataaaatatgggaataatttaaagatttactattttatggcacaataaaataatattaatggtgttataaaataatataaaataatataaagtagataagaagaaagaagaagaagatgaagagagaaagag

SEQ ID NO: 36292 - DNA, 2635 bp, Cannabis sativa
gtaataacatcaactgattgccttcttaattgattctgttagtgctttggtcactctcctcagtggagctaaacagacatgctgttgagttggaaaagaggtcaattcagctatcacttgaagaaggtaaaatatcatataattttttctgttttatttttctacttaacttgctcgacatatctctttttactaacagaaaactatgatgataagaatatagagaaccccaagtagtcattatactcataatttatagggacccctattttaaaaattcactaaaattccaatgtttgtgaggttaaggtggatgaccatcaatatcaggagaagggagagagaaaaaacaaaagcttaccttgtgacagaaaatggtttggttatattcttcagaaaatttagagcgagaacaaggaagttcacaatcatatgatgcaaatttatgattcacctttccttatcctatttttgtgaattaatgcttacacgggtgctgttatcttgacacccttgtaacttcgttagctgtcaattgattggcagtcataatagtcatctaatatctgtgcgttttcagcaatcttcgtttcttttatggcatcatatcctatttgactactgaatacattaacagaggcccgaaaccgtctacttggatttctctttaagtagaatcagtaacttttaatctgaatcaaatttttgttatttctcggcaataactacggaaggccatgttttttttcttaatgctttgttttaaaatttgagcagctaatctgccttagttgtacagcggtatatacatcagttacaaaaaaaactctgttgattatatatctattttgatatgctttgattcgatattgatccttactgcagcaaaagagcttcagcgggttcaagttcttaatgttctaggaaaaccatctgtgtcatcctcaactcatcaaaaccaaccagagaagggagtttagttccagcttcagccataatgtttgctctctagttgatcgaaacgtctccattttgtttcttctctcctgggctctatttttctccaagttctgctcctgctgttatgctagtatagaagatgataaacatttgtcatgttgaagctgctgttgctcactgtatttacttgtaattaaggtgaaatttcatagaaatttaatttctcatttgaagtttgcttttaagtgttaagctttcatgcaacctttgttagattgagagacatttcaattagtgtgttgatatgaaataactacagattgtataggtctactgcccataaactctttatttgaaaaggaatgcaattcaaacttagttacctcattgtgtaaagactccaagaaccctatcaaaatcttataatatcttttttcatcaaacaaaaagttcactaaagggttttcgtttccttaattttaactacgttaaccaccaaagtttttggagcaaaattgtctgtcccagcttcttaaattttgacacctcaattaaaatgctacatatgcacttaacaaattgagcattgttattgggtactatggtatctaccactttctagatgtgtcgttttacaattgactagcaatattttttaaaaattattttattaaattatatgagactcgatacgtaattggaccaataacgatattgatacgtaggagggtgttaggtactactgatgtcttttttggctagcgatatttcttaaaagttattctattaaattatatgagactcaatacttagttggatcaataacgatattaacacataggagggtgttaagcactactgatgccttttagcatttctctaacagactttacaatagggaaatactaaaaggcaatagtggtacttagcacctttttatatgtcaatattgctattagtccaactaagtatcaagttttatatagtttaatataataacttttaaaaagtatcgctagtcaatcgcaaagtaatatgtttagagatgctagacactactgatatccaataacaatgctttttacagtataattttacaccactattaataccttactgcaattaatgttcaaaaaccttttccaatttcatttttttccagtttagtcagctgcgtaagtttttctttccattttggttagtaaaacccaaagtagtttctctgccctcttccaaatacttgcagacaacactatagacaataaaacttgtttcaaacttatttagttgctactctttgttcgattttatttatttactataaaacattaattttgagccatatatattactatactaggaaccatatcatatcgtttttccaaaaaaaaaaaaaaaatcatatcataaatgaaaatctgattgttcttatgttttttagctacttgtaggccttaatattttagaaagatactcgtagactctatgcttgtttgttcttttgttgtaacttcactttgtttaaggttgcatttcagcttctctcctatgttttcattcagtataattttggtcccaggatattctcagcaaaaaaaaaaaaaaaaattatgaaattacaagctctgtttttcataggagccaaagtaccaaacggtgactaaaataaaattaa

SEQ ID NO: 36293 - DNA, 3155 bp, Cannabis sativa
ttatgttacaaatcgtttcatcatctcgaaatttctgtcagggtacttgtggagtccatggatgatactgatgctgatgcactgaaaagtgcagctgagcatctgattgctacattacctgatccagctgctgtagtactgggctcgtgtccaggtgaaggaaaggtcagtttagttgctgcattcactccaggggttgtggacctgggagtacaagcagggaagtttatagggcctatagctaagttgtgtggagggggagggggtggtaggcctaactttgcccaggcaggtggaaggaaacctgagaatttagctggcgcacttgagaaagctcgatcagagcttgtgtcaatcctatctgaaaaggcaagctaaatcttttcggtgctttatgaaattattggtgtcgattgtcaaacttgtgaagtttactcaaatgctttgcttttgaatggagtccaaaacacgttgctttgacaaaaagagtaaacgacctagtaaattataccttcactatttcacatacaagatatagaatataacttgtgaatgtcacttccatttcccccttcattgatacatgtgttggttctagagaatagatcttaactagccaatccatcattctcagctccattttgtaaaatttctagtctgttcttacaccctttgttgttaaatccattatcaatttggataatggatcacattttcttgactgcaaaatgaaatcgtgtacattttttatttattcatttatgttaattaagttgtgcgtattatttttgctgttctgacttctgaggagacaaactgttattgtgccaacgttattttgagttaaatactaagaaaatatatgcgatgcatgtgtaataaattcttatcttccgtatgtttacaatttgagacaaaagaaatatttgatgcatgtaatagaatattagattgaacagacaaggaaccttattactatttattattcatgaaccgattttgttgcgtcaaagatatggttcacatgggccaactacagagcccaaaaatatctgttgtctttgtctgggattgggggttatcccacacacacatcatgctatcataaaacgatttatgccgtttttgtactaattgtatttttctagatcaatttcctgagtagtggagttaccaataaccaacggctctaatcccatttttagtgctctcctgaagattttaccatgttcagacatctgtcaccaatagctttaaattaattatgcttattctttgtgataaacccactaagaacccattggatccaaatgatgaatcaatgatgcgaatttgcccctccttttctagattttttttaataaatatatatatatatatatttatatatttatataagtaaggggattaaatactatctttgagtactagatgggggcggtggaaagtagtagggtaaagaatttatagaaaacccgttttttcattctttctaagaagtaagaacaaacattgggctcatctaggttctaacgtgtcgtgttttagccatttacttatttacaaaacacaatatggtagctccatccatacacagctacatacaccaaaacacttgcaatttacataatttaattcttgctttccacctctcaaataccatcccattagccaaaaagataagagttattactccgtcattaaataatatgtatatataagccaatatactaaagtggggtactggggttttagtaggattactacataaaagtaaaatatgttcagctattttatttttaatttcattctcgtttctctctcatacaacttagctgtgacaatagtttttggcaatattcttgcttgacaagtgggtcttgcgtagacttggttcttatctttccactcattaagaagcaatgataatattcaccaaacattttattcactacccaagcttcttcttgttcttaggggaccatacgcgtaatcacactaatcactaatcagccatgcaagcacaaacagacaaacccctcttgtctttattattgttctgaaaaaacatcaactttaaccaccactaatgaaaattaataaagaaaccaactcataaatcaaattattgataaaataacgcctcagtcgatccgaattatcatggagttacatcattaaaaggtagtgtgaaaaggaaaacaaaaccgatacaaaagataaagaatcaccgacttattacagtatagtcattaatgaaataaacaaaaaatgacgaattaatacctttccattcctaaaagtaaataaattttgtcacttgatagtcatctaggcacaaaaagctttctttctttcttttatttatgctccatagtccataccataataaaaatcgatatgttctgtgttctcaaacacacagctgtatgtgcataggcaaagaagtcggttagataggccccattttaatttttttcacttttgggccgcgtttccggttttccgctactctttgtctctttccttctcaaacttaaaatacaaatagattcaaaaaataaaatctagaccaaaatcacactcatgaaacaatataataaaaaagtcatagcttttcgttcaaaatgctgacctgtactccatagtccctttcaatccagactacttcccttccactacctatataaacagcatcaaatttccttctttctcacatcactttcttacttacaacaaaggaaaaagaaaacaacggaaaaaaaaaatggctttgttgctttgcttcctcttctttcttattctctcttctgcaaatgcctgtgatcgctgcgtgcaccaatcaaaggttgcctatttctccaaagcttctgcactttcttgtaagaatattagtacctcactccagtataattctttttatttccttttactttgtcaccatctgattacaagtctcaatctttttatgaaaaatgaagtgggcaagtcttaatttgtggatttaatgcagctggggcatgtgggtatggttcgttggccttgggctttagtaatggaaacgttgcggctgcagttccttcaatttacaaagatggtgccggttgtggcgcatgctttcaggtcccttttagctgaatttcactactctctat

SEQ ID NO: 36294 - DNA, 8656 bp, Cannabis sativa
tttatctgcctgaaaatagggaaacctttaccatcattcccattggaagttatcataggtaaattaacattatgcacatgactaatagcattatgcacccatatatatgtatatatattttatttatagcatattttctacatcttgagaaatttcctaaattagctatcagtaaatgagacttgtaccttgggtgtcaagagtgccttagcagaatttcaaagttcactgtagcactagccgatagatttaggagatttttcaaatgtagtaaatatttttgtaatgtatgttagcacaagaaaggtcatcaggaggtgttgacaaaggttaagaaagctgtaaggctcacattgaagaagtctactgagaaatattcctatataattagtaggtagcactgtttgataaaccaaattatattatatgcaaaaaaagtacagatgttgaaaagtttacctttgcgtcccatgaaaagtacccatccttaattgagatggctggaagcccaggttcaagaggggggtttggttgtagagttctctcttcagctaagaatagctcctccaaacgctgtaatgatatatttgcattcacaacctgtcaaagtagagtcatagcataagatatagcagagtcacgccatagttttattcaaccatcgatgaacaaaaaagagaaattgataacgcatagcaaacctcaaaagacacatactagaatatttatgtggtgatgctactaaggctgcccaaaaaagaaaaatgaaagaaaaaatagacattattagagtaaatacctgacttaatagattaggcagcatgttcagtggaaatcgcagcactgcaaagagagaaagtgatgtgaatgcccttgcaggagtcaaatcccctccaagaaacgtaaaaattccaaatgataccaccgttacaacaactgggatactgtttagtataaagctattaaactgcaatcaaaaagaaactattaaaaaaattacagttaagaaacaggacaaatcgaacatagcttgctctcttttagagacttgatcccacattattattataattatttttgcaatctaaatatcctttctaaccatatttatgtttcaactactatctacgagactacaacgtagcatcatgaaattttggcctttaaagataaactaaaacagataattaaatttcaatactagttttcacacatacagcagctagtaattgagctttacgaaaccatgatagctcatcatttcgcatatcttgaacacgagactggaagcttctttcccatgcatagcatctggaacatattcagcaaagtgtcagaatatttagttctgatgatatgaagctttataacaaaaataaaagataaaaaccatacttcacaatatccatggctgaaagaatttcattcatgaggccaactctcttgtcagtgcgtagtaatccttctttggtgagttttctcattttggaaagtataattgtctgttttgacacaaggaaaatcatcttatcaagaatcaaaagggagtatgctgaaagaaatgagcatgtttgataacaaaatatcaaaccaaatacaatacacaacccttgatgctgcatttagctttcactgtttagatgaagaaacagaatttcaaatattagcaaggtagcaatgaaaccattagtgtatctacctggaccgggagcatgagaactagcattagtgccccaaaaagagatgcgactcctaattgctggtatagaagaaccagagctatgataatacgaaatggagatgaccataatccatgaagttgttggcatatttgctgaaaaatattgaacatggcatagttataatttgattaatggcctctggccccaatatattttttatgtgtgattgtaagtatataactaataaaagtacacaaaaaatagaatttatctgtagcatatttacctgaagtgaattagcatctgttgtaatcatatttgttatcttccctgtagagaaattcttgcgactctcatgagtcaatcgtaatgattttctaaatatagcagccacctaaaaagttggcagaattagacactataacataatttacagtagtaacataaaagagaggattttaccaaagttgatctcagccggaaaccaacacgcataacattctggaaatattgagattcggtcaacaccccaatagactgaaaaagttaaaatcaactagtcaataaacaagttaatcatcataaatttactctgttctaatctgattaaaaagatcatttaattttcaaaatgaacacaatcagctactctaatttccttctgttcctatcttctatgaattaaaacatgaagaaatctaaagaaattaagggaacatccaagaaaacatcaaacttcagtataaattttcatcagtgcatgactcaagaaatcagataatcatattttgcaatttcgcaatcacatataattgttcacaaagccaactttaggcattgtctactaattttattcgaaaacttggcaattcatacaaaagttaattataggcaaagtccataaaagtgattaaaatattcagacttcaacttgccactagttttgtacagaagagttccaattttaaccagaaagtacattactttaattgagtaaatgaaagatagaagccataccactccagcaaagattaagaaggcatatatataaccgatccaagctggatcccctcgttgcatggactgcagctcgtaacaagacaaatagaaagtccataattcaaattcaaaaactacactctacaatgcataacacaaatatgatggtaaaatggattgaaacagatttcgtttcacattgagctaatttattgttactatgtcaactatatagcttgattagcttctttttttaaaaaaaacttatgtcaaattatcttgggctaataacaaattatcttcagttccaaccataatcttggtgcataaatcaacttttagaccatatatttttctttttctttttcgctttatgacaggtataacacctgaaatttatttaccaagacaagattaataaacatttacagaccaagttactatattctcatcttgcaaaattagaggcttccgattttaaaattattctcacataaaaaagatgtcacttttcctccttgcattattttttacaattatcattttttccataagaaattaagtattttactttcaaagcaaaagaaaaacatatgcaaacaaactttaaatggaaaagacctcttttggagctacaatattgaaggaaagttttttaggcttgccaagaaaggaactaacctgtaggagatgactcaaaacaacgggccccacaaactgagataggtcatatacaatctacaaggagttcagagcaagattaataagcatcttgagtcagttaaacatgagacaaacattgttttcataagcatcttgagttagagcaagtttcaatcattatgcactctttttcattttaaaaaaatgtagagtttctaattttaaaaacaattgtgacaagtcttagaaagaataacagggaataagatcattaccttgaatagggctccataccaaaacctacatacaacattttgtaaagaaggaaaaaaaattagatggaaataaaattattatctattggttaagttagaaatggaagaagaaaaaacaactactgctaggtcaatacctccctccaagactacgattcagtgctcttaaaagccacgggttggacctttgagattcttcaacccaacatctctggaacctgaaaaatgaaaagcataattcatataatgatattgtttatgaaaaaaaaaaaacatgtataacacattaaaagaaaccaactttttaatcaaagtctcagtttgatcccatgagtctaacttccagacatctttttcagtgatcggttttctataacctttctgcatgagtggggttatccatccgaaatatatttctgcagtagcgtgttataatatcagttaaaggattgaaggggagtttagagccaaatgaagggtaaatatatttctagcaaagacaatgaaaagggaaatatataggacaccataagcattttcttactgctaatgactattttaatacaagggacaccatatgaaatccagtgtttaaacccgatacaagcttaaattacttacttgaaaaaaaattagcatgcctctcaggacaaatattatctccaccaggtagtgcttcatattcagcattgtcaatagactcgggttgaatcacaacataaccaggataagggtccaagtttggaagatatatggcaagaagaattcccaacaacacctatacaagaacattaatgcaatgacacatcaaatgtaactcgaggaaaacaatttaactattcagaaaaggaggccaatatcttgatgtaggttcaaaatgaaatataggttccaacagccttccatcaaaacgttctagattacaaaatgctatgttgtatcatccactttacatgcccttcgaatccaaaactggtaacattcttgataaaaatttgagcgacaagcagtcacttaatcaaggcaaggctaggtattgcaccatttatggctttgactcaagaaattttttctcgtggactgtcattgtaagtgtagtgtacttccattttatcacttatatgattacttaagactaaggcaagctgggttctcaagaattttagggtgtggcaaaacacagctcaggttgcacatcacttaaaattttgatggtaaacaagctcatgaataagccaaattctttgccaaataaaagaaaagaacaaagacgagaggaaaccaacctggacagggaccgtgcttatgtagagatagattgcatatctgtaaaataaagatagagcatctataagcatgtattttatctatcttatatgaattaaaaaaagatcctccagaaaatatttagtgcttccaatttcatcactgtcagttgcataacaattcaagggaacattaaagcaagaaaacaatataaaatatcctcagtgcagatatgaatactattgattgctcatattcacctccatatgcttgaagtcaaattaagaggtcaaactatttgtatttcacattgtgcgaaatgtatattattcggtgaatgggaaaagaactaacccagtgtagtaatccctaactgaaaagataaggttgaccaccacagcatctgccaccaacacataaatgactccaaatctcacataccaccggaattcacgaatataaactttagtttccagtccaagcataaccaacaaggagccccaagcaagaaattcaataatcaaagatgttatctgtgaaaaaagaggtaagttaaattgcaagtgttagttatcaacattaatctcagtgtgacatataatctctgctagaaatgaaacaactaccaaactttaaatttcactcttccaaacttccaaaagtgattgtaggctatcaactcagaatttgaagtacattcttatatataagacaaaataattcaccaaaatgactgaaaacccacctcaaaaggagacagatcagtcttaccatccagattaaagagtgaaatatccaaaacccatcttagtaatggattggcagtggtgtatgcagccagcaaacccaacaagtaattgtagtaatttgacctcaaacgaaacctttgtgctttggaattgttcttgattagccatattcgatataaacagaggcccagaagaaccaaatgagaaaaggagtccaccaaggagtcaattgcacaaggtgtatacgaaccaaaagcactgtctactagtcttccccaaaacccataagcttgtggctgacagtaccaactaagtggcttaaaccccatatttgctcctcttcaaaacttcacttatgcttgctaatcactatgtgttcttccacataatacacttcctacaacataaatcccatttccacaattaagactttgtaattaaattattcaacatatatagaaataataaaaataatcaagtgggtttcagagtaaatataacaaacagatagcaaacactgcgaatcattaattcaacaagtacacacaattcagctccaaaaaccaaagacccagaaaccattaagcgggaaaattagttttttttttttttgttcaaacattttcccatcataattctcagcatccaaacagtgaaaactaataaaaacagaataatcaatgataaccgtacctttgtagatgtagatttcttctgttgaaatgaacagagttcactacagtcctcacaacaacaagtcacatgcatggattggatactgtataatatacaataatataaagacgaccagaccagactttgcatactgacaaaacaaccgaagaaaacaaatttcagaaaaaaagtttctaaaaatgagaaacaaaataataatgctaatgagaaaaattatataacgtcacggcttacgtaaattaaacctgcaaaaatatatatgattaacattttaaaattataatgcatacaggcaatttatatataaattattatgattattgttttgttggtgtaattaaatataaactatagaataattattataactttagctttggtggtatcttccactaataataataaagtttttatatattttgaattattaataattttgagattgcgttgcatgtgtgtgtagtataggagaaaagacaaatatagatgtgtaaataaattataaagaattagaaaagacaaaatgcttgaaataggctaataatttttgaaggaaaaagtgactctctctctctctccatggaccattattagtccatgacatgaccatgaggtggtcactccaaaacactctgcttaattttttctttcttgaatagggactctatggcaaattggaaccactagtttgtttctatgtgattgaactctacaagggtctctattatttatatttataggtatatttttttttttttttgttaggtatattctatttaataagtgaagttgagctgaaaagcttatttcgaatatataaataatcattaaattagtaaaattaaatacaattggacaaaaattattaaatttaataaaaaaaattattaaatctaataatttcaataatagttcaaaaaaaaatttaacagccaaaaaaatttaaaatgcataatttaatacatattaaaatttaggagaaaaaatcataattaaccttgttaaaatataatttatcttgtaaaatatttactctataatagtgtgccaaaagttaatctaaatttgtcatgtagtaaaagttatctaaatttatataacaatatgacatgatgcaaattttacatctttataagtgcacttagggtacataaatcgatccaatataattataatcgactgtcaaatattagatatccaattgtaatcgaaacagattaaatattatttttaaatatctaattggattggatttgatattcgatagagtgttcaataatctaatacatctaacattcaataaactaatttgtattttcatttagtttgaatgagtaattagactttatattgttatatataaaatacatatgaatatatgaaaactaacattaaacttactctttttttttatttgataaatcaaattcaatccaataaatactagataaattagggttgagatgtagaataatcctaaatttagaaactaagtgagtagatgtctctttaatttttataaatatttagcaaaatagccatcagttaaaattttaataataaaattataattataaccttgaaaaatttaccctaactttctacctcttctcagtctctcgtgtcaaggccaaaagtctcatctccttcttctctctcggcaccgataagtccagctttgtttctctctcgcctcctagattttacactatgatatatctttattatgggctatgatatattaagaaataaaaataactttaaagagtggtgtattatttctaatttgtggtgtaatatttttaagtgtttggtatagttattttgtacaatagtatatcatttttatgtgtaatagtatattaaaaaaaactaaaatgtaatatattagtttaagattttagtatattgttttaatgtgttatggtatgttatgaaggaaaaaagacgtaaaatattagtttaagtttgaggtatagttatattttactaaggacaattgtacgtttctatgttcattggtatatcatgaaggaaaaaaaaaagaattttttttttcaaatatcaaattattttttttggtatatatattttccactatactggtagtatattaatttttcactatagtatttctatttatgattgtagtatatagtttttgtatattgtatatcgtgaaaaaaaaaaactcatttaataatatattaatttaagtttgtggtatatctatattgatcttagatatatcgtttgtatgtgatatgataaggaaagaaaaaaaaaattattgaatattatttaagtttttggttttttttttttt

SEQ ID NO: 36295 - DNA, 2859 bp, Cannabis sativa
  modified_base (27)..(52): a, c, t, g, unknown or other
gttaaaccaagaaatgccgttagatannnnnnnnnnnnnnnnnnnnnnnnnnatatatatatatttatataatagatactgataagttgtacgtacttgtaccccatgaaagaaaaactggcttaattgctttagctattcttaattataagaaaaaaaacacaaagcaagcatatcttcgtttcccttgatcgataacaagttaggtaccaccaatgaattaacaattatatgcaatgtgcatatggtcaaagaaaaacccaccacacacatattcaaaaattcaaacatcatgattcagatttcagattacaatcatactcggcataaactttcttaataaacttaatacatttgaaagtgataaacaagtgtattaactattatttgttgacatgggataaataagtctcactatgaggtgaaagtaaagttgtgcaatcttatcctaggataaagtctattgttgtgtgcagacagattaggacatgtccaatgggttaacacaagtagtttccctattagttccacataatacattacatttaatcaattacaattagttttatttaccctttttttaatcaaaattttttaaagtacgctcactttagaaactttctatcatcagtctcttttctcttatatgtcacgtcatacatctgactcataattcttttagcaacaataatagaccccgcccttatgccatttttctagaaatagaatgctacattggaattttgtttgacacgtggagaacgtcgttgcaaagataacaatggaagactaagaaagtttcttacaaggcattactttccattcacatggaacacttaacacttaaaagtagatgaaaagggtaaactattaatagaactcgttgagagtttttaccgccaaaatttaaatttcaggagttaattattatcgaggtaaaaatattgaatattttgccgcaatgaactcaagaaaaactcaatttattgatttcttttgttggggatcatgttgtggaaaaaactaagaaaaagtaatataatgagctggtgaagactaacatgctcttgcaaaatttgaaaccacacttaatttgaaagggattggtggaaatactcctgatgagctcagagtttattagaagttggttaagaattaagtagtttgatgttgttctgttacaacagatttttgtttgtgttaagaactggtgtatatatatatatatatatatatatataaattgaatcatgtataaggaaatacaagagatgcaacattgatattaatttagtccttgacaccacttcatagtgatctcctcttaataagcttcaaattctcattttgctttcgaatcaaataaaggaccaaaataagtgatatatactattatgtcattaattgtatagttaaaataaacactttttagagattaataagcaaacaaaaaaattattatcttatctcaagctcaccttttgtttagattccatttcttctaattatgataaatttaacataacaaacacatcatatataagtccaacaagcacataatgcatgctcattcatgggtgatcaagctttattacaacattacaatatttttgatttagtgtcgtttcaaacaagagagataagatggttaattaatagctacaatacaagaaagccaaaaccttcgttttcagaaaataataacaaaaaaaagaagagaaaaaggctaacctgaattcgtaacatgcttcgtacaaacgggacaattccttggaaaaatagtgcaatctcagccactctttcatgtttttttttttgagtgtagcgtaatggtattttacaatcatttaatagcttaatagcttcaaggtcctaagttcgaacccatgacctctccctttttcccatcccctctcaccactaagctagccactcttccatgttgatcagtcacaaatggtgatagcagaaaattagaatatattttaggacatatttatactacatctctttatatatttatacttacatgtacaatagatactactaagttgtagttattcttaattctaagaataaaaaaaaccacaaagcaagcatatcttagtttccactaaattattaacaataagcgtggtcgaagaataacccaccacacacatattcaaaaattcaaacacatatcatgatattcatattacaacttcttatattattaccttaatttgtttacattatttgttttcgtagatgagtttatttgatctgggttcttcttcaatgaatctttcttttttatttatttgtttcaatttgtattacactactaaaaaaattaggttttcctcacatactcatcggtctttaagactgatacctattcgaccgtcgaaaaattaagtagaataggctttagtagaaaaacattaaaaaaagtttcttctgacactggaaaatcatcgacaatacaaagctgaattattgacagttttgcaccgtcggggattcctctaaaacccagtttcgtttttaagcacgtcacggttttcaaccgttagtaatacaacacgaatgtttaaaaccaacgggcattctcaactatatccgtcggttttaaacagtcacttacttttattcactacaaaaaatcttacttaattttagtttcaacaaaacttgtgactaaaagtgaaaaaattatgactaatcataaattattattcctatgtttgtgattaaaaggttcttggctaaatgtattagtcacaaaaatcacaattatttgtgactaaatgtgtttttagtcacaatacttgttgtgactaaacctaaatgagtgacaatttgtatctaaatatt

SEQ ID NO: 36296 - DNA, 12370 bp, Cannabis sativa
gtttttggcaatggtattagatacaacacgacctgaatcagttcagccagaagacattaaagtggtttaagaatttttagatgtatttcctgatgaacttctggatttacgaacgcaacgggagatagattttgttattgacctagcacctagagcagagccagtctctaaagcactttagagaatggctccagctgaacttaaggaattgaagattcaacttctgaggatgattgatttagggttttctagacccagtgtgtcaccctggggacctccagtgttgtttgttaagaagaaagacagatccctacgcatgtgtattgactatcgggaactaaacaaattaactatcaagaataagtatcatttacccaggatcaatgatttgttcgatcaacttcaagggaagatggtcttttctaagattgatcttcgattgggctatcatcaattgagaatctgagaggaggacattccaaagactggtttccgcactaggtatgggcactatgaatttttggttatgtcttttggactaaccactctgacaacttttatggatctgatgaatagggcattcaaggatttcctcgatatatgtgttatagtgtttgtcgacgatatccttatgtactcccaatcagaagtggagcatgaacaacacctctaaatggttttgcaacgattacgagaacacaagctttatgctaaatttaaaaattgtgaattttggctgtcccaggtgtcttttctcagacacattgtcactaaagataggatcatggttgatccagggaagattgaatccgtcagggatcggccaaggccaaagatagttacagaagtcaaaagttttctgggtttagctggttattatcatcagttcattgagggattttctaggatctcaacgcccttaatagaactaaccaaaaggaatcaacggttgttatggacagacaagtgtgaaacaagctttcaagagttgaaacagcgattgactacaactccggtattagcactaccatcagataaagaagtttgtggtttactgtgatgcatccagacagggtctagggtgcgttttgatgcaacttgatcgagtaatcatttatgcctcctgtcaattaaaggagcatgaacaacgatacccaactcacaatttagagcttgatgtagtggttttttccttgaagatatggcgacactatctctacagagaaaagtgtgagatttaaaccgatcgcaagagcctcaattttttttttactcagaaagatctgaatatgagatagaggcagtggttggagctagttaaagattatgattgtaaaatcctttgtcatttgaggaaggtcaatgtagtggcagatgccctaagtagaaagggtcccgaacaagtatttagcatggttacgattttacctcagctagcaaatgacaaggtcagatcaaggattgagtttgttgtgggtaaacttaataatttgacactacaatcatatttgttagatagaattagaactgcctagctagttgatcccgaatggtgaagattcgagaagaagttttatctatttaagctaaagacttcacagtgtcaggtaatgggatgttgttgtataaaactagagtttgtgttccaagcagtgtggtacttaagaatgaaattctcgaggaagctcacaccactccttattcattttatcctgacactaccaaaatgtatcaggattttaaaacccttctatttgtggtgcgagatgaagaaggatgtccggggtccaggccgagacatgtttttggttgagtttagggcctaatctggggtccaggccaaggtagcatccagggtctggggttcgaatactagttttgaggtttaggtccgagtccaagctggggtcagggttgggtccaggtccaattcgagtcgggtcaaagactgggtccacgattgggtcgtggtcttaggcccaggatcaggatcgggctaatgtctagagtccttgtcaagatcgaggtggggttggttcatgtcaaggtgtgaaacattgaattatttttctcaaaaaaaaaaaatctaaaaataccttttagaaaatattagccaaacgtgttttgtattttgaaaactgcaaaaattatttttttgttattatttatgaaaatacaattttgaaaacttaaaacaatgcctaacaataatgcagctctactaaagaaacccaacagcacacccccaaagagcgtggcaccaatctcccgaatgtccaaggcactctaggaaaacacacacaccaaagtatcgtctaaaccaccttgaaattcgatgacctcaaaacaaaagcacccaccaatgcaacaataggatgctaccttcgaaacccacggtgatgcaaccaacaaggacaaggaatagccacaattggaggagtgagcacccttaacatcacaacaatggaagaaaggataaccaagaaaaaggagctctccaaccgagaaaagccaagcttattattgtgcatgcccttaacatcacaataatggactcttattgtgagcgacaactaagttttctctcgaagagagagaatgatagagagcttttctttaatgttttaatttcccaaaatttattaacttatgatactaatttataggtttcaaacataattcgtatgattttttttgttttgatcgtaattttttctccaaatctaaaaattcaaatctacaaagtttttttttaaaaaaaaaaaaatggttaaatgatggtttgcgttgatcttgtgattattctatgaaaactttaactttttagaggcaaaacgtgttaaaatgatggtttagtcttgcgttaaaacataattttgaaaccaaaatgaaaaataatagtgcgatattttgcaatgatctcataaaaacttttttttttcaattgttcaacgtttgtccatcaaaatataattttccgctctaaaatgatagtttgcgatgctcccatgaaagttgatcgtagtaacaaaacataatatgcaacgatgatctactaaaacatgatctaagatgccaaaaacgatagcttgcgttagttcggtaaaaacttggtgaaaacaatcatcaaaacatgattttagaggattaaaaaaaatatcaaaataaatgtcaaaagatcatttgcaattatatttggctgatgttgcataaaatttgataaaacaatgagattgcttttcaggtttaaataatttttttatatcttttaaagacctacaaaattaagctcacctagcacttgtatagcgtttgctttgtttatttacatccagcatagcaattgtttcatataaaatgatgatcaagaaaatgccgaagaaatgcaagatatgtcttttgtaatttttccttttcatttaaaggccttcggccaaatatctgttcacacatataaagaaacctttctttactttccttttttttttctgatgctttcgcatacaatttcaatttctctacaagtggctttcgcttcgaatgccacgactcataaccttcaaacccaacattttttttcttaatcattattgggtcatgcagaaggaaacctacatttctaaggcacatgcaataggtgccatctaacacctagaaaaattacaagccaaaattaaaattgaggtgagggggtagagaacactagagctacctatattatacagccaatccctttaaggatttgaaagaaagagcattgtggaagcgactaaaccaagacaattgcatctcaccagagcctgtgcattgaccttcaccttcctcggcgctgctgaagagggtttggtcagagcagtcaagtgaagctccacaagctatattatatgactggcatgctgaataacacacccttagcctgttgtctccatccttgtcacatttttgaattgagatctgataatgcatagtgcaaattcagttttttgataaatagtgtaaattcaggtaggagatagttggcacagactgtatattattccaaattgaaacgaccctttgacaacagaaactaagtatcctaaacagcagggggagggatgtgttccgagtaaatttcagataaatatagaatattacattgtacggtctctttaattttcgattaatggtaatatgaaaaaagaacataggaagggaaaggaaaggaaaggaacttacccagcaggctaaacgttttgcagccgaatcgcagtatttgcttccaaaaatattaaataacttcctagcaccacctggaaataaacgatggtaatttggcatgacaacaacttcttctaattgctgcagtatactgggttcactgggagcacagtgctggccagaactatcactctccagcacatttttgcaaactgaaagactagaaagaagtgtagaactattctggcatgagtaaccggcatagtcagagcagcggaattcacagactccattgtcacagacacctccatgaaggctgcattgctcatcacacacagctgcatgacaaggcaaacaccaatgtaaataacaataatgttatatattgtgctctatcaatggtctactaagcataatgttatatatattgtgctctatcaagggtctactgaatataatgctttattgtttacggaaatgaaagtaaattacccaaactaaggtagaagtgtttatatctgttgaaacggaaaaattatctgaattacctgttgagcagtcaacaccggtgtaaccattttgacattcacacatcccatttgaaaggcaattgccatgtccactacaactattaggacaagatcctgcaagaaatattgtcaatcagaaattattcaaaatcacaaaaatttgtagttgctctttatagctggtaggaaatgagctcacgttcactacaatcagagccatgaaatcctagaaaacagtgacaccttccgtcaacacagtctccattgaaattgcatgatttaggacattgtccagacacaggaagtaagtttctgctacagagttcatgatacgcagggcatactaattcacctacagaaaacatatttaacatatcattaaatttaaatcaacctacatttcaaatcaatgtagatataatacatagaaacaaagatttaccgttaaatccaggaaattgaataggtccaccagcttcagggcatactttccatacaccatcaacagcaacctgaaggaaaaattggattaataaagtaaaacaggattgcagtggaaaaatggtagcaaccaaacagttcttctacattcccgaatgtatcaggtaaataaccattatggtaactatagcaccaataaatgcacaccacatgtattaaaacctccaaaatatacctctaacgaattattaacgcatttgtgctgataacatccatttccttgagtcactgaaccccgtacaaagccagttcttactaacgatgacgccatacacctgtgaggtggagaaagagaataagaattatctaacatattaaggttctcaacataaaaaacactacttgttcaagtgcactagatgttaacctagagttacttccacggacttcacccaacatcctatcaggtgctcgcgcactgttagcatctgtacatgatccatcagagtaagctacaaagtaggtgcagtaatcagctaatgaggactgtccacctgaaaaatataaatatgataagttaacaaaacagcaaaatttagcatcaaggaataaatcacttgattagcagatagcttatataacatctaaattacaagcattcatacaattaatagccacatgttttatatgttacaaggattttgtcacacagtctgaaagaatgttaaaatacaacttatcagggacaaataacttgcagcaaagtataatcacaattgttaacaaataaatataatcaatttatatataatcagatcattgacagaatcgccatcatacatccacggagtatttacctttgttagcctgtgggaagtaacgtgcccactgaggaaggtctccactgtaacttacaatcggacaataaccctcagcctccctattatatgtacaaccagacgcctgagttgtgttgcaatggtaagctcccttccagagattgcaaggaaaggtaacaaagtcagttccttgattgcggccccaatcaaggtggtctgccatactataattggcctggtaccatccactatcttccaacaaagctaatgtcatttttgagaccacagatctagtatccactgaacctgtcatgatctcattcatcattaaccttttttcccaatgtgaacctacaatcaatgaatagtgtgtcaaaatttattactatataataaaaataagtgacggcacaaggatatcaccaagaccattggatgattctttctcgtactttgaaattaaataaaaataataacatcaaatacttgcattcatacaacttatgctatacccagcctagaccaaacaagatcaattttacattattacacgtcaattaatatacatgcataactatcttctctaccataacataagcacactggtcctgggtattataatttcacattatttctatgaatgtcttaaatatctcctcggcataatttacacgatgaaagccccatcataaaacttatgattaaactcccaaatataaataaaaacatgaaaacaactaagtggtttgaaaaataatgtaaaagaaacaaacagtcatacctgatgtacctcgtcctcctccatcttctagctctaaaccagtgaaattcacagaaaatgcctgccagaaaataataagaaataaaaacatgaacatcaatatcaatcatttattgttctccttgtagattacaaataaacgggcaaagtaattttggcaactacgcattcagcaacggggaaaaaattcaataccgcataatgatgtcgtgagtgcatgaccacacgtggaagcaccacacgtgtcacagtacgcccaagcttctcatccatgacatgttctgtaacctgcaaacagaaatagacaatagtttagttttcaccatgaaagaagttcctgtaaatgggtaatgttgaaaaagtaaacactttgtaagagcaacctgactacgccttcttttcctctcatccctaaaatgtgcaaaggcatgggggtcaaagcctagaacatgcataacctggacaagatcacaattctcacttagaaatgaatcattttttttcatattcataattgtaactaaagaagaaaaaaaaaaagtcgttaacagacctcatgtatgagtgttgccgaaagtaaagtctctgcttcagcagtcaaatgacgaggagcaacatttacatggcctgtgggaaagcataaaataaaataaaaggttatgtgctacaagttctaattgggaggcgtaaacaatcaggtcagctaatagaatacaaaattacaaagtaaaattaccagcaattgcacggccccattgatcacgctcacaagccactgcccaagcaagggtattaccagttgtaggccttgttgtcaccaaaagaaccaaatctgcctcagcaacaccctctgacaaatcaacatatgtaataattaatctgtcagcatatgttaatgtaatctctgaggggggaaagtagagagtccagaaaacaaagatcataggtcatggtcaggtgttcataatattaccttcaacatatttacgaggcagttgtacacctccatcttgaccacatgctgaataaccacttaacctcaggttcccttttaccggttcaacagctaaggctctcctgaaccagtctgctgtctgtcctaaagcctggaacagaaggatgaaattataattccacaagtgatcattacgagtttcataagtcataatctatatacacacaaatacactaaaaagcctgtacaacagacttgataaaaatgacttaagaaaacgtcaaaagagcaaatgtatgaaaaaactgaagaaaactataataaccatcccactgttaatttaagttgtgaaaagcttgagaataaataataaacattgaaaagaaccaactagaaataaaccttgcgaagtcgatgccttttgtcgtcccccgctatatcatccaaagtgcaattataccagcagtcaccagagatcggaggatctccatgaggattgcaagagggagatccaggaagagaagacacagggggctctcctagctggttaaaaacaaaatcaaacaaaattaatataaaatgaaataaaaggaaccaaaatcagttatacaggtttacatttaatagccacatatacactcacagatttttattgtaataaagatcataaaaactcactttgacaatgtcaccaatattacggcaatctctatcaggtgaatggccgactgcatcataatttagatatatcctgatgggctgtttagcatccttctgttgttctaatgactcagaaataccaagcagtgccctaccattacggtgaactggtttcagtatgcctgactgatcataaacttgtggggtaacagtgtatactttccgaccaggttgcctcctttgttcgactatttggtcatgaatgcacgaatgcgacacaatactttcagttcccttttccggggcttgccaatttagtagtgggtgttccgaagtttttgcatcagtagacttcaagcatgaaaatatcaatacaatctgaagcaaaaacaaacacgaacccagcatctatgtcatttcaattttcagtgaagggaccaaacaagaacgatgttaaattatagcgaaagagaaaaaccagatctaacaacagtagactgaaaatagttaataatcagagagaagtttaagaagtcttgtttaggaaccaataaaagatgacccaattgtccgatttctaaatgttaaaactcaattattagccaagaccaaaccatagatccagctatatttttaaaaaaaaaaaaaaaatacaaaagacgtgttaagcctagaagggaaaattataatgttggaagaaaagtaaacaaaaaatatataaccaatttctcaacataatctgatcaaaaattagatttcataagatttaacagaaagaaacggaaaactgttcagaagaaaaaaacttgggaaagtaaatttctgtccaaaaaagggtttaactttcccaatcaaaagttgttccaactagcaaaacccttgtccgccgtttggcccagaaaatgttacaaatgggtctcataaccattgaaagtttttaagtgtcagtaccaaatcctcagcctctacctcacaaaaccccatacagctagaaccccaaatctccttctcaaagagcgaaaccactttaacccaagacaaaaatttatcagcggagcaaacgaaactataaaaaggaagctgacctcgagaataaccacggtaaatcgagaactggcaccaaatcgaagtacggtacagggactgcaccgaaccattgcctccatgaaatgttgaagaatccttaactaacagcatcgattccattaagccgccggcgattttccgatcggtttcaagacccagaaaactctcttgttttcccgcattttgtagaactataatttctacacaatgtttaacaaaaacccacaggaagataataataaaataaaaaacagagaaacgccttggtctaatccgattcgaaaaactcaaaagataaatggtaagagcgagtttggagaagctgcttcttgtgaccgattcaataacaaggagctaggaaagttccgtacggtcacttcaataactcaaaaaaaaaaaagaaaaaaaaaactagagaaagagagagtgtcaaacaaacccagtgacagtgaataggttgaagatgatgaaagagaagagaagagaagagcagagcagagctgatacaaaaatcaaaaatggattgggtggagtgggtagcctctcttattaattttttaacttttatttttttttggacatcccaaattaatgtaattaaaataaataaaagttaataattaatataggaaagaaaagatcaagcgttattacaaaacgacctccaaattctttaaaattacaaaaataaccatctgggctcttcatctttttttatgtttcattattcttttaataaatggttttattttcatatatagattattattttatcttttttattttttgaaaggatataaatatggattatttcataaagtaattacttatacgtgcgattatacaaaatatggaatagtgaaaattaattaggtaatgacggttggtgacggagatacgtggagattgaccatcattaatgcaaatacagtgcataaaaataaatgcaattattatttttttttaataaagatgaaactttcattaaatcaaaatatccttctaaacaatagttaccactttttaaaaacaaaaaacaatagcccgcaccataataaggtagtatattttataataattattaagttaaattatataaaatttaatatttaatttaattaatagtgatataatattttaagaagtgtaaaatattaatatcttttagcattttttattatacatccacactagtctaataattgtatatatatatatatatatattatcaattagattaaactaggcttcaattaaaaaatgagtaatcacctccaaattaaactacattattacacatacacactccaaattacattatataaacatgtcacttatatttaaaaagttaccctatttgtactctctaaattactccatgccaattaactttccactttctatgaatttttttagactatttatgttataaaatattatttatggatatctaaattaattatcattattattattcggttctattctcctttcttatattgatttggtttctcattcttttagtcatatttttgtatacatagggtgcactcgattagaataaataattagaaattcttattcagtttctatttctctcttcatttctttttcttttcttcttatatattttatattattttataacacgttattagcacgagtttctgctcaagttctaaggtaaatattttgttaaagttcttgaatattattttaaggtcacgatatactaaatatatatttatatatatactcatttaactgaaactatttaaagaactctttttcttttcttttttatttaatatttatatattatgtgtatgtatatgttcttattcttatatatttattattgatttcatatatatatgtatatattatgttcttattatttataatatttacaatatatttgtatctatgatatgatatagaaaatctatataaacccttgataaaatcttgcatatattctgaagattatgtaaacataatattcatcatataaatgactgaaatataataaaagagatgaatatatatttatatatatgttcttgtattcttacggatcacgggactactgactgtctgtcacaaattccagttcaatggggtttcttgggaaccaaccgatcgactggttgttacaggttcccctaaaccggtcgaccggttcagagcaagaaccaccaaaaatgtccccaactcctcaaatcaaacccagtcttcagaatattctccagaacacctatatatatcataatagacctaaatcaagcaataacactaaacaaattacacataattagtttgtgaatcagaaggactcagcaagaaaagtaataacaacaatcacataatttactattcgaatatcatcatttatactcagacaatcagaatcaaacaatcacgcattactcataagatgaaacccaaatcactactggcatctgtcacgaatagacatcagtatacagatatttggtaatacaaaattattatactaataatataaatcatattcatttaataatatagcttatatatatgttacctcataaagtaaccatctttattacatcacatttcctaatcaggcaagtcggtgccttaatctggtaatcctatattgcattgcctaatcaggcaagcccgtgccatagcctaacacccatatatcgcataactgcatcacctaatcaggtgagcccttgtcaaaacctgacacccatgtattgtatcgcctaatcaaacgagcccctgccattgataactctagaaattagagttatttttcacatttttttactaaaaattggtttagttcttaagtttttaattaatttagtaagtttttaattatttt

SEQ ID NO: 36297 - DNA, 3364 bp, Cannabis sativa
gatacccaataacaacactctaataaatatgcttaggttgttcactcaatttggttggccaactaaaataatagcaatagatgtggtatgcctaatttggcagctataacattatgatagagaaagtttatgttatgttagtcaataattaataactctcaactaacccaacggtttgtattcatacttgtacgatccacatctctatccaacggccaatattaattttcagttcaaacaaaatccagaaaacaaagacatatccttcaacaacttcaactaattacatcaacttgtacaaaaagtacaaaattatacaaagtttattaagggcaataaaattcaatagttactaaaatttatatagaagtctcaaatacttgaaaattaaaacatagttatttgaatcgtgaaaagaaaaaaaaatctaaaaaacatatagaaacattaaaaaaaatgcaactagttattacatcatctccaaacataagacaatctaactccaatgaatgttgtaaaatttatattaaaattggttcaaaaattgaatttgttctatttgacttaaattttataattgtattctaatacattaagtgtaaatttaacttaaaaagtctaacaatttttttattgaaaatatatataaaaattctactaaataaataaacaaaatataaaaatttatcaattatattaatagtgataaaagagtaaatgaaaattataatatttttttattattaagtaaaaaatgtgatatttatttatttttcttttgaaaagaatgtgatatttattatagtgtaaatttaactaatatattatattttgtgtcaaatttaacataatttttagtatatattaaatttaatcttaattatacaccacattagaattcaattttataataaagaaacataaaacttaaactatcaaagattgactgacgagacttaagatgcctacaattctagattgttacaatagattaatgcagaaatctacttctccaaactttctggtgtaatatgtcaccttccaattccattgaattgactaaattgagccaaaactatatgaggctaaattaagtggccataaaaagtattggggtgcatgtgtaagagtcatgggatcgaattttaataactcaaataatgtataaactcaatcgagccacattaaaagttacgaaactattgtacttctcgtaatgaaaatttgtgagctgcatttgaaaatcaattaaaatgatcattcagattgaagttcattatgcttcaacaactttagattaacttaacattaatcctaacaaaatttcttattgggactaattttcccaattaaaggcttataaccaatcattttttcctctttatatcagttgggaaaatacacattttaatctatgctttatgatttcaaacttgttttcttatattccattatttgagcctcacatgcatcaccactttatagattttgtaagaatagtcactaactagaaacttagacaagtaaacaataaaaatatggtagatttcaaaacaacaaaacaaaattaaaatgaacacaaggaatatgtggtgagctcaacataaagcccacctactcttcttttcacacacacaaaaaagagaaactactcttatgtataccctcaactatttgaaacaagagtccaaagatcataaaattgacttccaagttccaaatgctatagcaaattcttacacttttgtgttttttttttaacttagaacatcaatattccaactagatcgatatcttggaaggtatgcatagcatagaaaaagtaaaataataaacacattgcaaagcatttcaatactttgttgcattaaccagtttgaaatctaccaaaaatattgtccacaatttagttacaatgtagaaggttagctctaaagtttagagtccaaacacattcatatccaactaatctattttcccatcaaaacatccctattcacaatacaaaagcctaagaagaaatttcctagaatcgtataaattcaaacaaattgaaataatctatatctatatagaaacaaaaaagaagcataaatgttatttttcctttgtccctgtattttggtagtttgtatataaatacacaaaatttgatgggataattacataaaattttttttttgtaaattttttgtacgtttacattcatttaattttttcttaacaatttgaagatattttatataaataatacaaaaataataaaaaaaaactaataaaaaataatatccaaacaagaacaaaaaaataatatacgaataacaatttagcttggcctaaaataattgaacacataaattccatacaaatttattatttacttatctattatagggcttgtaattcatgttgctgcattgttattctctgactgttgtactatcttatttcttttctgtcaaattatttcttacaaataacttaagaaactcttatgctaaacaacatatatttctgttagtagtgcttgttaatcattttattaaagatccaaacatcaactcaaaatttgattatgcagtatgtcacatacttagtcagctaaaactgattatgtaattgtgcccataattatttacttccagctactggtttgagcctttgaggtgagctgtaatgtgcaactacataataacatcatattacatgactatttattaagataatttactaatcaatctttctttttagattgccataaatttattttttttctttggaaattgtacgagtgttacttagttgactgttgaactaaaactcttttcattttaaaaaaattctattttttctcagaatagaactacattaatggaatgccataactacatcgttatttagtgactgttttactatcttattctcaactttaggcataaaatcagagctattttgaatctatctcaatgtcctacgggaaatctcttcaggaactattgctcctaaggtgggtcacttaagaatttatcaatgtcctaaattgaagtggttgctagagaagatgacttccctctcagctttgaagtccttgacaatcagaggttgtccatcgataaagagtttccctaaggtaagattagtcacatagtcaatgtcaaatttgattatgattgatgtatgtactaatttgatcttcaaatcttttgtgttttaaaaccaagcttgccacatactaggtttgttctaattaacttattattcttgtccagttttattatttaatgatttgtttacttctatgctccagcttcacaatactttcaccccacttagatcatgcatatttgtttgggttagaataatc

SEQ ID NO: 36298 - DNA, 4334 bp, Cannabis sativa
aaaaaaaaaaaaaaaaaaaagaaaatctgcctgaattcaacatttttttttttttttgagataaagttgaatttgaattcaacatttgattaagaaggatatgacatttagcaatcacattagtatggtccaaaggtggcaagttaacaaagcccctcttaaaatgtctgtgcatggtgtttgacaaacaataaaaatgaaaagtatttgtctagttgtgagatcatatcataatgttctgtgtgatcatttcattttgacggtttactttcactcaagtacacctgagttaacagcttatccaaaattgtctgcaactctctctctttctctagatttttttttttttcctttttaactagttcaacataatcttgttgatctataaagacatgaacttacagctcaagcacaaagattttacaacatcaaaaagattaatggtgcaacatgctaacagataatagattttagataatagtaagaattaaaaagaaaaaaaaaataaaaagagctgatagttaagtgcctagatggcaagtcgtttacctagaaaaacctgtcctgaattgatcattccatgaagccattgcagagagtcattaaaggtggaagggggtcaagaaagagactgctatctttaaaggatttcaaatcttcagtttcccctcaaattcttaaagcttatgaatcagtgataggaaaattaaaaaataaggactcttcaagagaagaaatcatactcataatctcctagccattagttcacaggtgaatatatcatccatggatgtggcagagttccctgcgcctacaacagggacaaggttgaagatgggctcgttgtcaattttaagtgtctgatccattgcagcaagttcagtaaatgcattggtgaacatgaaggacaatttctccaggggtacaggaaggcttgttggaaaatatagcctcaagtactgaagaaataaactttacatgagaacaatataaatgaaaataaagacactagcagcaaaaaaaaaaaaacagtgaaaactggaaaatgtgaatacatatatataatatgaaatgtatctaaagaaaatacaaaatgcaaatatgaagctgactcaaaaaatatagatcaaaattgtgtggtacaaaaggtcccccaaatgacacatttattcaaaagatcttttgtttagtctattgttgcaaataaaaagagtcaacttagttttcactttctcacaatcgcatctgatattttaaaccaaagttttaaagaactcactaagcctaaatgatgtaaagatttgacacaaacatccatagtaacatgaccttacacatcaaaatatatataccaagacagtcagaataatcagatttaacaagtgtgtataaagcaaacctaccataatgtcttcccaagagaaaccattttctgtaataactctgtcaagaagatatatacaaaatcttgatatctctcttaactgctcctctgtgaaataattgtcatagtccgttctattttcatcacctgaagttgcagaaccgagtttcattgcaacttcacttgtaacacacaaaataattgtgcatagttctccaggaacaacacattttttaatgcattggtcatgccagctttcatgctgaaatccccaacaactaggaccctgtatgcaagatgggtctttcaaagtaccatttgtttcttcaatatcctccggaataaaaagaatgggcttaacttccacaagcgctctgtaaaacataagccaagggcatgtgattatgaatttgaccaaatttctgaagacaaatttagtgaaaatgtagaaaaaatagttgacaaataaataaataaatatataagatacataactacacacctttttggcagatcaggggctaggatatatagaaaaatgggatcgacagcttcagatatgctctctttgttgaaatgggaaggccttatttgcttaaggaatacatctagcttatcttgaatctgatgtctctcagatgagggaatacgtgctgaacagtaaacgacaaatataatagctgaagtagatatcgaactattaaagcattttgccacagcttcactgttttctaatgccttttccaactcagctgtgatgcctccctcacataggatcattgtgggaggatcaagccccaactgcccagccatatgaagtatattcttgtgcaatgttgcctatcaacacacaaaaacatgaaatcagagcaggcaaagaaaatctctagaattaaataattgaccaaacaagaataagcacattgctaatcccaattatcaattcagtaacaagtatcaagcagctttgcacctggctatacggtccaatacaactaggagcccaagaggaaatactttgtacatgtagaactcttttagtatggtcatttgccactaaaacttccatgtatgcattacccagccccacttccaataaaggcagttcaattgtactgcgcgatggaacaccaaaacgacatttctcctgtttgataaatctcacatatgtttcatttgccgttgtgaattccttcatatcagcaatatagagatgaatatagaggacattctcccatccaaaaccatattctgcaagtttcaattccattcgtcttagcacagctgtcaaatcttcttgtacacctaccaaaatatacagaaaacaaataatgattaggttgcagactagaaacactgaccataaggaatgaacctgggaaacaaagaagcttgcaaatctgagtactggaagccaattatcctttgattacctgttgaagaattggttgaatgttccaaccagcaacaaatggaaaacgtatcacctttctgtgttcttgaaatgtgaagcttattttctgcaatagtgattgaatctagcacttcagcggcagactggactgcagcatcacatacttgtgcactgtctccttccacttcaaagacagaacccttgttctccagacagatctcttgagtttcgccactgccaggcaaagaacactgccatttcttatgttccaaatgaaaagccaatgtatgaaggaccgcagctggagcaatagaatctgaagagtgcagaataacttgaaactcatcaagcataattcgagcattctgtaaccacaaaaatgtatatttattagagcagaaaaatgaattacaattaacataaactttgaaacggtaacatcatggcaagtgtagacgtattatgaggtcaaaatcaaaatataaacaatctgaaaatatttcctctagttgcagaggtcattacctaaaacagatcaaattacacaaacaaaaaaattctgaataaattatagtgactgcatactcacggccatcatgaagaagagaagcctcttaactaagcagggaacaataaaatatccatgggataggaagaaacttacaacaaagagagggcaatcaagtgttaatgtttcatattcccctccttcaccacaaacattaattccatacaacctgccaaggatgatagttagccaaaaaaaaattacaatgctaagctcaaaaaggggggaaatagcataccctttcaacttatgcagatagggactcagggaagctaaatctttgcccaagtgctttgtcgggtccaaccccattgcagcgacctataaaaggagaaaaaaatactgtttaatagacggctgaactctttccaaaatatagcaagaaaagtcataactaaataacaagtgaaattaaaaattataccttcacagtaatagccaatatctcacttgcaatctgattgtaatagaaaagaaaatcatttcatgagatgtaagaactttcaatgttaaatcaacaaagtcacatacaaaagtacaaattaccatttcttgaaggagcaatgactgatcctgcttccacaaatatgccagggaaacaagccctaaccttgaacacacactttccacccgcagcctctgataatctgatgcaatggcaccagaagatactgcaccaacagagggtatctgtttcttcacttcatttagcaaaatgaacatatcttcaacttcatcacctggggttgttgtataggtaagcttctcatgcctgaaaagtccacaaaattcattggaaactgaaaagtaagctttacatgcaccattctataacagaagaccaaatgctttgagaagaccaaaacgcctagtaaaactgcaagctcttgttatgtagggaagatcctttattcgagaacaaagatcacatcaagataactttattcaaaaagattttactcttaaat

SEQ ID NO: 36299 - DNA, 8410 bp, Cannabis sativa
aaatacatgatccattttgtcatttaataaaacacagagtccaattaataacttttgcaaaacagattggtatttacccaaaaaaaaatattgcccaacaaataaaatattattcaacgaacggttgagatcaagcgacggaagaaccaagaaaaaataggtaataaaagtttttttgaagcgataaaaagtaattaaagaaagaaacccgttcccccacgccaaggccgtacctttttaatttcaattattaaaataaaaaaagatgagtttttttttttttgaaaaaaaaaaagagtttttaatttcaattatactcactccacagacacacaaacacgaacacagtagtaatatactcagaagtttcacccaaatttccaaataatctcagataaaaaaaagttccaattatcacttctccttctcttttcctttctctgccgaataacagctctcaactttcacatctatcgtaatcgttcatggattctctccacaaggtttgttgaaaatccttctcttccatgggtttccataattgttgtcttttcatggtgctcttctcaccttcctctgatctcatctgaattattacagtgtttttagggctaggggtttatgcaccttaaaaggatttttttagatctttgggattttagggttttttgtaactctttgttaagattatctctctctttttttctttttttgtttttgttttgagcgatcttgttgagaaattgcctggaacgtcaagtgaaattgaaggtattcattgtttgataagcagaaagagaattaagggttttgtagatataatggattatcggagtactgaaggtttcgttaagcaaccttctgacccaagattattacgcgatcatcagcgattggaattggttcctccagattcgtatgagcaagttgatcgacgtgagccgccgccgcctcctcctcctcccctttggtcacagaggagtgtcagccctcatgggttgccacaggatgcagctgtgattcaaagaacttctattgaaaggagggaccatggttggcctaatttggatcgtgggaggactgctcggatccggtcgagatcgccccaggccatggtttctggaggagatcctcggaaaaggcctcactttgatgatggggttggtatacctcaaaaatattcgccaaccccttcaacttctgagttgcggcagagaagtgaattgatcgagccttcaaatgtaaatttgaataatgatagtgctgatttacatgctaggcgcgtttatgggtacgaacatagtgatcctagctatagtaaagatgagttcagtaatatcagtttgtcagcaggtgataaacatcggtcattaagtcaaaagtcagtggttgtagaagactctatggaagcagggtcgtattgttcacctcaaaaaaatcttggtcgttcatcagtgtatggggatgctagtggtcacttgccatcctattcacgtactatggaccctcaacaacattttgagcttgaaagacatcagtaccgggactctataaatttgaatagattaccagtaacccaatcctataaagacgaagacaagcctgcgttacatacaggggatgcctcctacgtaacaaggcaaggatcaaattccaagagacttgcaagctcctctttgggaacatccaggaatgagttcctggcttatcaagatggccatacaaatgaactaaaaggtagcacaaagctcactgaagccgtaggtttgagtggttataaggaaagaccaattttagatttgtcaagagaccctgaaggggttcagagaaatcaaatattttaccggagggcgtgtagtcctgatgagaactacattttcaccaaatcacatgaaaaagtagatgatcatggatatccagatgatgagttccgtaaaatgatgtctccacgaggtgaaccagactatagtcgtgctcaaattatttatgatcatagagatacgtcaaggcctagtattgcacgccctgccatagacaggaatgataatattgatgatcctcgtggatatcttagaaagggcatggctagctacaatcctgctttagagaaacactcagatccagactacattgacatgagaagaacatcacatatatccaagcagggtagaggatacttgagttctggatttactcatattgaggctggcaggacaggttctcaagatcgtgaaattttgcatttgggtgcatctaaaggtcatcaaatagattatggttttgggagtgatgcaggtccacagtttcaagaggaaaggttgattcgtacacctgtccctaaatatgagaatgacatcaataggcataatgcaagagtgcagaatatgagggatgttaatgtttataatccaagggtgcagaacgcaagggatgaccttgtatataatgcaagggttcagaaagtgagggatgaggctgaatatgagactgaaatgcataggcatagtgcaagagtgcagaatgttagggatgaaggtgaatatgagactgaaatgcataggcataatgcaagagtgcagagtgtgaggaatgaaggtgaatatgaagctgaaatgcataggcataatgcaagactacagaatgtgagggatgaaggtgaatatgagactgacatgcgtatgcataaagcaagagtgcacaatgtgagggatgaaggtgaatatgaggctgaaatgcataggcataatgcaagagtacagaatgtgagggatgaaggtgaatatgatactgaaatgcgtatgcataatgcaagagtgcagaatgtgagcgatgaggctgaatatgaggctgaagtgcatagacataatgcaagagtgcaaaatgaacatgcaatatataatgcgaggggacaaaatgttgggggtgagcatagactattcaatgcacgagtgcagaataggagggatgaccgtagatataatgcaagagtgcagaatgaacatgcaatttataatcggagggatgaacctggaatgtataaatcacaagatagaatggtaaaaagaagatatgatattcaggaagatgtaagcacttataattctagaactactacttcaggtaagttgtacacagccagacagtttcaggatctacacgaaaccaatgaagagtggatcagcgaagagatgagtgatttatatacccccagaacaactgaatttcagaataatggctataggaggtctcagaggaattatgaaggaccaaaccatactgaagattttgtatcggatgagtggtactcatctcaggagttgccacatgcacgaaaacagtcaactggatactataaaaattatggtcgacaaataaagagtcatcgaagaccaggttattcaagccattataactcctaccaatatgatagaaaaaatcatattaacagacaacagaaattttggaaaagaaatgatggatactatgaagacaaagacaatgatggtaatccatctgaagattgggtggcccccgaagaatctgagcccaatgaggactctgaggaatttaagcaactggtacacgaagcgtttctgaagtatgctaaaaagttgaatgtgaacacatccgtgcagaaaagatacagggaagacgggagagctggtagtttgttctgcattgtatgtggaagaaggtctgttttctttctagtgatgttatttgtttaaagtggggcaagtattttcattatttgggtttaggcatgctttcaagtaaactaagattatagaatgggacttttatttgtagtttgtagagttaagtttataattcatggtatgaagatatattaaagtgggtagtttaataggtattggtaccatttaatctatagagcaaagtagattgcacagaagattaatatgtatagggattgtgaagtgggtaatgttattggtattgggaccatctaatctatagactaaagtagtttgcacagaagattattatgtataggggctgggctgtaagctgtttttttcgattgttaaacagatgcaattacttatagaaatgactatatgtttggattgctaagaatatatgctggtgtttctagtgcttggcatttaaagaccggttggtgcaacttgaaatttattttactgcttgtccttgtagaggattgattgaaactaggaaagttaaacttgagtgttcggtgccctattgatgtggtgataacttcaataaaaaagtcacaaaacgtggccaacaaaaccgtgctaggaatattttgcgccttttatagctgcttagtttgaattggttctcgtcacagccgtgttatttcatttgctaccattttcaccttttctgtgatggctttataactgaataccattctcattctatctgtaacgataatcatatctgaatgccatctcctttgcgtatcttttctcatgtgctctttataaagacatgctatagtgcatactgtttttatatgaaatagtcaagttgcataattctggttttattcttgcatcatacactatgtttttatttctttccgaaactatcattatgaatcttgtgagatgcaatgttacatttttattggttgtgtggcatatatatttaaattaatgctttgtgtgttatgagttctagaatcttcatatttaaaaacacatgacataccccttgctcaattgtgttgttatagtggctcaaaggagttcatggacactcggcgtttggtaacacatgcttatatgtctcacaaggctgggttgagagcagagcacctgggtcttcacaaagctatttgtgttttgttgggatggagcactgttattcctgatgagacagttacgtgggctcctcagatactgcccaagtcggaagccttatcccagaaggaggatttaattatttggcctcctgtcattatcatccacaacattaccttttgggacaataaccctgagaaatggaaggttgtaaccgttgatgcacttgaagccttcataagaggtgagtggttttagtattaaagaagaaacagtttttagggaacacttagtcaatccatttaaaatctcgatcattagaactctgcaacagttaatacgaacgtgactagatcgaatttcgaatttcatttatgactctttatatacatttatatgcatacattcattagtacatgatcattactaaaagtcgtctttcctaaaatatagtaatagtaggaaagagaaaacagtaatttataaaaaaaaattctttataatatcttttttatagaactctactgtaaaagtatattaattgaattgcaggaaagggtttaatcaggggacgaatcaaagtttgcctagggaagcctattgaccaaagtgtcatggtggtaaagtttttggggacttttactggactgggagatgcagagaagcttcacaagttcttcatggaatgtaagcgtgggagatcagaattcgagttagctacttcaaacaatggcacagtcagcgttaatggtgaaacagagattgaaggaggaaagttggaggaaaatatcttatatggttaccttgggatttcagaagacttggacaaagtagattttacttccaggaacactggtttgatcaagagcaaaatggagattctggacctagcaaatgctcctgttaaacctgaggaaacttagctgggcacctataaaagtgagcaataagtaacttataatggagcaagagcaaaatataaaaggaagccttccgagtctcatccaacttccaaggaccccttactctgtctgctgatctaatctcatgtgcgcttctgtagataattagtatcatattattatatcagaaagagaaaaaaaagtctccaatcttttgaagggtactttataagaagatttgacttcgttttcagtttttctataggaacatctatatgtttataactagacttcctatgcatatttctagttatattttgaatgggtagctaaattttcaaacaaactggttcagatcagatataatctaatgtataagacccaacattacattttcagaaaatggggtaagcagatttcaacatatacaaattggaatgtgatttatgttattcttttgctatttttctttcataaacaaatacaaaccgtgttttgtgtttgtgctacaatactgctttagaaatgaatactcatgtttttatttaattattttcattttaaatgttagtcaataaaaatggattagtatttaaaatttaaattattttatgttttctgctctatttagagagcaatcctctcaatgttattatgattttacgttagaaattagttatttataatttttgcaagagcttctattaagttttatccaatgttgaaatctcagaatctgaactagttctttgtcatgccataattgtggctttcatgaatgcaatgcatcaatctcagaatcaggctttgttcaagcttctttttgtcatatacacaattcaactagcagctcatatcaggttctgacctacaggcaacgaccggagaattctagcgtggttccgatctctcgtggtgaagatcatgctgctccactataagaagcacatgttcattgagaaataaacacagaaaattcatgaccaaaacaattgcacaactccgtttaaatgataaaacaacagatgaagaaatcagaatattaaatggaagaaaattctcaccagtggtacaacaaggctttgatgttagttagttcttgcaaactacttgttagaaaaaatttaacatggttttatgaatcaagacaattaaggcattaaatttttgaaacatcttgtaaaagttttatctgtcttccaagaaagtgagtgaagcattgtaatttttctgatcctaaagatcttaaaaacaatataattctatttgacaattaaactaaagtatcataaaaaaattaatcatttggctataaggaaagtgaaataaaatggttgtcccatatgtacttgagaacactaaattttgtgatggcaaagaagagagaacaaaaaaactcattttctcaacaatctcactgtataaataaagttctcttagccaaaacatctcattaatggttgtgccattagacaaagcttgtctcaactcaacatctcaatcctaagactatcacatgtcagtagcggctcattcattgcagcctaacaactcgacttatgttcaaggccttaaaggttactggaaagaagtgagtcaggtttttagcggggagagacatttcaggcgagttgttgggatccaaagtcctaaaagtgtccaaatctttcttgatgtagctataggtgatcaagaaacgacagttggagtggttgtgagcagtcgagttcctgtggctggtgagctccaggctttgcttcacagtgtcaaggttgttgaagagctcaatgtcagactctttttctagctgtttttaataggtatgcagtaaattggtctgttgcttcttcctatgccaaacttctctctgtacttgatagcactggatgtaatgtagtttggatcgagaatataatagagctgcccatgctcttgcaaaatgggacctaacttatccttgttctggttttgttaatttttggaagatgatgcctcatgtgatcaccattgttctctaattaatgaaattttcagaagtttttcaagtaaaaaaaaaaaaagaaaagtctcctggacctgtaaaaacctttcgaaagctatttgaggcccaaattcgctttcttaaagaccttaaactcgttgtttggctactcatcgaccgagcaagttcttttttggctaatgcagcctctatgtttacttgtcacttaagctactatgagattgcttctcatcttgacatcaaaacaagaaaggctatagttcaatggttactttctatgtgattttgtatttgcatcattgcatgagtgatgtagagtagagtagagagacatagtagtaagcagacatggtgagcgagtttggagagaagttggaagattttaaggtgatatcaatttgtagagacaaacagatgcagcaagagggctgtactgttgtgtttggaaattatcttcaatatcaataataatttcattcttaaaaagagacaagagaagatattcattttaaaaaactgatgaataatacagtgtagagtttgttctttacattaaaatacataaaaactagattaatttgaagtataaatataacttatatattattagctaaaaattaaatttaagtatttatttacaaatttagtatttataccacaaattactctaaaaactaaggtgcatttttcaagtttttttttttttt

SEQ ID NO: 36300 - DNA, 6211 bp, Cannabis sativa
  modified_base (3398)..(3410): a, c, t, g, unknown or other
tctctctctctctctctattattagtttcttgaattttgtttaaagtgggtgttagaatagcattgtttatgcctatctattatccatgcttctgtggatttctcaagtattcattcatccattccttattgctggtcatttagaaatcacaaggtgcattttaatgataaatggcttgtaaattatatcaactgtccttaatccctattatagtccatgaaaacgacatctatatataaacttatttgtacttttttatatatttctttcttgcatgttttgataaaattacagcctagaagtcttctgcttgtcacttacctcagctaataattttgtatatgtgatacaggaattacttgttatccgcaagattcatccgtgtctcccatctttcaaggcagaatttactgcttctgtgccactaacacgcataagagatattgctcaccggaatgatattcctcatgatctcaaggttgttctttgcacagggcttggtgcttttaattgtaatgcagtggatagcttgctaatttcgagctcttatattgcagcaagagattaagcatacaatacaaaacaaacttcaccgcaatgctggtcctgaagatttggtttctacagaagcaatgcttgcaagaataacaaaaaatccgggagaatacaatgaagcatttgtagaacaattcaagatattccatcatgaactaaaagattttttcaatgctggaaggtttgcttcaatacacaaacacttaaatttgctttggttctggtttaatgtttgcagaatatattatcatctttcctgctttttggtaattgttttgttaataattatttggttaattataattttcttaatgataatgagaagaaataaaagttctaatgaaatttgttttacacaaaatgaaaagttagccacttgaatgaggtgatgattaaatgcatttcttgtgatagttcaccagtattgtgtctgctattaccccgggcataagtttggtcctgccaccgtgctcttcttttgttgccttcagtgtctatctgatactacttgttgtgatctttactaattcaatgtttctgtaatcatttattgtattatttcctatacaaaactccagataacggaaataatttttattgggcaagccttgaaacatgttattcatgatttcgacggaagatgttttgcacaaataactgtagttcctgtaaaaaattaaatcaccctctttacgtttggttttatccaacaaaaaaaaaaaaagacttttatttctctgtagtttgaccgcatgtagtgacatggtacttcctaattaaaaaaacctctttgcgtgcatatatttgataaatatcagcttggtggaatctgataggaccccatttcaggctatctatgctaggagtgtcagttggattgctgttagtttgttaatatggacagatgtcattctgtggaaaggggagaattttttagtatgggaagttgggcgatctagaaggttatatatagtcaggttggttaaatgaggaaaggaggaaatgggtgagtagaattggagcttagttcttaggaggttcaaggccactcgaagttcctgtggctaaaatctgtgttttcttccattttagcatcacgctctttcttttgcccgtttctttgctttttctactttttggtgctctctctagttgggttcctatcttttctttttgttatttgtttctgttgatatagtacttccttttatttgtcatggatcccctcattcctctctatgttgcggcattaatttctttcgatagacattgtaaagagatgtagccaaaatttataaatttctatccctataatagaaattagtactaaagagacctgttttggcccttttgaaattattatggttcaggtcctgtcaaactatatagtttcaaaattttaaatgacctttttattttattttatttgttttggtaaaacttgctcacaagtttacatttatgctagcacaagtattatataacatgtacatgcagtatggtaaggctacttagtgcattttttgcttatgcatttcaatagctgcttattttctttactatagtatcatgtatgatcttagaagctgcagtgtttttcttcatctggttttaagggaagtccaggatggtgcttgagctttcacattgctacaaaaatctctaattttattgcatcaatctttttgcataaaagctttatttcttttatcttggaacaacttagcatcaacttatcaaaaagctctaattaattgtctttaactgttagtaaaatatctatgcttctgaaatacaagaaacttcagctgaaatgaccaaagtttatggaactgtaaagtttagttccttactctttgacttattagtgtgcttttctgtgggtggactgatcagttattttatccattatttttctgatttattttatttatttatgttgttgtaagccttgctgaacaacttgaaaccattaaggaatctctggatgagcgtggcctttcagcccttaccttgtttttggactgcaaaaaggtaaacacatgctactttgaggttttgatgtcagttgtgcaattatttattgaatgaccatccagatgctcttactatataagtttaattatgtcaatgcttctctaattgtttattaggcttgttgaaccgttggtcttggttattcagttgtcttatactgcccattgacttctactgttacaatatgattttaaggagcgtcttttagattgtttggcaacaatttgcctaaggctttagctagttcttgagaacattagatatttgttgttttcccaacttactgcaacattccattatggtatgagacccttccatgtgcatgccctactagactgctgaaaggtttattacaatagagaaggggatgtcttcttttttattataaatatttgaaaatcatcaagtgttagtttattttcacattatataggggatttttgatttgcaaagcaattcatttgacttgttggctgtttcttactcaaattccttctgaacttcaaccaagaggtgtggcccatattgccgacatgtgatttgctcccacaaaattggagatgcaatctatcctgagcacgtaatttttttttttttgataaatcaggaagttgtattgcacaaatcaatctttacacactaatagcactccaaattcggagcctaaagactatctatacatttccttttcctcttcttttcttttttgactgagtatgtatatccttataatcatgagcacctaattgctcctcaaatgttgttaaattcagcaaggagctctgtttctttctttctttctttnnnnnnnnnnnnntttctttttttttttttatttaaaaaaaaatcctttcaaacttcatctataattttatcacaatcgttccctgaaattatttgtttagtctctcttgccattctcacagccatttagtttgcaggaatttaggaaataatgttggttgtgtcattctcctgcaagagccctctgtttagtgaaaggaactcatggatcaataattttacttttgttatctttgaatgccaaagtttgcccaaaactgtttcaccgttagtgtttcattatcttttcttgcttacttcatactttgtgatccttcacaaaattgagtatagtctacaatggtatggtatgagtcctaaagactctcatcctttctgaagaaaggggaggtgtaagaatctttcattttttattttttttgcgaagataaattcatgatgggtctgagacagtaggccacttaagaatttgagtttgcatgctttttctgtctttcctttgaaagtaagttttgatccttgaggattttcctcattaaaatcatgtttactgtggcataacaattagagtaaactgtatgttgattttcagagattggatgctggggatgaatcaagccatggtaataataccagcaatgtgttgttcaaaactatgcaatcactgaatgctctcagaggcgtaattgtaaagggtcttgaaagtggccttcgaaatgatgcttctgatgctgcaatagccatgcgtcaaaaggttagataggtttttagcattaggaagtataagcaaaatataccatcatagtttttgttggaacctactaattatacatgtggcaatttttttttggggagcttagtggcgactctgcgagattgggcttgaggactattcatttgttattttaagcaggtaaacatacttttggccttaacacttactttcttgtaatttagtaaccaaaagtgctgccctgtgttccctgataataaaggtttcacatctagaggtctacttctgagtgctatttgtttgtttgttttttgtttctaatatagggaaaaaaaattcatatactatagtgattaatttacagggtatgtatctgttttcctttactgggtatatataactctacaggtaaacaaaacaagagattaccatgtatctactgaaaataaagtgtgccggggaatgatcagagatttttactgcaatttttgtcaatggtgctgtatatcgcaaagttaatatatcagaaagagatgggttgttatgttaatgttgatttgggtcatgaacatctaaattgaataaagaaaaacataaaatctatttattagcaatagaagttatagaactgttttgtttctttcttagcaacttgatgggtccaattcacttttgacaacaattaacattttttagattcctgaatggacttgaggctattggtggtactaagtggctggcagaaaatgtgaaatcaaagaatgtaagctcttggaaggatccaattggttcgttgattgtcgggattaatcaggtaaagttatctggatggaagtctgatgaatgtgatgcgattgaaagtgaacttcttgcttggaaagaaaaaggtctatccgaatcagaaggtgctcacctcatctttcttggttcagtcagttacaattacgacttctgtttctatgttgaagagttcgctctatcttttttttacttctgtaggaagtgaagatggcatggcaatatgggcattaaggctcaaagctactcttgacagagctagaaggctaactgaagagtattctgaagcacttcttcaaatattccctcagaaagtccaggttatatatatttacatacatatgtctaactctatttatttatttttctattgtggtgcaattacagcatatgaaaaacttgtagaagtgattattttgacatctagtttgctcggaagcttatatgaaaaccttgtatgaaaagttagcttagaagatccacctttacaaaagcaaatatacttgaaacaacatggtttaattgttgtgattattatgagcctgacaagcatcaaaatttacaattattgtactcaagatatcataactaatataactttgaaactgacaaccttcgtttcttttaaattattttcatgattctggcagacattaggaaaagcttttggtatcccagagaacagtgtaaggacatatgctgaagcagagattcgtgctgggtaacgccttctctttagcatttctaatttttacttccatcacagcctgcattactagtttttctaactttgttgttcttataggttgtgcttatgcagtgtacatattagttactgatcatatgaaaatatggttttgaactttttcggtatgctttcttagggtaattttccaggtttcaaaactctgcacccttttcttgaaagctgttagaactacacttggttctcagggttgggatgttcttgttccaggtgttgctgtgggaacattgattcaggtacctcaaaggcatttaatatggaaaagcatcagatgactcttctttttttcttcttttataaattgtgattcctgtaaatgtatttcagaagttttatttctctttgtttctttgttatacatactcttatggtttaccatttcaattgatacaggcatttaaataggtcaaagtatcacatgttaatcaattaaatattgttgattatcctgaggttgctatttttccttcccctttgatatcttctcctgtaatggtggtgttggaagagttatatc

SEQ ID NO: 36301 - DNA, 3528 bp, Cannabis sativa
tgctacccctgcacccctattttctttatatagccctctagtacctttcattgatatttgttctgtatacaaaggctcaaccctctccctacgagattggatacttctttgaattgaaaacgcataactatttcaaagaattaatatttgaaaaaattaatttcatcttggcttctatataaaaactaacttaagccatcatttctcaaataaatttttcttttaaaatttgaataatttataatgcattcataaagttatttgtattatagaattcatattataaattatttaaatttttttgaaaactagttacatgcatgcttgttattcttctatatcttttttttttctttttacaaaagtacttgacattaattaaacttaaatatgccgattatgttgactcattaattatctttcaaaatttgaataatatctcatcaattatttggttgattaggctaatcacatgttttttaacaagtgagaaacatataatgtgaataaataataatgttcacgtgttttcttctgtttgaattattgaccttttttttttatcttggattatgtgatggaaatcatttaatactttctttatttcaatgtgattagtcaaaaaaagaattaattctgttcaactagaaaatttagaccatggaaaaaagaatttaaagcctggagattagagagagaagaaaaaggacaagaaataagatgggattaaaacattttaatacgagtttaattggtcactacaaattccaaattaatgttggtgaaatagactgactaatggaatgtggcaactgaataagttaagtacattttagacaagttggttaaataaacccaatgataataattaacataattctcctaaaaaaataattaacataattttttttgaaagggaataattaaatggcctaattaaggatttttatctctcgaattacgacttatgtattattgtgtccttgaacttttcaactgttacgactattctctaaactattcacagtacgtattttaaactttcatctatgttaaacttttttattattattaaaattagaaaaaaaattcttaaatttaacaattttaatagttcagaagtgtttttaacgaccttaaaagttcaggagacatgatttgatatattatttttaattaaaaattatcatattttttaatattatatataaaattatttatttaattaaatttatatcttaaaaatacaatatatttttaaataaaactaaacaaaagtataatatgtttcttttacagtatagggtgtttaagaagtgcattgatttatcctctttgtatttttaaaatttagataattttaatattaatattttatatgatcttatacaacataattatttaagacattcctataaagtataatgtttaattaacccgttaattatttaatgggttttgggcaactaggaagacaatgccttctatgtgtaacttttttataaatcgaagatgggattgggatgaagagatgagtctcatctcatggcagattattataattatcacaaaattatggggtagtttttattattataagatattatatatgattattattaggtgggttcatgctcttgaattacaagccaagttaagactccttccatatataaagtcttttcatgagttaaaaaatgttgggaattccactgtctcccatgctacatgcatacattaatttacataatcatatataatttataataatataaacatattttgttacatatatatataaaaaaaacaaagcccatgacaagaaatgaagatgaagcatgatgaatgggcagattttagagtgaataattgatttttatgatgaatgattgtatttaattagtaaacttctattattggtttggtagggaactgctgatgtctgtaggtgcaacatctgcctagctaccttcttaattcattgaaattattctctattttctatttatcttcaaacctctaaatcattttggtagatgagctttcacattatatatacatctatatatataaatataaatataaatatataagcctctttctctctctctctgtgattgaaaaaagagcaacattcttcatgttattgacttgggaacttgcatttttaactttcaagctttttaatcattaattttgttgcattattactttctttgatttcaatagtcattaatttgcatgatcagtcatgatctctataaagtctttatatatttgagttccttacttgattttgaaaactaattaaattaagccttgttattatgagattaattggaataacttttagttgatttccaacttaaacgttcgtgctacatttatagagagactaattagaatttttactctttaactttgacatatactaaatcatgtttcttaaacttttaaggtcgttaaaaatgaccctgaactattgagattgtttgatttaataattttctttttctaattttagtaaaaaaatctaccatagatggaagtttagggaccataatttaatacatgtcaaagtttgagaggcatgatttagtagatctcaaaatttaagcatgatttagtatataaataatcactaaaatagtaaaattgaataaaattagacaaaaatccttaaatataacaatctcaatagttcagggatatttttaacgaccataaaaattcagaggtatgatttagtacatgtcgaaattcagggacaaaaatcataattatatataactgcctataacaagctaggcaccctttaaactgacccttttttctttaggggttagaaaaaatggtataattcaaatggtaataataataataattttggtttaatgctaaagttatggaaaagtagtttctctttttcacttttagtggagttagattaagatgtgttaggtaactaattataacacaactagtacttaacatatatattataacaatatagatatagacaaattattataacgataggtaatcttatatagatacttttttacacatgattaaaatatattattttatgttgagagatttttcactttctttggcctctaccattagaaacatatttgttttttcttctttttgattcagtggataaattgtaattttttttaactatatattggctgaaatttaactgttatataaataagtttcaaattataatttttcaaggtatccaaaataaaaaagttcttaccaataaaagaagaaaaagtgatttgccaaggtaataattttggattgtatatacaatatacggtcacaatttgaaagacacatatttatagacaaaaatatggcatatcagtccttatattctttaaaacattttaacatttctcaaactctttactactcagcatataaatatatatatatagggatatgattttgtcccgttattatacttttacggattgtaatccgtgatgtacggtagccgtcagatgaggg

SEQ ID NO: 36302 - DNA, 3178 bp, Cannabis sativa
  modified_base (3068)..(3069): a, c, t, g, unknown or other
ccctcttcgcaaaagacggtaaacagaaagcagccgtgtgaatctgaaaacaagaacaaactcgtcaaaaataaagcaaagttggagtttttaacaacatcaagtaggtacaagaagaagggcgaaaaaaatctcgcaaaagagcagaatcaaacctcggaattgtaaaatttcaagggtcttccagaatcgtcttgttcatcaatcggattcacagggtgtttaaagtcaacatctggtccctcggtagaacatagcataaaaccaataacaccactgaaacacaagaaaaacaataacagcaaagtcagtagtgaaaaggtgttttttttgcacggatttaatcagctcaaattatacattcaagtagataaataaagggaccctttagggagtttcaaaaaatcttctaccttgggtatgtagggactgtggtccatgcataattaactgatcccttaaatatgtggcggcagtttgcaacaatatcctcaattatgtgcatgtggagccatatactctcagcctgagtacagacgactcctccaggacgaagggcccttgctactgactgaaagaatggtttctcaaaaagctcctgagcaggacctaattaaaatgaacataagtaaagtattacttaaacatactttccacaaccattcttagacaagaccaatgctgtgctgagaacaaagaatttaccaattggatcagaagaatccactataaccgcatcataagttccttctggaacagcctttaaaaatgcaactcctacaacgttgtagagagtacatggagaaattaggatgtaggaaagagcaaataaagggaaaacaaaatgagaaggaaacagaacaaactgatcataccatcaccaatgtgaagtgtcacccgtggatcgttgtatccaactgccacatcagggaaatactctttagacacctgcaaaaggatggggaagtaattgtaatcggtgaatctaaagctattgcagtcgagtttcatttatgtgggaatagtattacaatttactatagtagggcctgtgaaaggtgacatgttctatctgaatgccaattaaatcttactatttgtacccaaatgaaactattgcagtgaaacataaagaattcatcggttgactatgtatatatcaacagttaattatttatttgctctttgtttaacctaccctattacatttaaagaacatcaatagtttaattatcaacattaggactcacctcaaccaccattttgtcaatttcacatatatccacttgctcgacagaggcgtggcgagcaacttccctaaggactccaccatctcctccaccaatgactaaaacctgaagaaacaaataaatgtattctagatgagacaatcataaaatgaaaaaagaaaatactcatttgatcatttcaaaacataatcctgaaaaaaaacttgagtacattttatgtttctgtaagctgaaaaaattcacataacgacctttttggggtttggaattgagcacaagggtaagtgagtgatcatttcttggtaggcacattcatcccgctctgtgagctggatcactccatccaaaacaagaacctttccataggttgatgactgcaagcagataccaaagacaataatcttgtcactaaaagaagcaaacaaatgtacaagaaatttcagtaacataatgaatcatcacttgcctggaaaaccatcacatcctgataatcagacttcccctgaaataaaatcttctctaccttcaaggagtgtgcctctcctgcacataaacataattacatcaatttgcataatacaaaaccaatcatatcgaaaaaaacaaaaacatatcaaccaaaaattaaactaatgtcttcaccccaaaatcacatctaaaatgtataactgaagtgagttaatttaacaaatggaaatggataagctccagtaaaaacacaggattctaaattatcccatttacaactacagagtatccagaaatcctaatacaatttacacaaaatagtaagacctcaatacagtaaatctaagggttaaagcaacaaatttccatatgcataaaataactcatattgcaaatcaagtgcaatctctgactcaacaacgaacatctgagaaactatttaatgaccatggaatattatcaaacatgtaataaaaagacacaaactgtgttagcaaaccaatagcttagcttagagagaaccaaatacagaaaatgaccaaaaggaaaaacaaatagtacaagtcaagacttttctttaacacaaaatgatggcataccaaaaaaacaaaaaacaatggctgaaaactcaaaaccccacagtacaaaaagctggcccagaaaacaactacgtcgcatagatcatcttatagtaaacaacaacgtatcaatcaaaattctactgaacccaccaaaagcaaacaataaacatttcaataacatttaataaagattcaaaggttttcataacaagtgccccaaatttctcatcaaacaaaggcgaaaaacgttaaagataaaaagaacccaccaggccacattgggctaatctcagagaaccacccaggtatgacggttgagattgaattaggttgttttgtcgcatcagtctccatagaaacaatcgaggaaactgagaccccatttgcttcttgttcttcttcttcttcttctctgggtctcttcatagacaaatcattggtagcaataccatcaccagccatagcttatctaaaagagagaataaagcaaaaacgaaaacctaacccagaaaaaggggtctctctctctcacacacacacacttgaccgatcgctaaagcgtagaggcaagagctacttctgtaaggagagaggccacacaaacttgggttttgcttgctttatatatatacaatatatataatatatagccacatgaaagaaaagttgtgaccttttttatattattattattacaattatttaattaaaaaattacattgtgaaatgatagatttcataagcaaaaatatacagtagaacctctatnnaagaatacacttgggactaagcaaattatattctaattgagaggttataactaaatagggttacactaaaaaaaatcgaaatataaaaaaatatcaacgtaacaacaat

SEQ ID NO: 36303 - DNA, 6392 bp, Cannabis sativa
  modified_base (5680)..(5692): a, c, t, g, unknown or other
ataaaaaaaaaacagaaacgacttttatttgtataatgtgtgagtacatatataaagctataatccgtctactgatcaatcaataaatagcttattcttatccttgtggtacatggattatcattagcttttcatggttttggtgagagtctcagtgagttcacattactattagtttctctcaattcaaagaataggctatagagatatactgtaatcaaagtacttgagaactacatgccttttcaattttccatatgtaaagaagaatacaaaaatgaattcttcagcagtaactttaacttcatcttgttatataccctgctagattgtcagtgtcatcatatcataatccaccaatgttaaactcctgagtaattttttagtaatttaatcttttatcaatttcaatcccactaatatgttactttattagcttatcatcatattaagaaacatgttaataatgacagggactaattagcagtgaaaaaagggacaattttaacattccagtgtatgcaccaagtttacaagacttcaaggaagtagtagaagcagttgggtcattttccatcaacaagcttgaggttttcaaaggaggaagcccactcgtggtgaaccagcctgatgatcaagctgaagtgggaagagcccttgccaatagctgccgcagtgtggctggtgtcctagttgacgcccatctcggcgaccagcttagcgaagagctcttttcaagaatagaaagcagagccacaagccaagccaaagaactacttgagaagctacaattctttcacatagtggcctctctttcttttgcgtagaaaaaataaagttaaagaaaagaaaaggtgtattcaggaaagagggagatttccttcttttcttttcttttttttttttttactgtccttttattttatttttcagttttggtcactttctcctatctttagtttgttacttgattgcgtagtgaatcaaaagagttcaacacacaaaaagagaggagacacttgttgtaaggctttttcggtcatatttcctatttactttttctgtgtgttgttgtgggtgttattactgactgtagttacctttgttctttatgagctttgtgactttgtgctcccttgaaatgtaaactaggtaaataaagctagctatagtaaagtccaattacaattttcttccttggtagcctattatgattttttatatgtgaaattaagttgtatgagtggggggtttgctttttgtccacctgctaacgagttgtgtcatgactattgcttttttgtaccctttattttattttttagtttcaaatttcctattttgttgactataactggtagttatttcagttgatgcataacatttgcaatctccttttcttctcagaagtttgttctcttctttatagtgtctcttcatgtctttattcaaacttaacaagccaataacattttcccttctgaccagggtttaccttaatgtgtgtgtactaatacatacacaaattaacacacacacacacacataaatatattcaatcatcttaggcccctaattgactgataaaataaaattcatgatataaaaaacagaagacaggtgatgttagcaaaccaatggctatgttcagctaacagcaaaggccattacatttagaaacataaagttgttccattaattattcctcccatttacacctctttttatatagatgtcactctcacacattaagaaacgtcacagcacaaaccaaaatgagtgttaagatttagtggttaaaattctcaattctctgattcctcattagaatcataaaatattattatatcatcctcagatggcaccctaaagctcacctttttgtttatatttctactcttacatctgctcaatggagcatcatttgttcttccaatgtgatcaactactttaacattcacaacactctccatcgaaccattgtgaacattgaatctagagacattagtaactccatagtcatcagtgaaggggggacagattctcttgaagaatcttatgacaaagctgcgttgtatagtagcagcatcggttctaacacatttttctttcctggttggtgaggctaagatcaaatcctctagagtttctctcttcaccatcttcaccttctggtggtactgaatctcattctgctgtattttttgctttttcattccatatacagttcttgagtctgtaggcttcacatagtccgtagccaactctattgaaccaccattttcttgaggaacatggttttctttagaccatgcttcagaacttgaaaaacagagtttcatttcttgtaaaggtaaaacaaggaaacaatatgtagcataatatatagcttaatatgatagtttaaagcaagtggaaactaaagacaatatttacgaatggttttacttggcggaatcttcaagaaaaggtagctccttcagcttcagcctagttatttccaatgtactgttgtaccattttattttttgtataggcgcttgtagcttctgtttcttccataaaaccaaatcacagacaacatttggagtcattaaaattgttccagcaatcattgcctataattattgctctagattttgtcatgtgtgaacaaatgccagccctgcagtaacaaacaaaagctatcgatacaaatgaagaaaaagatatatgatgatattatttaagaacagagaaggcgcgtaggaaaattgttcatggaatcttagaaaccaggatcccatttcccaaaatgagttttgaaataagctggaagctctctctttctcgtaaacgtccaagagacagtaacagctgaaagataaaagctggacaaagtagctttcggatgttgtctgaaagatttgtcttattcagtgtaacatttatttggttaaacatgaaactttaacctgttccttttaaggatcatgtctagctttaaacatatgcttattgttgttgggtatgttattttatttactatcttttgatgagccaaactgcttttaattaaaacagctctactcttccacttgttttgtttccattagctctacctaacaaatgtttcttaatattcttattgttccaaattggtagaaagaataaacaatttctttttttcattcatcataatagtatcgtggaaactcaggcaaaaaccaaaaaaaaatgattcacacaggtcacaagtgtatcaatattaaatagacctcacggtatatatatccttttgacatttacaaaccaccctgtccaacaaaaccagagttgaaggacaatcaaccttatcacctaactgaaagaagctcattgaccagcggatggattcgtcaatagttcaagtgattttctcaaaaagtcgacagcaatcgacacatcgtcaaatgccaatgcaccaactgcaaatctggctgccttttgtgcctctgcaactttatcaggtggtggctggtagttacagtcatactcatatgactttgctggagcagggggagggggagggacaggagcgggttctttaaaagaaccattccggctagctgacttgggttgagcagctggttgatagcttgttgttggaggagctgactggggataagaagcatccaagccttgatggtaagaagcatagtgggaagacactgctgggatactactctcggagaaacttggataagattggaaatgaggataggggttagaagtagtatcttgtggataattatgaggcaaatgatgatggggttcttcgggaaagggctgttgttggtggtatgtctgcggataatcagaagtgtcagatctatttgctggaggtgggtggatatcatgtgaagggtaaccagaggtggggtaagtttgaggagcggacgggatgttagccgaatgctgactgttgacttcatcatggaattgtcttggcgtaggcagtggtggtggttgagtgtttatagaatgatactggttgttgacgttatcatgatattgaaatggtggtggggtgtgagttgaatgttgatccgatggtggaacaactgtagaatgctgccggtcattaccggaatcataaaactcagatgaatcagatccctgtctgggaatagtgggtaccaaatcactaggtccaatgtcctacaaagacaagtgcattagaagaccatttacgcaacatttaacagtaggattaataaacagaaattgcaatgcttagaaattaaaaaatatatgtataatagaattcgatattatactcttggagtgatgacagacctttcttcaagatattctaaagttctcatcaataccatcaaattataaatagagtttactagtattatacttttttctttgcgttctctcaactatgaaatataatgatagagagatgatatacacacacacacttttatactcaaaaggacacatataatgaaacttacgacacttacatatgttctgccacttgtacttggaggaattgacagatcatcttcaccagaagggggtcctgcaataggcttccttccttcttttaaagcttttctaatatcagctgctttccaaactgcgtacttctgtttctgttcaagctgtaaaatgtagaccgtgtattagtaaacacttaaaacaccaactacttatctccttgtttttaataaggaataaatcaaggtatctgcgtgagacaatctacatcctagtggctgatgcataagtaatacaactaataggttatgatgtgacaaaaactcacatcaggctgaagaggcccaaactggttaagaatctcaaagaaaatgcttgcagcatagaatgttttcgctgtacccctgtaaacaaatgaaaataaaatcaagatcaaagaaatgaaaacttttaagaaaactatagcaaagacatctacgtagagattcataactgaaggcattgacagatgactacaagtacaatccaatacatcccatatatttataattcagaatcaatatgatcaccataaacaattctgtaaggttaagcctgtcaagaggaagggtgtaatatgtgtgcctacatataaaggaaaagaatttcacaatacattaatcacaattccgatcacaaactatattcatagatatcggttgaccatgattacacataaatgatggtactaagctacttatgcaaacacctacaactgatgaagcaccataaattggttattctaagcttaatgaattaaagcagctagtatttaataacttttcataaataggcatgaataacaaaagtagtggacatacaaatctgctcgaccagcacgatcttgcttgtctgctcttgcaaagacgtttgaggcaaatccctccagatatagactgtcatcagaccccaacttcagagacttcttatcctgtaaggaaacaactttctataaacattaacaaaaaacaggaaggaaccaacaaaagagaaaaaaaaacacactgaacataaatgaatgtgggcattacaagcagaaaagccatattatagtaatacaaagtactagtgcatttcaaacttactattaactaaagttcactaatcagttgattaaattagctgaaacccaagtgaaattagaacttttattattattattattatnnnnnnnnnnnnnattattattattattatttgataaaagtgaatttagaacttaatcatgcattggtaagaaaaaatgcaaaaacggatgcaatttaacggtcctgtccttttataacagcattttgagcaggggaaaaaaaacctagaagatcaaacgaattaaaaccaaaaacccatcttccaaattataagaaattaaaaaaatatatcacccaaaaatttatataatagattacatgtataaataatgaccttctcaagctgtttcatgagggaaataaggagggcattagtggtcttggtacgttcgctctgagggatttttaatcctctttccattgcatacaagcgacctacacgataatcaaataattcaataagaaaattaaagatcaaataagcatactagggttttagagattgaagaatatcaatccgaacattaaggtttttgattgcaagaaagaattacagtaataagatacgagaggttcgtgcttctgtaactcatcagctcgctgcagatacggtaaaaggagcttcgcgggttcgttttcgccagccatctatggctttctctgtgattgtagagagagaaagaagagagaggattcaattttcaaaattgattagtgtgcaaggcaaaactttggaaagcaaggcgagcttcagtcatatgtatgttttttcctacaatgtaacggcgtcgt

SEQ ID NO: 36304 - DNA, 8294 bp, Cannabis sativa
tctttttataatgcttggattttttggataaattttcttggtaatgcaaataataaagatcatcaaaatcctcatggcagcatggtcaatactcaatacgttgactacactttacttcatccaagaaggaaactgccactaacctgtactaataagatattctatttctactgttatattatatttatcatcgaatgtaacgtactttactatgaaatttaataatgaaaaatattaacttgtacacatcgtaacaagaatctattctatgcaatcatcgtacacatctgggaatggattgggataaataaattaaataagaaagaaaagaaaaatatatatttatctctttacaactcactcaggctcaggctcaggctcaccggagagaaaagtggtaactaaattatgaaagaagaaaaaaacaccaaccagaccagaccagaccagaccacatatactatactactacatattatactactactattattgctactacactctaaaaaagaagaaagaaaaaaactgtatgtaatgtaagcaccaaaagccattactacaaatcagaaatcataaaccaatcaaccaaccaaccaaccaaccatcaatcttgattcatcatatcactcacttgaatctatgctcccactgcgagagctactggcattgcgactgtgcaatgatagccctcttatatgacccggcaaaccatccaatttgttttcctgaaagaatttctccctctccatgtgttttgatggtggcggtggaatagcaacacccccaccaccatgtccgttcaataattcttgtgatggctctgaagacagtggtggcggtggtggtggtgcccgtataagtggactcccaccaccgtgtccatttgattcacgtgatggttccaaagatagtggtcttataagtggacgattcagcatttctccaggaattgatgatccgagcaaccccatgtgtggtcgttctactggcagctcttcatcttctggccttgcacaagcttttcctttccgtaacctgttacagtttgcagtcattaaacagagatttgttttacatagtaaaaaaggaaaagaaacaaataaacatttggaagaatggacaaaccttctgaaaagttgttcagcctcctcttcctcctctgcttcttctgatctcaaacgattcccagttgtttccggtctcacatgatttacagttgaactaggcttagctgaaaggagagcatcatgtcttgcaagaaccttctggagctgctcatttaactcaatagctcgagataccaccttctcatccctgatattaaaattaagttttaacaggagtcaattcaagactactcaactaagcatatgttgagtattttgtggcaaaagtgctaataattaaccgagacattcacttggaccctaatgccatctcaatgtccttgtcaaatctatgaattcaatgccccctcttcatttgaattgcttaaatgtgaagaggaaggaaggtagatgaggctcataggtacaattccaagaccaaacacaaactaaaggaactaaaataaacaattttgactcttacatatcgaagactccattaactgtatgtaatacaaaaaaaaaagtagttcaagtagttgtgcatgtaatttgctctcatgaggtctaaagttcaaatccctcctaggcacctacataaggaatctatagtttattggtccccaactacaaatgggaagctcaatcaacaacaaataatcagagataatatatagtgtgcattagaattattggctctttcaaacacagaaattagccttaccgagaagccatcactagatgcattaccctttgcttttgaaatgcacactgttctacaagatcaagtgtaaattcatcctttgctccctggaagaaatttccatcagtcattactatacaaacccataatgcaagtacatatcatcaataaaaccaaccaagctatatgacatgcaattaagagtaagaaatttcagggaaagttgagacttgagagtaggcatttcagtaataacaatctagccgagtaagataaatcactctagtagagctccaatatgtaagattcacatacagtatgtgacttccaatgcaagggtaaaagaattggttattgtagaagcagtcaacttaaattgctaattacttagttctcactggaaaagccctaattagaaactaatctttcacttctccaattcaatatattgaaagagacaaatgtatgattttgaactaagaatagtagaccagtaagatacctcaggatgttgactatctacagcatcaagaacttctttcaacacctccagtgcattactggccttttgaatgatactgcataagaaagctagaacagataagcggcattgcatattatgcctttcacatacaatataacatcacacaaaacctgaaaaatagatagctgaaaccagagtttaaccccactcctcttcctcccagcctctcaaacagatttgcttctctagatgatgctatgctagtatgctacaatgtaatagagagaatatataccttgattcaggaacctcttgaggctcagcttgcagagcacgcgtttcatgtctagatgctgttacttccccattaggcaagttgttgttatgatttggttgtgatgtggggtgatttgatgtaactgcaggaggcctttgggaaaactgcactcccgcactctgaatacaataatgaaaaaaacaattaacagaagttgaaaaacatgaccagtaaactctaaaccagagagtacatgatcagatcacccaaagactatatttagtaataggggatggaaatagacaagctccaagtccacagaagcactactcctcaatctcaaaggagtcataagaactagctaatagtatcatagacccattacaactcttatcactctgtaaccaatgactaacagaaatttcaggtagaagaaacaacagttatgttaacaccatatggaagttggatgtttctacaaacataccactaactcataataagcattgtagtactgaggatattttccagaagcacccccaagagatgtttgtgttgcatctagaaggagaaatatacgctctcgtactggcaaatctgactgcaaagtgatcaaaaatagaaattttataaatttagaaagaaacaaaaaaaagatcaaatttaagatattacattaagtaaaagcacataccttcttcttgactatcttgacaagaatagggagaatccctgtatcaataacctgcttatgaatattttctccaatattattcattaacatctccagcaactgcattccaaattaaacccaaaaaaagaaagaaaacgaattgatttaaaagctgagcggtgagaaaatgcataatccaattccaaatgatcccatccaaatttgtgttaccaaaacagcatagagctgagtatttgtgtgtttactgcctaatcgtttcttgatagctttgactgcgtctttagcttgtctgcataaccaaaaggaaaagaaatgtggttatattgaaaaaaaggttaataattgatgagagaaagagaagtatgatttagttacttttgatcgtgagccaccaattcgcagatttggatgttctttgtccaatcaatttcaggtagtttctcacttgtggcagaatggacaagttcagccgccatgtttggaaggaaaggaaaggaactacagaatcaatcagctacccctgtgagaaagattgagactttgagattgagagaaatggatatggattgaatgattgattgattgataagaaagagtaaagcatcagatctcaacatgaaaccattatttcctaatcaatcaatcaaagtaccttacaatacagaagaatggatgatgagagtgtgaggagaagaaccctagcagctgatgatgatgatgaagatatgcattaaaactgagctgatttgatttgatccaaacaattgaagaaataattatatgaagaagaagaagaagaatacaaagctgatcttttttgttcttcttatgatgatgatgatgatggtgatgatatacagctatagttacagctataactacaataataaaaataaaaataaagaagaagatgaagaagaaaggaaaagaatctctcatctcatctctaattcactttttatatttatattttatttatatataaaaaaaaaagacagagaggaaatgaaatgaattttataaataagttaaaatgctaaaagataatattggtgtcaagtatttttttttgtgttatgacactattaatgtactattagtgtaattaagtatcgtatcataaaatttaaaaaaaaaattgttttgaaaaatatcgctaaccaataacacactcactattagggatgttcgtgatgtaagtggtgcaggttgtagtcttttttttttcaaactaactgcatttacagtttttataatttctcaaactagagattcactacgagatcttaaaactacaaaaattttatactatcatcattattaaacattataataaaaaattaaaaagcaaagtttaaaataaaaaatcttattaaagtttaaacatcataatattattaagtcattatattaaattgtttttaaaaattaaaatcatatacacatacatatttgttcttatatgaaaaaaaaataaaaattatattgtaaaaattagtaattttataatatatactgcggtataatttgaaccataatcattaaattcaaacatgcaaatcgtactctgcagtttaacaaaaatataaactgcaattatattgtaaaagatttcatataatatataatactatcagtttgtgcagtgtagacggtttgataaacactcgtactaatatagatataattaattattagaagattaagcgacttttgtcttggggccatgcaaaatacaaaccttttttatattatttatttctttatttattagcttaaagaaaaagtaaaagaaataaaaagaaaaaaaaaaaagagtaatttccatcaaattattatgggaattggggaaaaagtagtccccaccgccttccctaacttaaattactttactttatactcatttttatttgattctttttaattaataattcattttttaacaatgaattaatattattaataagtgaagtgtgtcattatataaataggattggtcataggtcataggtcataggtatgccaacctatactataaacccttactctatctctaatgtctcttccaattacaaaatacaaaccaaactaaattaacatttctcttataaaaagcatacaatttcttcttcacaataataattaagaaaaaaactatttattaatttggacaatgtcataaccacttacttgcttgcttctaatcaaaacaataatcatatatccacacattttatacattgatttatatttaagataatatatctcactaagttgtgatatgtcaaataaatatgtataatattttggtgtgcacaaactaaccattaagaatttgtttggtattttgtgtaagctgtttagtactccatttaacatataagctttatgtattatattaaataagggaaatttatatatttatattgagcattattaataggtattagtagtgcctagtaccttctaaacgtgtcgttttacgattagttagcgatacttcataaaaattattatacattaaactatatagaacctgatacttaattttatcaataaagatataagcacgtagaagggtgctaggcaccaataataccctttgacatttctcatttatatagtaacatgaactgtatcgtattaattacgacacttattttaaaataacttatagtgcattgtagaataaataagaaaagtgatatatatgcccgtattataatattttatgaacttcagttgtatcgtagtaaagtcgaagttggggttgaggtttgtagctaggtcaggctcgaggtcagggtagatgtcgagattcaaggctagggtcagggtccgaggctagggtcgaggtcaaggttcgaggtcgaggctaaggtcgagttcagggctagggctgggattgagggtcgggcttggggtctgcaactgcggtcagcgcctgggttgtggttaggttggggttggagtttaaggtcagggtcggagtagagatcgaggtcggagctaagcctagggtcaaggttctagaaagatttaataggatcgcaattaattcacctattttcatttatttaaaataaattctaaaacatatttatatgaaattgacaataaaatgagtatttaaattatcgttaaggaaatgtattcaaataattcattccaccaatctttttattctttattttttgttatcgcaaaataataacaatagattgataattaaaaaaaagttacaagtgaattgagattttaattatggtatacaacctctataggaggtttgagagtgggtcgcgattggggtcggggttcagggcttaggtcgaactccaagatcagggtgttggatttattttataagggtcttatttactaatacttactttagtaattaacctaattagtgaactactttaaacatgctttctataacaaattaaaacaccttaagtttgagtatacttacaacagtgatacagtaaaattaatgactcctttcgttaagtattataacccttgaatcatttatgtagcagagtatcatcaagtactgaatccaaatattttttattgttaaataggtgactgaaacactacatgatctttctcagtgtcctgtgtatcacacatgactaatgtggacaatttttcaactaactaagaatatagtttatggctgaaatcttcgagaaagaaaaatagataaatatttgaaattaatatagagaaagaaaagagatgtagttctcatgttttctaacaactatagaataagtcaagtcattagcctaattctagttgcatctatttctttatatatgtattcaagtggcatatgttaaatgaaaataataatattttaattgtgttatgctcatatttcgagcgctaaatatagacatgaaacatgtccatataggtctaaaagaataaagagaataataaatacgatgaatgaataaatgactcgcctcaggataaaactacggttaaaagatgtattaacttcgtgtagcacaatctatacaaatgagttatgagaataacaggaacataagctaatcctcggggcttaaccaaaataaacgagatacgtgaattacttgaaacaatgagttaagtagaaagggtagataatgagttcattaagagcttacaactcactaacccacacactcatgagtatgttgaaaggctaaaggaaacaaacaaggtgtgacttgtctcagaattcctaaagactagcccaagaattactatgaaaggcaatagtgaggacaaacatcttaaccaagcttcttacggaatacaactagctattcttgaacactattgaaaaatgcgagccatagttagaatatgtaatctcagcaacgaaagtctatcctgataagaacaaaaagcagttatcaacaattatttcattttatcatgttgtaaatttgaaacgtgaagattgtctacgtttcattaatggttatttatataagatcaatagagaataattatcattcttaaaactcctataaatggaaacataacctacgcgaaaagggattgatcatgctagggaagaaaaagctttgtgagattaagtgaatatccaaagaatatctcttataattaagaaactttagaaagaaataatactgactcgtaaattatgtagattttaactacaaaaccacgtaaaaattcttagtatttcatttatatttactaataataaataatcaattttatttacaatacttcatttattgttaacgaaaatttgagttaacaaattagtttaattatttaaatctttaataatattccctattagaaaatgaccaattaaaattattttttaaattaattaattagatgaaataaaaagataactaaccactataaaatatgtgggctgaaatttatagtgttgaccccacaaaatatttttgtctttttgccactatttttcagtgatatacatacatggttgttcaaacttcaaagttagccatatgtccaat

SEQ ID NO: 36305 - DNA, 16024 bp, Cannabis sativa
ttatttaatcttaaacctaaaaattcttttccaaaatatttgtgaaatgttcattgttgtaaacttcaataacatcaacacagaagatttatgaactaagattcttaatgcctgaaacacatttatcaaaaatctcaattaacagttttcattctattttgtcatttaatcattgatgttacattgtaaataatatttctctcccacaaactttaaccactactaaatcaaatccctttattttttttattaattccaatatattttttaacaattattaaacaattaagtccaaactttaggaaataagaaaaaatcaatttaaatgatgaaaaataccaaaatttaaaattaattaagctatttaaaaaatatatagtttttatttaaatataaaagagaacaaacttaaattcctttcttttttttttctttttctttttagaaaatctaactttgagtaatcataatttttttttttagtttaagttgaaaaaaaggaattttaaatatatattttttgaatttttagtaatttttactattctttaagatatgagtatgtaaatataaatgaacttaattcatataaatatacatatattttttgaaaatctgtttagtttacacaaattttaatattttccattacttttacaaatttgatcatattcttaatattttttgttgatgtttaaggcatgagtttgtgaatataattgaataagatataaaataacaggctttagctacattaaatttaagttgaaataaagatgtttataaaaggataaaatttagattaaaagaatgcatacattagaccaataaaatttaagagaaaaaacattaattttagagcttgtttatgaatggagttgtttctcttctaagtaatcaaagaacatgaccataaatttgagggaggcaatcacatattaattaggaacttcaataaaattaaattaatgccacataaaagtaaatactaaataccaaagaaaagaatagaaaaacatgatagtatcaattaggaaaaagatagaaaaacatcaaaacattcctcgacatatacttaacgttccatatctaacatagtaacatgttaatcaataatgtaacctaacacattctcttatatatttgcttcacttttaagttaagacaacccaaaaggcacgtactatttgtgaaaagaaaaagaaaatcataaaagcaaaagacaaaatatttttcaaaaaaaaaaagacaaaatatttgtcttagtccttcgttttaaataataatttaaatacagtatatatattttttccgaacaaagatcattgctattgtcctaaagaaataaaataaaactatcttagcaaaaaaaacacataaaaataaatagatagaaaatgtgctaaataaataataataataaaatatgtagtaattgaatatgtggatttttgactgggtagccagacccagagagagaggccttcttccataactagctatatccgccattttctctcgcgcccaaatcgcttcttctctctctcttcctctttcatcgattctgagttttttcttttctttccctttcttgattattttctatctattatctcttcaacgcccaatatcgtacgacgatctccaatttattggattttctcttctccgaggtaacaagttcgctccgttttccctcattagcatggatttcaatttaattttattttttttcagcactactatacatttgtaatgatctatacattttcttttgacgtatattatccaatagatgttcgatcagtgttgagcttctaagatacacatttatctatgcatacacatatatttattgatatgttattgtggcgagaaaattctgtatatggagcttgtcgatctggtgcattgatcagtttacacaatgtcagaggagatcgatcttcattttggtaattcgaacgattttaagtgtagccgtgaattttattgtgctggatctatgataaacttgattggagcttttacgtataacatcttcgatagttggcttattggaagtgaaaaaacacgacaaagagatctgggattaatcctttgggttatttgatagggtatagtatgttagttgattagtgatttaaattgattacttactataaaaaatccaagataactttgatagggcactgtttgcttaatgcgacataatgcgtggaaacatgaaaatagacatgtaacaaaaggggctgtatttaactgcaattgaatttcttatgttttattagaattaactaattggtactgtttctgctttcaaaagaaaaaaaaaaaactaattggtactgtttctcaatgatcattttccgctggagttgtttcatatttgcaaagtgcttgcacaaaaatttggtttccttagcagccaaattatgtcctcttctgtttctatatttctcgaagtaaggttattttgttgtgcaagtattagacaagacttgatcctcattaatattctacgattatatcctgctcttgcttatttcttccttttgtaggttcctcggtttgcatattatttgaatgaattgtaaggcgtaattataatggaagaagaagaaatgatggaggtagaggaaatctctaggagggaatccgataatcaggaagtagttggcggtgtacagggaaatgtaggttcatcttatcatcaaaatatcagccttcctgaaggtgatatatcgctgattaatgacaatgattcagtcttgcaagggatgcattcagtaaatttatccgtcgatgaagatcagtttgaacaggtttctttgaaagatcaagagaaagctgctgttaatgattcaaatcgatcatcaaactcagataatgcaagatactcctctggtgggtttgaagatactgcacaattttcatctggaacacttacagcagaatcgggttcttccccagttgaccaaatgctacatgatcacccttcttggaactctcaacaagacagacaattcgattctatcaaaccatccacctcttccactagtattgattctgctttgtacgaggatgcttcatattctcctgttggctcaccagcaaaaccgaagccaaaagctgccatgccaaatgtatccccggagttattgcatttggtggactctgctattatggggaagccagaaggtttagaaaaactaaaaaggattgttaatgggttggagaattttggcaatggggaggaaatggagagcattgccttagtggtagttgattcactcattgcaacaatgggcggtgttgaaagttttgaagaagatggggattgcaatcctcctagtgtaatgctgaactcccgggctgccattgtggccggtgaacttattccttggctcccttgggaaggtgatactaatagtatcatgtcccctcgtacacggatggtcaggggtttgcttgcaatattacgtgcttgcacaagaaacagagcgatgtgctctatggctggtctattaggagtacttttaaggtcagcagaaaacatttttgtacagaatataggatccacagagcaaatgagatgggatggaactcctttatgctactgcattcaatacttagcgggacattcacttagtgtcatcgatttgcatagatggtttcaagtcatcacaagaacacttagcactgtttggtcaactcgcttaatgattgctttggagaaggcagttagtggaaaggagtcaaagggaccagcatgtacttttgagtttgatggtgaaagctctggtttgcttggtccaggggaaagccgatggccgttcactaatgggtatgcatttgcaacatggatttacattgaatcatttgctgatacgttaaatacagcaactgctgctgctgcaatagctgctgctgctgctgctaagtcaggaaaatcttcagctatgtcagctgctgctgctgccagtgcgcttgcaggtgaaggaacagcgcatatgccacgtctgttcagtttcttgtctgctgacaaccagggaatagaggcatacttccatgcacagtttttggtggtggaaagtggaagcggaaagggaaagaaggcttctttacattttactcatgcattcaagcctcagtgctggtacttcgttggtcttgagcatacttgcaaacaagggctgcttgggaaagcagagagtgaactgagattgtatattgatggatcattgtatgaatctcgaccttttgagtttcctcggatctccaagccacttgcattttgttgtattggaacaaacccgcctcctacaattgctggtttacaacgtcgtcgtcgccaatgtcctttgtttgctgagatgggtcctgtctatatttttaaggaaccgattggccctgagaggatgacacggttgtcatctagaggaggggatgtacttccttcatttggccaaggagcaggattgccatggcttgcaacaaatgaatatgtgcagagattagcagaggaaagttctcttttagatgcagaaattggaggatgtatccatcttctatatcacccaaatttacttagtgggcgattttgtcctgatgcttccccgagtggatctgcaggtcagataaaatcttttatcatcaattgatttgtggatattataattttatttttttttctctatagcttttctgcaataatattattcaacatatttttagctgcagatgtgcatacttttattttctagtgaagccgatcttgcctaaacaattcaaccctagtttaacaaaatagttttcattttccctaactcgtagtcacttttttttttaatttgttttttttaatgatgtcaccgttcattaacatttatacttgaaactgtagcccactacctgccacaaagtgagtgaatgcttgtttcagtggagggattaaatgaatttattttttactttaaattatatataatttgatgattactgggtcaaagtttaagggagaatttatctttagttccctgttgaacttgtgtttgttttacattgtttatttttctgttatgatgactcaggcatgctcagacggccagctgaggtcctcgggcaggtccacattgctacacggatgcgaccagtggaggctttatgggccctagcatatggtggtccaatgtctttacttcctctagcagtgagtgatgtaaataaagacagcctggaacctcaacaaagtaatgcttctttgtctttggccacttcttctcttgctgctccaatattccgaattatttctatggctactcaacatcccaggaacaatgatgagttatgtcgtgccagaggacctgaggttctgtcaaggatcttaaattatcttctgcaaactttgtcatcccttgatactggaaagcacaatggtgtgggaaatgaagaacttgtggcagctgttgtctccctatgtcagtctcagaaaaataaccatgcacttaaagtgcaactttttagtacattgctattggatctaaagatatggagcttgtgtaattatggactgcagaagaagcttctatcatcacttgctgacatggttttcaccgagtcgtcagtaatgcgagatgcaaatgccttccagttgcttctagatggctgcagaaggtgctactggacaattcgtgaaagggactcggtgaatacattttctttaaatgaggcaacacgaccagtgggtgaagtgaatgcattggtcgatgaactcctggtcataattgagcttttaataggagcagcacctccttctttggcttctgatgatgttcgtcgtctactttggttcatggttgactgcccacaaccaaaccaggtaactttatttgcaacattacctcttttgctatttaagtgcagttcacatgcatttaatagtttaatatcttaagtgcagttcacatgcattttatgatgtatattcattgatggatactaaaaaaatttaatcataaattttaattttaaaaatattaaactattagattttgatctgatgaataataaaaaagaaatttgagtttctatgcttaattcaacttcttaattaatgagatataaaaaaaatatctctatttactttatatcaaaaatgtgtgtatataaaaaatatctaagtcaaattcaattttttttttctttttgctgaataactttttttttttctctcaaccgatggaataactccaaccctatgcacaagttgcggctaaaatacccaatgttttaaaatgtaacactcttatgtgtattatatttttttatggtaaatatccatatgttttacatatattgcacttttatactaatatttctttttggcggtaactatatcaaatgttttttaaatgctacacttgtgtggcatcatttataaaaaatctcaaaggtgtgtatttagtcacggctgccatctaatattttaaaagattgggtataaaagtacaacctttgaaaatattgggtatatttaccataaaaaaaaggatgggttgttttagccacaatttactccttctctttgtatacatatctattatattttaattaagtgactaacttttcaacacacatttgagttttttttttgaacagttaacaacacagatgagttaatgctgacagttctattaatatttttttcttcaaggttgcaagggtgctgcatttgctctatcgcttggtggtacagccaaatacatctaaagctcatacgtttgcagaggcattcatagcttgtggtggggtagaaacacttttagttctcctgcaacgggaagccaaaactggtgactgtagtagtcatgaatccccaaccaaaactgacaaaagtttgttgatcgagagacctgaacaagatggtggaagtgagagctctcgaaaaatttcagaggatgaaattgaatctgatgaaaaggaactgagttgcagaaagaatctcggtgaatctgaaacctctatatgtagtatgagctctgctgctgttgccccaaatgtgacttttgagaggacaatatctatttctgataatccttttattaagaagaatctgggtgatataagtctttcaatcagtgctgacagtgcaaggaataatgtttataatgttgacaaaagtgatgggattgttgttggaattattgggctgttaggggctttggtagcatctggtcatttaagatttgattcacttgcttcctcagatgccacaaataattttcttggaactgggctacatgatggaggtggtaccatgtttgatgataaagtttctcttctactttttgctttgcacaaggccttccaagcagcaccaaaaaggctcatgactggaaatgtctatgcagcattatttggggcatcggtatggacaatccaaggcacaagttgtacttttttttttaatggttgcttaaataattattcttgtaattgttgaaagttgtatatgccacatattgacctgttatcctctatttgatttcagatcaatgcttcctcaacagatgatggactgaacttttatgattctggccatcggtttgaacactcacaacttttgttggttcttctacgttcacttccatttgcttctaggtctttccaaagccgggcactccaggtaccacttccatgtttttgattccgtaatatttatctagatcacacctggatttctttttagaagaacgttattctgattgagaaagtaatatcggatggttcttttttatatgatttcaggatcttctgtttctgacttgtagtaatccagaaaatagactcactctcacaaaaatggaggaatggccagaatggattctggaggttcttatctccaattatgaggtaaaatatcctccaatttaactctgaagtttttttttttgggttctcaattacaagtatattgcaatttttttcatttattatatcttgtattccttaagttgaggaagcaaatgatatgagaacattttaactcaaaagcagaagtatgaaacatttgtggtacatgtgtattttcctggtaatgttcttgtagatcatactgaattggcataagacctgaatttttttttgtagagcttttgcatcttccctaggtgcagtgtagaagaatacaccatattcatgtattccaattcaattctttttacagatggatgcaagcaaaagttctgattctgtgagcctaggagacatagaggacctgatacacaacttccttattataatgttggagtattcaatgcgccagaaggatggatggaaggttgacatttttcttaatcttcttgtttgtttttcattttttttttttttgttttcttattatttatcatccgttaaaaagtggctttagtcctttattatgcagtcgcactataatgtaatggttttgcacagtcttggtgcttcatagttttgcctcaatgactatttgaattaggcatcccaccatatgttgtcgtgaccttgaaaactttattacaagattactaacttggaaagggaaatgatctcattccaacactcgaaacatgcatttgtttctttatttgtgaggtgtttctttccatcgtacctcctatttaaaagtttctcagtgcctattacttgcattagttttgcccatctctcctggattagcttacttattttagtaaccaaaaggtcctaatcacaaggttatcaactcaaaagtatatgcagcctatatttgtgatttttaagaatggccatcaactataggcggcaaacagaaaatattgcactttggtctcttatcatttatgtaggaataccaaggttgtggattcttacgaattctacactggcttggatttacatatagcatattctagtggataatgcctttggctctcgtctttttatgttgcaaattattgttacactgacaatgccttgattgcttttttattttttttttcattttattttttatttttattcagttggttttattcatacttatttttggttccttttatcaggacattgaagctacaattcattgtgcagagtggctttctattgttggtggatctagcaccggtgaccaaagaattaggtatacactgtagaaaataaagagaattcctttcacagtgtcagatttatcctgtttaattactaaaaatagtttgattaatcactttattgctagcttttcagaggacattttgtctttagtttgtaattgctttcttaattatgtttcatacttctcatgaaaaaatgtgctcatcttttaagacgggaagaatcactgcccatatttaaaagaaggcttttgggtagcttgctagactttgctgccagagaactccaggttcaggtaaatttgatcctttgtttttttagggaaggttcaatgtgatttattcagagttttcattcatcttttttaaagccaattaggatgataaggctaattcctccctctcccctcttccccttctttccttgtgtaagtagtttggtttcggtctactcttcttttaaaagtaggcatctcgtggttttataacaagttctttttacttatgcgtggatgatatttttgttctttttctttccttccttctagttagttaacagaaagaatttcaaaaatatctacatccagcttttcttttgtggcagactcaagttattgcagcagcagctgctggagtagccgccgagggattatcacccaaagatgccaaggcagaatcggagaatgctgctcagctttcagtggctttggtggagaatgctattgttatattaatgcttgttgaggatcacttacgcttacaaagcaaacaatcttttgcttcccatccaacagatggttccaaatctcccctttctcttgtatctcccctgaataataagttgaattcatccagtatggctggtggtggatcattagaagccattggtgatcacagatcattgtctagtgagcatgggggactacctgttgatgtaagcatttggttacctatagttgcagtattggcttctagaggatagttatcatagatttgatgtttttcatcttctcatttatcaaaataatttagcatgtgattaatttgtttattaccagttaattagtatttttctccccatcccttcccaaagcaaggaaaagcaaaaattacagctatcaactagccttaacaaatatggtcaatttttctttagctggtgatgattggttgttgaagaatctatttttgtcttgcatttagtttttctttttttaaacagagcattaatcatccctctttctaataccatctccccttgtaaaggatttgttttcttttgaaggaaaaattataattcatggcttcatattatttggggccaaacttctttatacctttattctaatcgtgattttctttcgatgtttacttcacatatagttttgacccaggttctgtaattttttcctccaagaaagtgttagtttttgtattaattttagtgatattttactctcatatgcaattatcaaatcttaattcttttgagatggtgaccaggttcttaattcaatagctgatgtgaatggtaaagtctctgcaacagtgatggaaagtcttactgctgctgcagcagctgagccttatgaatctgtttcatgtgcttttgtgtcatatggaagctgtgctgtggatttggctgagggttggaagtataggagccgactgtggtatggtgtaggccttccttcaaaagaagctccctttggtggtggtggcagtggctgggaatcttggaagtctgcattagaaaaagatgtaaacggaaactgggttgaacttcccttggtaaagaaatctgttgccatgctccaagccttactgttggatgaatctgggcttggtggtggtcttggtataggtggtggatcaggtactggaatgggaggcatgtcagctctttaccagttattggacagtgaccagccattcttatgcatgcttcgaatggttcttctttctatgagagaagaagataatggtgaagatagtatgctcttgaggaatgttagtatagatgatgcaaagtcagaagggaggaaaccacgctcggctttgttgtggaggtacttaatctatccctttcattctcacgggtttctaaactgggcctgcataatattctcattatagtcttgagataagaaatttggataaaatattcacgtttcaaatttgagaatggggaagtaatataataacgtgattgagacatgagtatgtttttttggcgaattcttctgctgaaaattattttattagtactaatgtgattactgtcatcttcgaaatgtattttgttgtgtcttgctgttaccttctcccaatatagtgaatctgagctaatacatattgctgtttacagtgtgctttcaccggttctaaacatgccaatttcggactctaagagacagcgagtgttggtagcttcttgtgttctttattctgaggtaagttctttgtgtactaaatttctagttttaggtgttgtttcataatagaaaaatcacaagtagattttggtcaagtttgcttgctatgtactggcatagtttttatttatatttgtgtgtaatggaagagtctttttgccatgacttcatgctaaaactgccattggtcacctttctgatagaaagatagaatatttcctctcatgtaaatctatgtgatataacagttgttttactctgtttttttttccattcaaatattatacatttgtagctgtttttatttaatgcgactactgtatgaatcttgcaggtttatcatgcagtaggcagggacagaaaagatcttcgaaaactgtatcttgaggccattatacctccatttgttgctgttttgaggagatggaggccacttttggctggaattcatgaacttgcaactgcagatgggttgaatccgcttactgttgatgaccgtgcattagctgctgattccctccccatagaggttattttagttgtctttaaaacttctatctttgatgcgttctaaacatctgatttatatcaatctgttagttcttgttgttgtgttgtgaataatggagaaaattattcggcgttgattatgatactatacattcttcattttaaatattatatttgttttgtagaatggcgcttgtataagatattgacgttcctagtagagttcgtacaaaagttttgccttttgtttcttagtaaaaaaggtttactaggacttctttctcacatgtctttgtcaaatgattccactttgctttatctttcaggctgctctggcaatgatctctccagcttgggctgctgcttttgcatctccacctgcagcaatggctctggcaatgattgctgctggcgcctctggtggggaaaatccagctcctgcttcaacatctcagcttaagcgtgattcttcgttacttgagcgtaaaactgctaggcttcatacgttttcaagttttcagaaaccttcagatgctcctaacaaatcaccaggtcttccaaaggataaggctgctgcaaaagctgctgcattagctgcggctcgcgatctagagcgtaatgccaaaattggttctgggagaggccttagtgcagtggctatggctacatctgcacagcgacggaatgctagtgacatggaaagggtgaagagatggaatgttgctgaagcaatgggagtggcttggatggagtgtttgcaacctgttgatacaaaatcagtctatggaaaggattttaatgcattatcttataagtttattgctgtccttgttgcaagttttgctttagcaaggaacattcaaagatctgaggttcactcatgttcaccctctttgtattcactacttcttcatgtggcacactatatttatattctttgctctacaggttgataggcgtgctcgggttgatgttatcgctcggcatcgtttaggcaatggagttcgtgcatggcgcaagcttatccattgtctgatagaaatgaattgcctttttgggccatttggggaccaattatgcactcctccacgtgtatgtaacaagactactatcatttaaactgatctgctgaaattgctttgtgtttattctgatttctattggtttataattttatttttggtttcttctcacacattgttagtttttcaatcttaaaactcttattgtgcaattgtaatggcctttgagctttgccgtgtcgttttgagattttttctattgatattcacttgggattattttaactttcgataggttttttggaagcttgattttatggaaagttcatctaggatgaggtgttgtttaaggagaaattacagaggctcagatcattttggtgcagctgccaattatgaggatcatattaacaaggaagaagataaagaaaatgttataaattcatcaagtgctcctattcttgcagcagaagcaatctcaatggatgtggtaaatgaagatgatgaacacctggaaattcataatttggatggcaggtcctatggtattgaagaaagtgtggagaatcaatcacggctatctgtgacagctgagcaaaccatatcagttccagttgaatctggtgatattcgacttgctaatgaccatgacttggttgaaagttcatcagcagtcccccctggttttgttccgagtgaacttgatgaaagaattgttcttgagcttccttcatcaatggttcggccactaagagttatacgtggaacctttcaggtaactttattaagcatgtgtatgatgtccttttgtaaatatctatttcttttattactaatttaataccttgcttcagaaattttttgtgggggcctacctcgcaatgtgctaaagtgtactgcctcccaaagattgcagggtataaaaagaactgaaaaagatatacaatttttgtcttggtttaagctcatgatatttggtttggtgatcatgccatagaaaggaattagagaatatgttttaagattgcattagaaagtagagtcctgtgggatgttttatattctgggtttcattgttggttgttatgtacaaggagtttaaaatgttctattctgtcttgggagtatttatttatggtgtgtttgtttgacgttctgtttcttggatgaggattccttgctctctttaatttttcattcatttttcttattattgtactcattgaataaaaaatacacttttctgcttatagtttatatagaaagaaaatggaagtaagaaaaaaatacacttgattgtgcctgtgttttccatactatcagcttacaaagtttatgatatttacaaattctttcaggtaacaactagaagaattaattttttagttgataacagtgagaacgatcctgttgtggatggaatagattgcatggaaatgagagatgaagaaaaggaccggagctggtcaatgtcttcccttcatcaaatttatagcagaaggtgaattaacagagaatatatgattgctactacctttgtcttgtagatttcttacttttatcaacaaactaatgttagcgttagctttctgatttgctaattatacccttcagtctgttgcggtggttcctaggaaatttttctctgcattggtgataacaaactcttttcttctaaaaggaaaggcagaattcacactattttactataaattcgtatattctaggttttgtttgttacttacggctcaatttactttggttaagctgtttgatttttggttcattggttggacttatccacccaataagaaaaactctttttttttcctttcctttttgactcttttggttggttttgattgcctcttgatttttgacctcattagtcttttggtaaaattatccagtattttcatgattgatacgacttttcatgattgatatgatgtttcatgtttcaatgctttttcatagtttcactgatttttcatgtttcaatgctttttcatagtttcaatgatttttaatagtttcaatgcttttcatgttgaaggtgttctcgtataatgttgcctatgatttataatgtacgagaaaccaacacaactcttccaatagtttcttagttacttgaagataggacaacaagtccgtataggctgaattccagaatatagttgatctagggctattcattcttttacagactaaacgtggattactgggcctaatttttgtcatctgcataatggtatctttcattcctaatagaatgaattgacccctcattgcgcttgtactgatgatttttgtttgctattgtgcctttctctgatttatgtagagagtggcaggctttctcgtaatgtttgtgtttccttgcctgtatttcaacatctttcttctttgtacaccttctgtttgtgttactctttatcatatataatacaagtaatgatactaagacgggtagctcaaatagtttcctacaagttcaggttagagtccctcccgggtacgtacatagaaattgctctaattttctggtccctaaatattgtagggttaggcggggatcctagtcccaaaaaaataatgttttgcttaaaaaggaaaaaagaaaaagagaactcggcagtggaagtttgggagaaaactaaattctgggtagcaacttggacttttaagtaaatattttgaggatttgtcatttttagatttatgtagggattggggtaatatactgtatagctagagttatcctatgggggatttgatgctactatgatagtagatattttatgttttatttatattgtagtatctctattaccacggttttcctttgccacaagtgaggcttttcaataaatttgagtggaggtcagtttaagacaagtgaccactctctctctctctctct

SEQ ID NO: 36306 - DNA, 8838 bp, Cannabis sativa
tccctataccctttcatgtaacatgaggtcaccaagaatcatagccgaagtaatcctaggattaagatctttcgggccaaagttaacaccatcagaacatgtccaagaatagtgccaaaaatcaacctcggactttttaccaataatccacaagctgttgtctttgataaaataatgagtcttccaaatccctctcaccacaggcgaggcagcgtggggcaaagaaccaccccagaagttagaggagtggcaatactttcccaagaggatatgagaccaaggagtattgtgtttcccaaggccaccactgcttttaggtaggaaaatggaactccaggtcaaaagagacaagaagcgaccaccctccatgcctccaatccaccaaaaccgtcgcaccatggcatgaagagttttggtaattttcagagggagcaaaaacactgacatagtgtagataaggatggaggagataatattcttaataagcacagttctagctgcctgtgaaagaagcttggccttccatccttccatacgacttctcattttatcaacaacgaagttaaaatcttttgtgcgattaccactcacgaacagagggttacctagaaaaaccacctccccatccataatatcaaaccccaaatactcagagatattaataccacagctcacctcacaattctttgagagaaaatttttggatttcccttcattaattctctgtccagactagaggcaatatttttccaataccccctgaagaacattcacttcctgcaactctgctttagtaaaaaaaaaatagcgtcatctgcatacatgagatgggaaactgtaggacaattccttgagactctataacctgttatcatgccctgttgttccgtatccaagatcagccgagaaagaacttctaagcaaataataaagagatatggggacaaaggatccccttgcctcaaccccatttgaggtagaaaagctttggggagaccaccattcagcaaaacctagaaattcaccgtagaattacattccataatcaaactacagaacaagtcactaaacccgaaggccttaaggacttttccaacaaagggccattccagctttgttgtaagctttagacatatcacactttatcccaacaaaagcttgtctcccttatttcgtacccatgtcatgaataatctcgtgggcaatgatagagttcttagcaatccatctacccttgacaaaagctaattgatacagagaaataatcttattgagaacaggtttgatcctattttccacgatttttgcaacaatcttgtagcaaacattgcatatactaaatgggtaaaagtcatcaaatttacaagtgttacttcttttgggaatcaacaaaatacaagtgcggttaacctccttagtaaacttgccagagccaaagaattcctgaaaaaaaaataaactgtctgttgccccacgatatcccaatgagacgtatagaatttagcagggaaaccatttgacccaagcgacttcaactgcgacgtctcccaaactatatttttaatctcctcccccgaagggattgctacaagagcaacatgctcctcattggtgatgcacagagacaccaaagagaatatttcaacatcgatcactggcttggtagaagtgaaggactcaataaacttagatctgaaatactccaccacatgagccctgtcatccacccaatgagtaccatcttcttagatagcccaaataaaattcttctttcttccaacaactatggaggcatggaaaaatcaagaattacgatccccctctttgagcgagagctccctagatttttgtttccagatagcatcttaacgtgcctcaacatcatcaatttctaacaacaacgcactctcaattttagtattttcatgggacggggcccgattctaaatctaagtcaaaagcttctctaggaggtccagtatcttcctacagattctgaagcattctttgttccatttactgaatgtagaagccgtacatcaaagtttagaaaaaaggacatagttgtggtaaccatgaaagatctactgctaagcctcaagaatgatccctttatagcctccatccatattccaggcatcaagatactaaaaaagttccttaaaggtggcggtatccattatggtattaagaacaacagtcgagtgatcagaatgcctaataggatgatttttggtggcagctttggaaaattaagtgatccaatttgtagagcactcgatccaatttatcctgaacaagatgattccagttttgaccattggaccaagtataaagggcccacaagccttcgaggtccacttccccacaatcaaacataaaagtacgcaggccacgcccttcactttcacaaaccgccctaccactgacttttttgttcaagttgaggatagcattcatgtcccccatcactatccaggcatcattaaagccattaacaatcgaagtcatcaactcccaaaaccggccatctctttcgttccttttaggttatgcatagatgaagcatcccatccaaggcttcaagctcctatcttcaccaaatctcacgataatcttgtctatattcagagaaagaatatgtatatcccatcccgctctccaaaaaagagccacacctctagaggcgcctaaagaggagaaggccacaccattaatgaaacccaacctttgccaaatcccttccatatcagagtcatttcttttcatttccatgtgaaaaaccacatccggaatcacactactaatcaaagatcgtagcaatttaattacctgaggtttgccaagaccttgccagttctaggataggatcaacataagggattggggttcatgtttcggcccgcctctcggctaaaaaaagtcctccctgccttcctcattggcaacacctttatccccagcgtaagtatcttccccaatacccttaattccatcaccagatttctgtaaggaatcaaaagccaaaggagtagagcaagagggaataataaaaatattatttataggtgataataacttatctttttccttagacaatgcataacaactctttttagttgaacccgagtccacagttccccgaagctaatctttgtccaagcaaaatgagtccatctccaagtgatccaatcttcttttcttccccgggctagggccagcaataataggcccaaaagacttttgtaggcccaatatatcttttctcacaattcccttaagttttgtttaagacttttttttgctgaattgttacttaggtcaaggccacttttgaagaccattgccaagtgtctaatttgtgattttatgggccccggtgtgtcaatcacgtcaactccactatcattcttcgtacgagcagtagcacaaccctcaatcgtactacccttatgcatggctagaatgtcctccactcccacgtccaccaccttgataggccgaggagtatcaaccataagccttagctcaaatttgaattcaccgtgatcagctgctcatcgggctttgccatgatggactgctccctgagaaattcttgatggatattagtgttaactaaccctggttcaaactctaaaatgctgccttgagggggaagctcttctcgcccagccacctactctgaatcccttccaaattttttgacagcaacttcctcttcaccaatcctcaaattattatcatcaaactccctcgcagcctcttctgccataactcttttaaagtagtgtttcaattgagagccaaatctaacccaaggaccatacatcgacaccgtatggttgaattcattcgagataaaccgtcttcttcgcttacacccaatctcatcatggacaactattccacatttgaaacaaattcttgggaggttttcatatttgaaataacaccaaagacttaccccttcctccatggggagatgaagacccactcgcaatggttttttcagattcagcatcacacgaagccaaatatactctgtagcaagaaactatgacaccatatacgatcgatgctaatcacaccaccaatcctatttgctatagcaatagcattcttcttagtgaaaaacctagggggaacatcataaactgtgacccaaatgggaaccaagtaaaagttcgtagagttctacctaccatctacatcaaatggttttaagatcagatggccgccacaaacagccctacggctcctcgctgagacaaactccacctcactcttctttttgaatctaagcgtgtaggtattcgacgccacctctgacatgctccatccagcggacaacctccatttctgagttataacagagcgtaacaaagcctggaagatactcttggtagaaataactctgccaatagctgacctcactatgaagtcagagccaacctcaccgtcttccccatcctattctagggaaagagagagtgtatccttagacatacattcaaccatttccattatttctttgcctttgctagacgcctagcccaacaccactaactaagagcaattagaagcaagaccaataacgagaaatcaaaagagaataggaatgcacaacggtccaagatcactcacaaaggatcaagatcacacacaacagtccaaagatcactcacagaggatcaataatgaaaccttagacatgttaatttgtgaaaagttcatttgtcatttttttgccatgttttttttaatttagaaaaaagtcatgttggaaaattatagatttgaatttagtcataattaattcataagaatcaaacaatagaattaaagattagcataagcgtatccaaattcataaaattgatattagaattgtatgatttctaattttatatcaaaattctttagagcctctgttatcttgatgatggggattcatgactattaaatggtacgatacgatgcaaaatgagggccgatatctatttattaataaatgtaaaaagagtaattaattatttattcactatttttaatctgacccctcatcaaataaaaaattatcttaatggtatctacatattaaaatcatgacaaacatgcctttaagtcataaactttattccaaaatcgaccacatatatttgacacatttatctaatgactcagtacacatttttatatatataattgtaacccaaaataaaaaatttataacagtctcaccattgcatatgtactacatactatgtagtcatagaaaaattgtataatttcttttatttcactctaataagaaaaaatagattcttttatgtttgatagtattactacgtatctttccttttattttagcataaaaaatacgctattttcttctaaatgtaaatatccaaaaaaaaaatattctttggatatatcgataatacttcaatctatttctcctgatattgccaagattattatattccaagataaagttgtaaatatgttgaatgaactccatgagagattcaatcattgagatgtgactagaatttttgagctctaaacctccatttctagtctcaaacaaggtgttctaatgtcacttcctatttcactcgtctcaagtctatttaggttgaaatctgtgagtttgaatccttctccatgtatctgtggttgcacctataaatggtgccatgaagaatatgcaagactgttacaatcgagaccagactatacaatttctcatgggactcaacgaatcctatgaacaagttcgagctcagatcctactccataacccagcctctcatttgtctactgtttttccatgattgtttaaaaagaatgacagtgaggccttagaagcaaccctctcattgttgccacattcgcttcttggacctctgctccaaaagccaagaaatcaagaccaatgtgttcaaattggaagaaactagttcactgggtcgataaatgctacttcctccacaaatttcccctgaatatggagatacaaaaaaatctaaagaatcctccaaacttgtgatgtaatcaaactacttccacttcatctcccacaagaaagctttcttccatgactgtagatcaagtccaagagctcatcactttgcttagccaatccctcgagcagtcatccgaaatgcctctcttggcgtctaacatttctggtaacattcataccctttttggattattgatagtggtgctactcaccatgtttgtcataatccaaatttattttaatctttttccaacaaattattcataaataatgttaccttaccaaatggcaaccaagttcgagtaactggcattggcactgtcaaaataaataatcatattacattacatgatgttttgttcatccctaaattctaattaagtattctttctgttagtatctttcttgatcactccgttatgcacatgtttttttttttttacttttaatgcttgttttattcaagaatctcctcagactttaaagattgtgattgctaaaaggcttcgcaacctctacttgttgcctcatacataatcaaatgtctccattttgtctataaatgcttgtaataatcttttgcataatcgccttggacatcttgcaatgtaaattactaaacagtgaacacataaataaagaactttcctttttcaataatacatctcactcttttttttttgtccaatctatccattgccaaaacaaaaacaattacctttttaatcatctaatactttatatgatcattgctttgatttagtccaccttgattagcattgaaggatatagatactttttaacaattgttgttgattcctcacgacacacttggatctattttctgaaaataaatctgatgttgctcgaatcatttctgatctttttatgtatgtggcaacaaacaaaatcattcccaaagatggaatgaagcctttagccaaaagggaggatatatttgcacaagatcttctataagaaaagtttgagcctttcctaaattgggccctccaaatgctcttccacaactcctccgctgccccatatgaggtgtcaagagagatatttaagtcaacgtttttgagaaagagccattcaaagaattacgccaaattagagtatcattaatttctgtaggagaaagtttctagtccaacatcaactcaacaaaagctggcctaaactagtctcttaaaacagttatatcaaaaaatattttacatcaacaagataaaataatcataaaaaatgaatatacaaaattgttatttttaattgaaaaaaaaaagaatatattgtaattagtaattttgtactcaatattgaaaaatgtctacatttgtttatcagcttgaaaatgtcataaatattttttttaatggtttagatgttttttttttgtagtattttaatctaagttttacttcaaatctaaattttatgaagtaaagggtatgttttgtaacacttttttttaaaaaaaaaattaaaaaaataaaaatattttcaaaaaacttgttctataaaagtgttttcattttttaatttcgaaactgagaatcaaaaattaaaacttataaaaaaaataactttcaaaatttatttaaatagtttttttttcttaattataatttatttgtactttctataattaatattttggaatctgatcccggacctagacttggccacaacccgaatatggccacaacccatacccaaacttggacccgaaccaggccccagactcggaccctaaccccaaccccaacctcagagccagactcgaccccgacccaaacctggacctgggccctaaaccttggatcccggccctggacgacaacccaaacccgaatcccaaactcggactcgaatcctgaccctggaccatgacttcaagcccctcaaccaagactctagactcgaacctagaccttgcacctgcacccgaacctagaccctgggcacagacactggacattggaccctggacctagaccccaaaccctggacccagaccttgaacccgtacctggaccatgaccggacacggacactgacctaaaccctgaacaccgaacccagacctggactcaaaccgagaactagacccgaactctagaatcgtaccatgactcggatccaaacccggcctcgtagccggaccctgaactcgaaccctaacttgtattgtggaccccaacacggaccttgactcagacacgaaaccagacccgaaccccaaacctgaacctagacatgtaaaagaaatagttataaaatacatttttaatttttattttataattacaaaaataaaagtagttatctaacacacttttattttttatttttttgtaaactaaaattccacttttatttttgtgattacaaaattaaaaattaaaatatttaccaaaggtggccaaagtaaattattattttcttaattgacattcaatagtatattatctatgtgtgggaagataatttttgtcacttaaaaaagtagttttgtaacttattgatataaaactgtaatttaatttaagtttaagtttattattgtatttgttacaataattagttagtaaaggttttgaggagattgagaaggaataaacagaggtaacagaacaatggttttttttttttaaataataaaaataagtttgatggttgtgagatttatatttcagtattttggtaatttaataaagagaaaattacgtggggagactatttttgaaattaaatactgtatataccgaatatatttatatttggtaaaaagtaacgatttt

SEQ ID NO: 36307 - DNA, 4775 bp, Cannabis sativa
  modified_base (4706)..(4711): a, c, t, g, unknown or other
tttatctcacatacaattaaaaagaaaatactttttggccaaaagttcatgtcataatttgatatacttagcaatatgctcaaatgcgctagaagtcatggatggggagagtaacatcatattgctcatcagaatttattaaaaccgatgccattcaactcttactatcatggggatttgtataaaagataagaaaaagtaaaacacaggcaatgaacttgagaggaaactctttataagaaaacaacatactggacgaggtgcaactgagatggttaaaaatctgaaaccattcatatcctcaggtctcaacaaaaatacagcagaaggtggaggttgctcagtctgactgccaggttcaatctgtcaaggtagattcagaaacaagataatgcaatcagtatagcactataggtgtgatactgatagtccaactagtctgattatcaacaagaagttaagcatcccagtttacaaacttcacccacaagagcatagggtatgcttaatttctggagaaaaaaaataacataaaaccaacaggttaataaacattagtggatatagcacatctaccagtacctgttttggcgctggtcctgatggaatgtgcaccatctttgatgtcacctcaagaactcttttattacctggtaattttgaagcagactttcctttttcaggccaaagatgaattctaactccagtacatggagcaagatttgtgacgaacatgaaatgacttttcccatttgatccctgcacaaacagataaatgggtaagagtctaggtaccatcttagtaaagagttcagataaaaattgaatcaaattacagcactccttgaattttcttttatttattttctatttgaccagaaactaagagcatagaagtaaagtaagtgcagtgtaaaaataaagtacaacattaatgcttgaaattgaatcgagtgatgatttaaaaaaggaaatatcatggatggaatactaattaagctaaccaatttctgtatgtccaaccaccgctttcgaccatccatggctaagacagagacagtgctggtctgaatgtctaggtctctctcaagtccattatcaccccagtgaatattgcttggacaagaagatgaagaatgcactagagatcctgcaatcatgatatggtttcgagtatttgtgtaagaagtaatataagacatgtacacttgaaagaaacacattggttatccaacatggaaaggagtcttgcatgtctttttaaatatgcaaatgtcttgtggaacatctataagtataacaaactgggtgtagcatatttacaagataaattaatgttttgtgtgcttcaacctcgagaaatgaaacatacccttttttcaacatttaaagtcgtatatttgttatgattttcaaataatttaaaacaaaatattatattctcatctattctacgatgacaatgattgacacaggtactgcgataactagcagatatgttgcagtttaccatctgaatccttcacatcctttaagggaacaggtaagtgtgattgcatcttccacttgaaactgtgtggtacagcgcttcgcagcattctagaaaatatggacaatcttttttgagtttcggctaatggttgacctgttcttgagtctgtcaaactaagtagagtgtgtgaaacctatacgagaacatactatttcagaaccatctaaatcaatcacgtttggttctttctctataataataataataataagaagtaacactcacttggacaactagctgattacaccataaaattgcctgatgttccattgacaaccaaacatttttcatgcctgtagtactgatcacaagaccatgggtgggaggcactataccatcaagagactccaactttgagcgaacctaagaataagaaaaaaaaaaacagtaaacatgcagactcacaaagaagagttaaggataaatattggcatattcataaataaataacctcacagttatacataaattatcatgctattataattaatttgaagaattgcatttctttaaggatgatccgaaacactacatacagatggtaaccatttaggatgagacattgcctagttatatcccctatctataaaaagacacatcaatgacacattgaagtaccacagagacgaatccacaagtaattgaaggcttattttaaacgtgtacaaaagaaagtaatagttaaataattaattaacaaaaattacctggtaatcattgtaaccaccagtaattgatataacaactacatgagaaagtacaggatcagatacataatgtcctgttcgagttgtttggatctcatatccctttctccattcgttatttacacgtgcaaagtagtaacccaatgacggctgcaaggccagaggaggtgatctgatgaaataaataaattcatcaaatgctaatgtatgcaacgaattttgaaagtaatgctgagtctaagaaccacaaaactcactggtgtggacttgaaagtgtgacaacagttaaaacagctgatcttctcaaacgaggatggataattgcagctctagcgacaaaaccacccatagaatgcccaactaatatcacactttttggcaatgatccagagaccgcggcaccttctttttttctagcatcataagattccttgtattgatctaagatctgaactatggttacacaacaccagtgtcattaacagtaacttagggctataaaacacaaaaacatgaaaataattgtttgcacaatgaatcgcgtgagcactgaagtttaaatctagcaaaattacttataaaaaaggttaagatccatacccggtgaatggcatacaccacatattctgtgtgctcttcaagtataccaccatccatagcagaatgctctccttcaagatccacagcaaaccaatccagcctgctagtatactgactgggtagtttaacaatatctgcatctagacctccctcttcgggagttaaggaagcctcttggtaaaatgtacgctcaagcgggcctccttgatatgccctgtctgattcagcagccatcgatcttacctacattgagaggaaaatgaaagaaggaaatttattaacagattgattcaatccacaaagtatatgcagttaaaaatatattcaattcctttttagattacataaagctaaaatagaaagcaatagcaagactacagagattatgttgagaacaaactaaaacagaatagaaaaaagtaaggaaaaccttgcctgtttgtagctaccaccatttcctggaataaatagaacaggaacaccactaagcttcttcagatgctccttgtaatctattttcttccaaccttcatggtacaagtataacccatacttcgcagaggaaacatctccagtggaagaaataggtatgtatgtgggatacatgtaagtcataacacaaccatttataatgggtcttaacaaaccatacaaagctgctaaaccaatccacacagctaatattacaacacccactatcctagatttggctctaaaaccttgcattcttccaaaaactctctcaccccaactcttaactattccacaattactgagcttttcctcattcaccaaaaatcccttcctgcataaaggacaataaactcagaatcgagagagagagagagagagagagagagagaaatctcatcagccaacatgaaactaatttaaaattacattttaagtaataagttgggaactagaaaatatgacagttagatcgataagaaactctagtaggaacctattacataaacaaaagcttaaaaaagcaaaattttaacttataagctgaaaaaaccaagaggaattaagcatccaaaacattagaacaagagcaaaaattatactaaaaacgtttaaaagaccctaaaaagaaatgggatcaattgagtgtaagctaaattaagctgaactgaagttgaaattaatacgagtgattgaactaagagagtgtaactaacagaagcgaagtagatctgaatgaagagattcaaatgtaaaaacagtaacaatggaagttgatgaaagattcagagaaaagaagagcttaccggatcggaatttggataattaccgaaacattagccgaagaacacagaattcaaaaaacgcagaacattcattgacaatgattccggaatctgaaactctacccgagaagaagacgacatttgcgggtcaatcatacgggtcgggtcctcatatgttcggaaaatgaggggaattttactctgctacgagagcgtaaattcgttaggctaacttgacgaataatatacttccacgtgtctttatgctttgtaattggtagagaatacatttgtgtacgtgacgtggcgaccattattcgttaattttgaggttgttgtataaaatctcaattgtttttgactagttggatccttaataaaactaaaaccaaattctctcgaaaaaaagaaaaaactaaaactaaattgatggcaataacttcttttattttatttttttttagggaaatattgacttatcaaataaaaatttggattttttttcagttttaataataaaaaaagtaaccatattacaaaaatattgttagctggttgaacgataattttttttaataattattattattnnnnnnattattattattattataggaatgggtcagtcaaaaaaagggaagagaaaattaaggagatatt

SEQ ID NO: 36308 - DNA, 4207 bp, Cannabis sativa
gtagtggtagggaagcttttactgacatctttccttgcttgggtcaacggttcgaatctcactctgcccctcattgtgagggataattaccgatgacccaagtaagacaggatgaagtacaagctccctataactagcacgtggttctcgggattgtcaaagcaccacgtgatcaaaatgtgtttgacaacaggggctttggataggaatcatagtggccttaatcatgcaagcattgtgtcttgctattataacaatatgcactgattgggaaaaagaggtaaatcaaacctttttaaaaattaagattcttcttttaatggaaatcttatcttatatgctctaaatactattatctcctttttcaggtgaataatgcttcagatagagtacatggcacaaaagttgcaattagtgatgaattatcatgatgctaatttgattctaggaagtctaatattatgatcatattatattcttctatgaagggtcaaagtcaaacagtggcaacaatccacagaaaatagttgttgagtgaaaattcatggtggtaatgaactgaaatgaaaacccaatgtataaaattgctttaatatttgaatctaaatacaagttatgattttactatctgatcttttgaaatcctctcatactcatagtcctctttctttagatgttttagtactctatttccactcaatcagtattataaaatattgtggtatcaactgaataaaatgttattgtttggttaactaattcaattgtatctttcagtaattatgtttttggaaataagtgattcattaggagagaaaaaaaaggaaacacttgtatctttgacaccctttcagcatgaatttcttaattatgaatcaattttcttgttctcacttctatatttcctctttgttttcaaataggttgtgtttaattgggagaaataaaaatattaaaataaaaatcgaaatgagaatagaaataaaataaaattcaacgtacacaattaaaaaattaataaaaaatctcgaattttcttttattttaaagtaaaaaaataataatattctaatactttaaaataaaaccaataaataaatagaataaaaatttattcatctccatttaattacactgcattacctccaagaaatcaagctatcaaactcttgtttcctacccccaaatcaagctaaatgtaaaaggtttataataggtttataatttaatgcaataactaaatttagtagtaaaatattaaaatgacataaaagtagattaaaagtaatgcatttattgtgatggagtgcatattgtgattcaaattatttgaacaactttcgttatgtaacaaattgagcattgtggtggggtattaaggtgtctagcaccaatatgaggtggtgtcttataattggttagtaattttttataatctttattaaaataaaataagtggaacctgatattgaattatatcaatatcgatgttatacctcataagggtgtctagacaccaattcagtatttctcatcataaatttgtattaacttttggcacaccttggagcaaacttttcacatgataagttatattttagcaaaagatcaccaatttaaatctctattttagatgctcctatgttttgctggtttaattttagtattaaattaatttattttggtattttagtaaaaatttaattgcaagaaaattaaaattaaaacttcaagctgaaattcgatcatgctcgctctaattaggaaaagaaaaagtcgtgaaatagaaattttagagctctttctaagctttccaatgaaacttgttcgtagaagaaagttatacgcgttttactaagagatgtcgggttaggaaaataccttggacaacaaattcgccagtgcagcttatttacctgcaaatgcaactagacacggggctaggccttttaggtgtgatttttagagttaataggatttttcatatgcttttgagtcaagtaatgtaatcataggggagacctaattaacgtgagaaagagttcttggggagaaaaattcaaagaaaaaaatgaatcttcacggtttgaagacgaatctagaacacgattttcacttctttttcttacactacaccaaaatatgttattagtgatatttgtataacatttgttaaaagaaatatgagaaatagtaatattttagttacattctaatgtctctttaaagtgaataagcaacattttaaaaaaaaatgccattatagatataatttagtgccatttaataaaaaaagtcactaatttactaatatgtagttttactaacattaatagaaatgtaactaatatatatatatttcaaatatcactcaaataatagtaatttaatgacatttgatcaaaaatttcactttagtgagaataatctcataaatggtaacatttttaaaaatagaatttggatcaagtaaaactttgagtcataataattctatagtggccactgctaaaatcaacatgtgtttcacaataggggctttagataggaatcatgatggggaaaaagaggcaaatcaagattatttacttagtgaacttatttacagaatccatcattatgtgaaacaccatcatatctttatatgatctaccattttctcacattcaggtgaataatgctttagatagagtacatggcatggcacaaaagctgtaattagtgatgaattatcatgaatcttgtctaaacatgtattatgctaaaacattggatttggatatcaaatagggtatgcaataattcttctgaaatagtatgcacaaaaataaacaaaacaacttaaacttttcatttttttcttatggagttcactattgattatagaacaatcagttacaatagatctgttcatctaaaataaatatttaaaagaatataatacttcacatgtttgatttctttctcaatacatatttccttacaattcattttattcatttccacatctcattcgttcaaaaccgaatctcaaattacaaacccagatcagcaaaatgataccaagacaaaccccatttacagcagatctaagaatccagacacatactgaaaatggtgatttaagcctttgcaggccatgttgcttgagctgacatgattattcccacaatcactccaaacagcccaagtgcacttccaaaaatctcaatcacaagaatcttaacaaaaagcgaagagttttgggcatcggataaagcacaactgcttccaattattcctacgcacaatctgtgtttcgaaaagaacaagtcacaaagaaaacgaggaagtagtggcagtactataaatgagttttattcagtcagtcaatgattaagttaagaagaaacagagtataaggagacaaacccgcaaacaagatttgcaaaaccaacaataattccagaggcaaagattgcatatcctgctctaagtgattcaggttcatacaattgtgaagctggaacactctccaatttagtttgtagaataattgcaacaataacaccataaatcgcaacagcttcgcagaaaataacactacacaaagaacacaagcattgtatccacagaattgttactaaacaattaaaactaatagaatgaacaaacttaatccaatcttctctgtgaaaccttcaaaaagaacttattaaaaggtcaattcaatttgatgtatgaaaactctaataacaacatgtcatgaattctaacccacacaaagttattctctctagatttttaagggcttacaaattactcaaacattagttcaaaattaagtctttgatatacagttctcactactacttaaacttcaattcaattacaacttgtctgatacagatcccaaatctgatctgaccgccgataaatctcacggaaatcccacaaaacacacaaatctaaaatgagatccaaactacttctaatgtagaaattagggttagcgaatttacctaatgaggttcttggaggtgattcgaggagctttaattgcagcaccgatcaaactacttccggtaatataaattcccctgtgaaattaaattaaccagacattatttcacgcaatttcgatcaagagagattgaaaggaatggaatatgaatgtgaatgtgagagggtttgatttgattagttaccaagcagccccaaggactga

SEQ ID NO: 36309 - DNA, 3677 bp, Cannabis sativa
tgtctctgagaattgtggtaggtcagatcaacttatgattatcaactcacacagtctctagatttggaagactgaataggtcaactgggattggtccttgaagttttgtgtcctccattattctgccacacaagttaaaaaaaaaatagtaatcttggacatgcccttgatattcaacacaatacgggctggaaatgaaaacaaagatatgcactaagcaaaagaataagggaagagagagacatacaatgttgtcaaagactcaatcgttgaaatccatgccggaaaatcagacttgtcaaaagagttgttgctcaaatctctgcagtaagtgtgaagtcattgtaatcataattataatcatatgatgattgaaaaattatttctttttggaatgagaaaaactatatcaagtgctcaatttgaacaacaattgtccataaatgctttaattgatcatggaagttcttgaacatacagataatgcaggccactcatgctagtaaggttaggaataacaccactcagcttgttatcagacaagatcctgttaaaaggtcacaagaatatgatctcttaaaatataaagcaatattttaaagctagaagataaagaagctgtctacaagttcaaagcataattgcaaaaaaatctagttttctgcttacagctcagtaacatttgtaagatccttgaggtttgcaggtacagtgtcatttaattcattcccatcaaggcgcctggaggttattagacaagataaaatatgatattgttaggcattgtaaacatccaaacaagttcactttacatacaatagactaaatgtctgaggttggtacttacaccacctctaaactcttaacaagtccaagggatgaaggaatattcccagtcaattggttactatcgaaaagcctgcaaatgaaatgagaacagcaatattaatgactacaatgttggcagttgtttcatgtggatatctttgaaaaaataaacaaatgcatggtaaatgttcaaatgagttaaatatgcgatttgatcaaagcaacagccagaaaattataagttttgacacagaagaatgagttgtcatagaactgaatttattgtcaaacttacacatgtatcaaagtcatatttgagttgaaaagcttttctggaattgagcctgtgagcttgttctttccaaaatggctgttgaaaacagagaagttttcaactgtcagattattgaaagaagagttatcattataagaaagtagctaacttatatgatgacaaaaccgaatttacatacaagtgcttgcagtgaagtaacatgtcaagaccaggtgtgttcccacgagacaccgggatagtcccctctatttggttgtctgctagatctagccaataaagtttggataaacttccaatggatggtggaataagaccagtgaagcgattagagttcagagatctacatttaatggaatgagttagttccgtggaagacatttttctagctttttttttttaatgaaaagaaacactgatagcttaattagtagtcttatatgtgaaaatgtataatgcttacagaaagaccagatcctttagagatcctattgtgccaggaatttgaccggagaaggcgcaaccaaccaagattcttgcaaccataaaacaataaaaagtacaaaattactacaaagatctcaaaatgaaatttccattaggcaattcaacatatatctccttacaagttagtaagtttctgcagattccctattgattgtgggagtggtcctgtcagtttcttattataagacaaatccctgtatggaaagacaaaaaaataaaaatcagaaatgcattatgaaaatttagttgccaatttataataagggtgtttaagatatctagttataaaaatttgaagcttatttctatcataacagttaactaaaatgatttattttatgataagttactattagtgcttcctactcctaactttgagagcattaaatgttttaagtagtaagcacatattgttggccgaagggagaaaggaagcctctcattgatagttcatacaaagccaataattacacaaaatagaagacctacaaagtctgtagttcagttaactgttcgatatctcctgaaagctgaccttccaaccccatgcttgataatgttctgcataaaatgagcattttacatatcaggaagcagtgaattttggctgaaataagaagacatttatttatttaactataaaagattttcttacactgaagtaacacgagtgtcgatgcagtcaatgccatcccacttagcttcacaaggatctttcctcccccaattaggaggcgtgttcttccattcaagagactttaaaccaagaactacataagtagtcaaaataaattagaaaaaagagagagaaagagatgcatcctcaatacaatgtatttaaagaatcacaactaaatctgaagttttcagaaagtgagcaaaatatattagtagaagaaatgaccataccaataacaaaactctaaaaccatataaagttactactagtccttaaagctcattttgattattaaaaaaagaaaaattgaagaagcaatatgagtcaaacataaaaaagctattagaatttaatggtgaaccaattataactttggtgagaaaactcaaaggagggaagagccctataagacacaaacattacacaattatagtaagacaaaaagttctttgtaaaagaaaaagagtgcttaagatatatgatataaattctgatgttagattctttcttaaagctattataactgcttaatatgacagacgaatcttcactaagttatagaagaatttggataagaaacactagaattagcattagaactaatgctgagttagagaatgacacaccagaaggactgaaatgtcagcaggctaatttcattttctatgtaccttcacatactcaaaaagaaaaagaaaaataaaagtacaacagcaccagcagtaccattcatctcgagtaccaattttacaagtatgtaagaactattttaaatgcatcatgataaataaatagaacttacagtcttgattgtttgaataaacaacgacccatgtttgggatattacaaggagcaggaagacttgtaatttttgttccatcatatatacaaccagaatttcaaaagcatatacacctctttttggatcactatgaaatggggaagaaaattttctgctgggtttcaaccagagtccatcttacttcatggaatgaagtgaacaacacaaaaaacaaagttctaaaccaaaatcactactggcacaatgaagtcttgatgttcaagttttcctgattaatttctgatattagactactttttttttttttaaatggtcaatggcccgtgttaatcagcattgaaagtggattatgttttagaataaaagacaggctgccgtgtttgaatatttccacttatgtaggcaaagactgataatgttcaaagctgtggcagttggttaaattaaaaatatatatatataatatcaaataatggtacagcagtataattttgtattttcatggactaaatctgtcatatcattttcaatgaaacaatacattttaaagaagtttttcctcgtgaaa

SEQ ID NO: 36310 - DNA, 2708 bp, Cannabis sativa
  modified_base (786)..(797): a, c, t, g, unknown or other
ttgtggtatattcatattactctaaggtataatatttgtatgttatattatatatcatgaaggaaataaataaaaataaaattaaatgaatacatataaggaaaaaaaataaaaaatgacataatactcatattactctaaggtatagtatttatatgttatatttatataactctaaggtatttttataataccttttatataatgaaggatatttaatgtattaaaaagtagaaagggacatttgtttaattattttaaaaaaaggacattaactattattaaagttaaaagtagggctatttactaacatttctctaaatgataacactttatgacatgagaagggtgttcaattcacatttcacaactttaggatagagagagataattatttatacatgaaataattaataaatgagcaattaattagatgtatgaataactaagagatagaggtattttaaggtattttaatttcctaacttgctgtcaagccaccatgtgatcttagataattgaacatattaccattggtgaactgcataactcggccggcaaagcatagcatcatttgaacataattgtctctaaactttttcagtgtcatcgttggtgaagaaaacttcactcgcagttttggggttactttaaatttccgaaaccctttccatttgggaatttcctcattttcttcatttaaaaccttacttcttagcctctgatatttccttctctttctgtatagcttcattttccacacccaaagagagagagagagagagnnnnnnnnnnnnagagagagagagagagagttttgggagaactcaagacgagatacaatgatatatgaattgaagtgattaagttttaaagaataaaaaggggggaaaatcaaataaaagaatagtacatcggttgcaaaataatgtcaacggatcgtaacacatgaatataatgatctttacttgccgtgtgtaatgacttacatacttatcaacaaccaactataaaatggaagttgggtaggtattcagcaagtcattaagatcaacatattatagtaaaatcacttacatgtttctatttttttttttacaaaatagatctaatcacacataatttctactagcatacatacatttatatattttgtagtaattcaattatggtttttatgaaaaagtagattattaaatctatgcagctagctatattactatttcttgtacttcgtaataatatgacaactccttaaatgtataccatatataggcttcatttgtcaaagcttttttaagttgttttttttgctttaaaatgaagaaagtctttttaaagatgtttggataatagatcaaaagtaacttcttttttttttgttgttataaaatatataagaaaaaaaaaaagaagacgaagagagaaagagaaacagaatgagaatttctcagttgtttattctgtaagtttcattattttgacagtttatattaatagtgagtctagtcttatctagtgtttctaatctgttataactgcataccagctttctgttaaagtctgtgtgagtctgttatgatttaacggttttggttttagtgttatattgttaggtcggctgaactattgcctataaatagttaatttcgttctgtaaattgattagctagctaattgatatttttggttagttcggttatatcgtgtgagttagtgtagtatcctgtattgcttgttcttattttacaggtctgattgtatagcttgaagatagtgatctatagcagaaagatcagagcctgatgttgctgagttcagactgaagggagctcagtgtcatcttcgtcatcagatctgaagggatttcagattgaagagaagtgtcgaagacgaactctgctattgcacaagggattgtgttcatacaatcaagattcttgattaatgttggtaattcattactaattgctgtaaagattgtattaaattcctaggagtgttttggatattgtaatacgaatctttaagatttcgtagatgttattaccctggttcggggaacccaagcactagttggctgagatgtgttatcagtgcagatgaagcttgtaaatcattgtgtgctttcctgctttattctcaatccaattcttgaatgcatgagttataaaaaaaccaatccaatcatgaccaattcggtaatatgaatcttgtaaattatacaagtagttttttcaattagtatcagagcttgaaattttctaaaaatttgtgttagatcctagacttgtctgattcttgattctataaataatcacttggtacatgttcaaggtttgatcttgtcaccactaaccatctttgagatccttctcagagaactacaatacaagagtgtgcttgtttctttttctcttctgtgcagaatggaaatgtttagggaaggtggatcaaccttgagaccttcgatgttggagggtgctaactacccatactggaagacgaagatgcgtgcattcttgagaggtgttgatgaaagagtctaaatgtccattgaagaagggtggtctagacaaactttaatggagaatgaaatagttacctctaaacccatgagccgatggacctcagacgaaatggaaagggctaacttcaactcaaaggccttacatgctctgtttaatgctgtctccacgaaccagtta

SEQ ID NO: 36311 - DNA, 12087 bp, Cannabis sativa
  modified_base (5535)..(5535): a, c, t, g, unknown or other
tatgagaaaatgataataagtttttttgcacatattttctaattaattaaaataatgtatataaaattgtaaaatgtccaatattctgtgaacaaaatagcgtggacattggtaaagatctaacacaagtttacacgaattacaattttattggttcacacttaggtagtgtttaagtggaggtcataaaatagaatacaaaccaattttattctatttaattgcattttaaagtattagaatattattttaataaaatgattttttttattattttaataaaataaaataaaaagaatgactagataacaaaaattttaataattagtttggtgtataaaaagcttattgatattttgtctcttttttcatctcttctagacaaagttggtttggggtaatttaatcattcacgagcatgcttttattttgtggttaactcgtttggaaagattgcaaatttagtctagattggctcagtttagaattattaccaacccaaattgtgtgatttgtggtcaagactgtcttaggcttgtgaactcttagctgggttgaaaagctcaaaatacaatgttgggggattattgagatagttgagtcaaggaaaaggtttgactctatacaacggctttgggtctatcatatttagagagtgcaggataaagctctttagggctttaaagtaatttgaacacagtagaaagaataattcatcaagatatttgtaatagagttcaaaattttactctgaaaaatttctaatggtgatagggattggatgacagctttacatgtatagttttttgatgtcttattctttgaactccctttcgggagtgtgttgtaaaagtttgattggttcatcaatatttgtttccttaccaaaaaaaacaaaacaagattacattttattattatttctattctcatttttatttttagtgttatatttttattcattccaatcaaatcccatcttaaattttaagttataatgtgtatatcagttaagttgataaattcataacttacgatcataaaacctataggttgataagtggctttctcatctctataaatttatacgtcattaagaaaaatgaaaattgaagtagatatttcattacttattagaaaaattgtatcctatagattattaaaattaattttatataatcaaatacattcataatatggttctattaaaatttaagttttactaaaattatgcacaatttattataatagtttaaatgtgctataattaattacaatttattatcatacatttataatataatatggttctaattaaaaatgtgctacaatttttttattattatatgataagtaagctgaatttatacatatataatttttttgttttccgttgacattgatgggattcacgaaagaatagttcagaaagttagaacccagttccgtgattaattgttggaatacattagagattagctttcaaaggcagtttgttgcgaccaggaagataaatcttaaagttagtgccctgaccaacatcaaacagctgtatcaagtacatagagtaaatttcgagccttagcaaactcagctgcttaaataaagtggatcatctctattcttacagaattacctgtcaagctactagtagctcctattatatgggtagacaatcagggtgctacatcactaattgctaatctagttttcctgctcgatcaaagtacattgaaattgatttacacttcgttcgtgaattgatattagctaaacaccttgaaattcaatatgtgccctctgatgatcaagtagctaacattctaattaaggccctgagtaaagatagatttgtctatcttaaagcttaaggtgtactctacactgaggggagattatacaacataactaattagttattacaattgttactttatttcctgttagtaacagttaaagagttagttattttgtttttcagcttttttctcatgcaattagtattttctcatcctataaataaagcttatgagctaaaggctaaagcaacttttgcaagtctttaaatctcagtttccttaaattgtgtctttgatagttcttgtattgataaactcctttaggggcaaacgtatgacgacggttgggtggatgaagtataacaaagctaattaatagcttaattgaaagggctaactcccggtcatgattttggtttcctttctcatgagaaatcccatagtgaaagtacttaactttattaactttttggtcatatataaagttatatataaacaatccaatagagatggcataataataagagtaataatttgtacatatatacatataaatcatatacaaactttgttttttggttaatcagaatgattgtattactatgttcaaaatacaaactccaatcagggacaaagccctctttacaactcaaaaacagaacacttagacctctttacagatttccttaaacccaatccttatcctcaatgataatcttccctatacaactttttaataatttgtatggtgaagttctcttttgattagattacaagtagaaacaattgtgggacaaacaccatcccaaagcactttatttctggccatccaagtgtgatatactactgcattagtagcagcaatcatcacacctcttcggaacctggtttgcttggtgctcccgatccagtggtgcatctgtaacaaagacaactttctgtttctgcaattaatccaaaccagcatctggttcaagcaagctgagctaaaaagacatccaaaaaataaatgtttatgactctcttacaaaccatcacaaaaaatttatccatagttacgccaaattaaatcatatacaaatttggggactgtcgtactattttatctagtttgaataatgttcttgtttctttcgttaatcgatctgcaaataaggctgcccattatgttgttaggacgtcttatttatcgttaggttgtaggtataataagctgaatgctccatcttttttgtgtgacattgttaaggctgaggcctgttaatcttaataaattttccatcttcaaaaaaaattcatatacaaatttggaaagcgcacacacttatgtgtcaagttacttttgataaggaaaattaaataaatataattaattgaaattgcttactagataagtgtgttaagtttctgtataatcattatctatattttcatacttaaatattgaacattaataattaatatcatattttcaaagttcatccaatttttatcgtcccaattagattaataaataaatatataaccatttttggttcaatgtatctgcaatgttgcaacattaagcatatgagaaatatccgctatagagtttccattaattccccaccattcttaaataaatacagtaaataataataaatatgatatttgaaattcaatatgaaaagagaaaaaatatttatttgtttgtgatctaatacctacatgtagttaggtaatttagtgatcaataattattattattttttatttgatcataaggcagtactcttaatggtgtctagcactcacttataattaattagtgatatcacatataattatcacaatgaaattatatggtttcaatatttaattgtaccaataataatatttaatacaaattattagataaatgatacggtcactatacttaattatatcagtgatctcctattcccaaaactgaatgttgtatatacttctgcgttcctcccaaactttagttataactagcaaattatagtaataaatttttctaaatatattgttatttgaaatactatttattataaaacctttattaaaaatataaaaaaaaattaatcaaaagaagaataattaaaaaccaatttgttggctgtcttatctttacatcatatgctaatttttttacaaagtttacatttatattttcacaataaaatttttatatttatatttatactatctattttctttactctttttttatatattaaagattttataatttttttttctttcttttatctctttatatatattttttttttgttgtcagtcaaattaagtaaaataaatcgtaatacgaaagcatattgaaaaatttatattgttttgcatattgcggttaggtcattatgttattatttgtcgttgttagttatctttttgtttttgttattttatgattgttttctgttatttgttaagttgttttgttttattttattaaaatataataattttgtaattttaaatacagtatttttgaaaatttagtataaaaaatgtaaaaaaaaggtgacaatacaaaaaaattgctatttttataaaaatcccctttatcttattataaaacgcaccttattactttgtcaaaattatcatatatattcaacaaatgtatcaatatgaagggtgcacttggaattttttggatcattaattatttaattatgttaatttattatgtgtaggaaattaagcagggtaaagcaatacccaaaaaaatcctgacaaaggagacaattaagaagtggatgaatttaggtagaataataccttttatttattatatttgtatgcttataatgtgtggtttgtaatattcaatagcaaaagttggataatgaaatcattggttatgcattttctatgcttgtatgatgaattttaatggcatattgcaaaaagataaaaaataattattattattatttattaaataaatgcaaaataaaggattatatttatagcagtgtccaaagcatgaaaaccatgctattaaaagcaaaccagaaagagttatataatggggtcatttatttctttattcagtctgggttagtggacgagccagtaatttataataaatatcattatatagttagctttaattatgtgctttgaattaaaaagggttgtttgagtgtgattatataatatatatacaggagagtgtggactatgtgtggtacataggtcttttattatacctactcgagtttatgaaccaaaaaaaaaaatgaaaactgcaaagatattaacagacccttgcaataatttatactttatgatactggagaaggtaagcaataataaaataaaaaaatatgtcatctaaaataggaagaagaaggaaggaaaaaaaaacactatacatgagtagtagctacttaattgacagctattgatacaatttaatattagattttataaattttaatttaaacttacaccagtattgacgtattaataagaatttacactaacattatgcacaacaaataatagtattggacacttaattaaagtactttttaactatactcataattatatggttaatatgatcagtcgtcttcaattttagatttgtacaactaatatggtctaaagaaatatctaatttaatggtgtaactttcagtaattgagtcgatatataacatgtaagttctagcattatgtctaataataataataataanaataataataataaaaatgataaacacatttttttaagaaagtctaaaatcactttactaaaaattattgaaatgctaacaaagtaacataaaaattagtttatatattgagcacttataaatatagttatgcaccttataatttacattttgattgaacattttgcatatattacatcaacttataattatccaccgtcattttaattatgaaatcctaattaggacggtgtgaattgattatgattagcgattattctcttcctctctaaattattaaaatactccgttagtgcaagatttcaaattaaacgtctcaataaatatggtgaaagcattaaaaattatacaataaaaataggggcatttttaataggttaatttgcatcatttgagacattgttaaataaatttgggtaactagcttatattattgttgttttgaaagtgatggcttgaagaggtttttggagagtagagaaacagagagagatctatgaggagttctttagaaaagaattacaagacaagagaatgagaaaaaatttagatcattctgaggtgttattttacttatagagataaagagtacaaagaattagttacaaaacagcttgactattaacaacctctaacagatataactacctactacttaacatactcaaaacgaaattggaaattcaccacatgaagtttggacttcaaatactcaaaacgatcagtaggcaaggctttagtaagaacatccgcgatttgatcaactgagagaacatattagagtgataggtgttgagcgagaatttggtaccgaacaaagtgtagatcaatctctatgtgcttgctacgagcatgaaacatggaatttgccgcaagagcaaaggctccttgattgtccacccacaaaataggagcttgagatagagtaacttggagttcaccaagaagagaaacgatccacttgattttagtagccgcatttgctagagcacgaaactcactttcaatactagatcgagcgataacttgttgctttttagtagaacaggatattagattcccaccaaggaacatggcataaccacctgtagagcgacaatcatcgggacagctagccagacagcatcgaactacccgtgaagatccataagacttgttggtgttatgagaagaccttgagcaatcgtccctttcaaatatctaagaaatcgtttgcaagcttcccaatggacaatggtaggagcttgaacaaattgatttagtttattgacaataaaggtaacactaagcctggttagtctgaggtattgtaaggctcctagtgtactgtgatagagcataggatcagaaaaaagagcaccttcatgaagagataatttatgagtagagttggtcgggcttggagacgctttgaccctttccagatgaagcttaacaaggagagggctaatgtactttatttgagttaaatacgtaccattcttgtgttgtttttatggttctaaatcaagtacgcagcggaaggattttgtattatttgattattatcataccatagtcaaatgatctccagatgtgtgtacattaaatttctaattgagggatgacgtagtttgtaatgccaaacattaacatcataattagtaagagaagctgagaaaaaacttgaggatcacaccaatttttagaaagtaagcttttactaatctgagttttattacatcatttgtcattggacatttgtgacctgaaatattacaatattgattacatgaagatgctaaggaattaaatgattgaagagaaccggtgagagactcagaagaagtggcaagatgacatgaaaaccagcagaggaggtggactgagaatcatctccaagcatatagaggtcatttttacgtttccatttcagcaagattgtccttgaaaaaataacaatatttgtaaaattcaagaaacacattataatcatcaattagcttagaaacaccggccaaattttttgtgatagcagggactcttaagacaaattttaaatgtaagggagaatttgaagaagagggaagaataacatgaccgatataggaaaattactaacttcttaccattacttatagccaaagatttagatccagtgtaaggagcagcagtgtccagattttccatgccaaatgaaacatgattggtggcacccgtatcagcataccacataggatcatctacaaagtcgggattgttgaagaggaatatttgtggatcatgatcaccttcaacttcagtcaagtaagctcgaggtgaatttatggaggccttgcgagtgacaaagactttatcaaatctatagtgacatattgcagcagtatggtcgagcatgaaacaaacttgacataaggatcttaaaccatttgaagggaaagatcgattgtatggcttagctcctgatcttgagagagtttcatatgaagggttttgagcaaatagaggcttgtaaggaccagaatgaatggttcttaaagatccccaattgcaagatttgttgtcattttggaggaaagattagcaacactatggtagtgttcaagtctgcactcataagccattaataaagcttgtatttcttccaaggacttcgattcactactagaagttataccaaaaatcactaaattatattttggtccaagaccattcagcaatcaaagctcaagatcttcatcactaatagtacatccaggaatcgccaagttgtcacttaggaatattaccttgtaaaaacactcagcaatggagaggttctacttctgaacattgcaaagttgtcctttgagttgtagaagttgagccttagatttacttgagaacctttgttcaagggccttccaacaaattcagtcatcgaagatctgagccaagaaagtagtagttggtctttgcgttttccaattgtcatttaccaagaactgaggaggtttgtcactgttgaacaacaaatcatcaagatcatggccgataacagtgggaactacttgagatgtgcaagctaagtagttagtttgatcgagtttgattgttaaaagaagagcttaacgaattcgagaaaggtttccaagattgattaggaaaaccagagttgggagcaaaatttggagcagaaagcagtgttgttggggtattattaatatcagtttcaaactgaggatcgcttgaaggattttccatggacgttagtaaaaaaaaaaaaaaaaaactttgataccatgaagaggtttttccagagtagagaaatagagcgagaggtctaaaggagttttttagaaaagaatcacaagacaagagaatggggaaaaccttagatcattttgaggtgttatcttatttatagagatcaagattacaaataactagttacaaaacaacttgacaattaacaacctctaacaaatacaactactccttaacaatactaacagtattaacaaaattagtgtctaggctattatggcttagtttaatttacactattttactctttttcttagagcatctctaacggtacattatttcactaaattggtataaaatattcacaccattttactctaatggtacaccaaattatgcaccaaattagtgtacatcaaattctacactattaatagtgttagattttaaatctataccaatttggtgtaaaactatttttacattctaactcttattttattttattttaaaaaaatttcttacattttaattctcaaattgaaatttatcacaaaaataatttaaaacactaacatatttgaaagtacaacataacaataacaaaaatattaatattaaacaaaatttgcacaacataacactaaaaagaacaacataaatgaaaataaacattaagtaaaataataatttaatagtcaaattaatcacttgagaatcttagccttaaaaaatatcaaaatattaggtataaagacttgaagtattttgagaatattgatattcttgaaatgcttgatattattagcgagctcttttttggcagtccttgttttttcattttcaaaaatagtcgtgtatattgagattaactatagtgtttaaatccttcaataaatcttttttttttaacaaaaaacaaaatattttatgtttaactgatttaataaatattttttttactaaaatattttaaaattttaaattctttctaatagtcatgatataattatatcataaattaattatttttggttattaatgtaaaaatataaaatacgagatctttgaagtaaaatatatttattttgtgggtttgttctacaaaaagtaaaagattttacactaaattagtgtaactattagagatggtcttacaaatgaattatagtggaatcagcaaacatcggccgacaatagagtagacaatagcaaattaaaacgatgtgtataatttctaactaaatttgatataccaatttcaagataaaagtattatttacaaaaatattaaaacatcgcattgtatgactagtaatttggtattaatcgtgtcagttgacatttataacacaatgatacatttatgaaaaatacaaatacctaagtctccaaacaaaaacacgatataatttcttaacaagtcatacgacacaacgcaataacacgtttaatatatttcttcttagaatatagtctagcttcccttaaaattacgattccattatttttgggtttttctttcctttattattattttttttaaccttatctgattgtcataaccttctcatatcatatatatttttgccaaattttgaaagtgtacgcatgcctaactaggaggaccaaaaagatgatcatctcttttatgtcataatgtcaacataaattgtcaataacatcaaatgccgctgctggttccactacattctttattttggggaggagcgatcctaaattatatgagaaatgttaaaagcatcagtattatctagcaccttcttacgtgttaatatcgttaattaatcgtaacgtgatacgtctagaaagtgctagacaccactagtgcccaatagcaatgctcaaattatattgacatggtctgaccttttattttgcttttgaatgtatttaaaccttgtaatacaaatcatcattggaggtcagacaaatttttctactcttcctacttccttcccattatggctttttagaattttgttcttttttgtgttagatttatcaaccatgctgaagtcagggcatctcatggttgagtatacacaatttgtgctttttcaccaaataaatgatccaaattacatactctccaacataatcttaaactttgttaaaaagggttctccatgtggtcaataatgctctgcaatccacacctgtaacttggatagagaagctttactccgagttccttcttcatacgagcattggaaactagtttctccccaatgaaacttcttttcttaacagtgattaaaccaccttgatgtggcaagaaaattcagaagactaactaaatagccagaactttaaaacaggttaatatatatttcgcaaagcaatggatcgtggtacatgcacaaagactatattttatatttatctgtactttttagacgcttaaacaataaattaaatgcaaatttaaagcagaaggcaccaaataatgaaaagtaatattcatcacaaccttctaccaggaccatagatacctccaagatctaaccatctcctctcagcagccagcctcagtttagccaactcacttgttgggctagcaggatatatatctgacattagtgtaattcatttgggagacatcaaatttcagttaatggaaaaaaaaatagttagtatgaaaaagtgtttcgtttacatcgactcactcttcgtctacccactcaccaccacaattgccatatagacctgccaaatataagcttacaaacttgattcttactcatttaagtttaaaagcttgacaagacccatgtgaacatggctccttagattaaatataagacttatgaagttcaccttctccacagttgatttcaaattttgagaaacaccaatcaaacaaacatttcacaatttacttataaaaatcaataaacacagacttatgaagtgaaatgtgaacgtgcacactcactctgacacatttgcgtcaaaatggtaaataccatagattcaaaattacactcttaatgatatagaacgctctatatgttccaagatatagatacgctattaataatccattgttataatctaaataatcaaagatcctatagatgatttacatcaagtagggataaatttaccattctacgcttcaatatattttatccttaaaacatttatcaagttgtaaatgatattttagtaaactaatataattactgaaatgaggcttcagtcattaattgcgttaagccaagctcaaaagaaatcatcgtttcacttttagaagttatgaaagctatagattccatatttatgatcagcgctcccactcaa

SEQ ID NO: 36312 - DNA, 4962 bp, Cannabis sativa
agaactggacaaagaaatcaaataaaaaaaaatatatacgttaatgggagagagagagagagagagagagagagagagtttttgatgaagaaaaaagtgatagatttcgaaaccaaaaaaaaactcctcaaagatgaagatgaaaaaagaaagagaataattaaaagtaatattaaatagtgtaggtgatatacttatcatcaaaattaaattaaaaaagagaacataattgctgtcacagatgtgacaataccaagtcaaattaaacttttaaaatgacttaaaatataaaaaaaaaaaaaaaaaaaaaaaaacatgcaagctgtcacgtttgagttaaaaatgaaacaattttttattaaaaaaaaaaatagtatattagtataaaatcaaatcagtaaaaatgttataaaaagcgggtaacagtaaaattataataaaattaaaaaaaaaatagtatagggtgtaaatttccctacttaaattactaaataagttttttggcctaattaaactataagaaaaaatatttcaagaaaaaactgtaagagatcactaaatatttcaagcaaattaatgaggaatgtattgtgtaagaaattcaaccctttatttatttatcagacccacctctttgtattgtgtaagaaatccaaccatttatttatttcattattggtaccctctttttgtaccaaccaaatgtcaaagaaccaaccttttagaggtcaaaggtgaaaaatatcattaaaaaacatctaaatgttgcacaaattaataaaccagcacacttcaaacaattaccaaaaattcacaaatgcatgcatcgataagtatatatataaaatggttattacaaattaagatgaagcagtcatattcatattaagtttgagttatgtgtaaagaaattatctaaaaaataacatgtggctcaatatatatacataatacatgtgtcacaattatatatgctgtactgggcgaaatatctcgaaggtttaaacctatattaatattttaagctttatctttatttattaaatttatttttctcattacttgtgttttatttaatttatacaggcctaataaatgcagatgcgcaaatatatgcatatgcatggaatctgtcttacaagtgaaaatgataatttacagttgttagctaatgaaattaataaatcattggcttattattattaattcctcaaacaattattacgtaccagctagctaaagctaattaaccagtaatcaacccaactcatcctcctcctgtctctacatatttatagctatatttagtcgtatatatatattctcaaactacactccacacaactttaattattgatcacagaaaaaatctctgttattttcagtttagtttttatgggacctaattataacttaaaatctatgacgtaatcgcataatcacagtataatattctaatattggttaggcaagtatttgatgagggctctttcattaagtcatctacggtgtactgtactgtatatatgcacttatgcagacacgaataaaaaattatatatattgaatatgtaaatataactactaacaatttattcctctaattttttttttttcagtttgcccccatttcactgactactctatggtgtcgatcttactggtattaaaagatgtaatggtttagagaagttaaggttgataactacagcttaaccattcctcaaataataataaggttgacattaatgctaccttccgatgttaattagttgcatgtgagtagctggcccggtgggtcgaccttttttagctttccaaaatttcataatgtttttattttattttcttttattttttcaaaaattttaataaaaagatcttaaaaattgtcaatttttcacacaattaacctggatagttgggcattaattgtcttctgggcctggagtaaacttttcccttttattgtgtttttatttttcttttattttcaaacttagaggattgcctggatcagtttgttgatgttcatgtttggtgttcaatggtcatagtgattccaaacaattccatggagaatgggaatggattttcaaaagttaacaagaggaacaaatctcaattctctcttgtaaatttatatatatacgcacacacatataatagttatatttcttttgcagcattgtagcttggttcctaagctttaacgtttccagcatatatatttcaaaattcagaaagtttactgttaaggactaatgttgctcctttaaaaaataaagaaggattgatgttgcaactctttagaaatttcatccaaagaaaacatcgttaaaaaagccaatgcatctttttcatttttcttaagcctgtcttaggatatatatgtatatatataatgatatttggatctcgttttaaatgatcatagatgtaattttgcttcaaaggattgacttcaagtcttgtatacattggctatacttacagatacgcttaatattctattgcatatcatgctatattagatagaacaatgctaagataagtccagtgcagtgcacagtatgaccaaaatgacttgataacattacaacaaaatgaaaattgttaataaagaaaattaaaataacgaggaaacaacaagcatccgaataaatttattttattaaattgaaaaaaaaaaaaagaaccatttttgtaatttttctgtattgaactatgccagcattagagttggtcttggattggtatataacaaaatcaccatattcaagatgagtagaagaatataatcacattcttttcataagatacattaaaaaaaaaacaggagtacttaacatgcaccctttgtataaaaagcacatactactctctagaacttcacatattctcctaactcgactggaagtcaaaaacaaaattcttgcccacataataaatagttggatacaactcaaaaagaataaataggcctacattgctggacaacaaaaggaaacaaagctctttaatagaaaaatctaagactcgattactggaagttggttatctgacatactctgatcagctggaagttgctgggccgactcgctcttgctagttggaagctgctcacctgcttcacccctcaattcagtctcactgaaaagatccctttgaacagggacagtcatttgctgctgggacgaaataacaccagcaatagctttaaacgctgcagatgccttgttgctatcttctgctgtatctgtgctaatgcctttaatgttgggttcaactgatgcctcgtcttcttcttgctttggcggtggcacgaaaaatggtattttacccctctgccagtcatgaagtaccatctttgctgccgtcttcaaatcaggttcaccaccctaaaaagccaacataaatttttcaattgcagctatcaactgtcataatttcttaagagctgcagaactgtcattcatattttatcaaagttgaatgaaaacagtagtcacgtccaagtactctttcacattgatatttaggcaataggatgttaaggattaattccattgaaatgtttgcaggggttagttaataaattatggcaggatccctaacaggacatgcaaaataaagcacaatcaactcaaacacagttgagcaaacagactgaaccttaaatcatgtacaaacttcttcagctaaactaaggtataaagagaaaagagaagaaagctacaaaggaaaataccctcaagagtttgcccgacagtttgcatagttgaacaagaaaatcgttgtcatcttccctgaaaatcaaataatgaaagagttacattttttctagtaggtatagaaagaaccagcagtaatcttgagtaagaatatttattatctgtaacaataataagaaaaaaatcttccagcaaaataaaaactgtaacaagcaaattggacattactttttctgccatcttggaaaacttgtagatgttgtaaactagaactgaagaaaattaatacagcagcctcttatatgtgaaaacaatttttttggaatttatacatagacaagagccaatttagtagaggtgtagttcatgtaacaattagttcaacaacggtggtaaaaaattgctgtgataaattataatgtaaaaagtgctgtgattaaaaattagatgtggtaatatttggtatactctataatcaaaactttgtgcaaatataaaattacttaaataaaccacattgaaattgaagtactctccaaaaaaacaaaccaccataaagtatcttataattaagatttaataaatatataattacatttatattttatacatccagttaataatcttgaaagtgagacaatagatttattaataagtaaaaattggtagtgggtcatgctagctttagatgagtaaattctttaataagttgattaccaaacagcattaatccaaaaaaatcatataaattaaggagtatatccctctcccttagtgtcttatgaaataaagtttggtcatccaggtcaatgatccgaggcaagtaagcgaaaaagacaggcttaacttataggttttctaaaaactttaccaaactatgcctaggtatcccctctgtcattaaaatcaagccaagaaaaagtgtttactttctagacaaattacagttcagattcaacatgactacagtaaacaatataacaaagatattataacacaccagtcttttatcttgtaagctctttccaggtgctctttcttaacacgagtcaaaacttctcctatgtgttctgaagcatcttccaagtttgtgacacggacctgacaataaagtatcagcataatctctcgtgatcagtatgtattacatgacaaacatacagcaataaaatctacgaaaggtttatgtatatccccaaaaaaaaagtactaagaaaaacaaaaacag

SEQ ID NO: 36313 - DNA, 5599 bp, Cannabis sativa
ccacagtcactaccaccaaggccagtaccaactttaccaccacagtcaccaccgccacactagaactaaccctaaaatcacaaacaaacaaaaaattaccaccacaaatcacaacaaccaccaccacgaccttcacttaaatccaaaattataatcaaaatataaaataacaagtaacatcaccattatctccatagaaaactagtaaaatgtcgtagctcatcgtaatccatcagagggacgagagaagagatatagagggaatgagacccttggggtttggggtttcatctctcgggagatctgtggtggctttcattttggccaatcaccaccaaaggtggctcatcggcgtgggcaatatagacacatcacaggaggcagagagagagaggggatcgtggttgggattttctaagtcgcagggttcaatttcgtggctcgtggcctagagtggtgagagaagagtgtgcgttaaagagattagaatttttttttttcttttttttttttttgttcagatagtctttcaaaagaagaagaaaattaaaagcaaacgaacaaacatttttttatttttatattttttaaaattattttttgtaatattttaataattaatattgtgtacatcattaaaatttttgtacttaatacttaggcacttcaccatagcatttaattaagagtttttttaaaaaatataaatagcaagacagaatggagagttaatagtttaaatagttttactgttaatatctaaattttacaaaatatagaatttaaaataaaatgatatttatctttttttttttattttatttttacatagatattttttgagtttgaaggtgggggctactttacggtcgaaatgcgtgataacaacgacgtttccttgttatttaggtaaaagctaatggagctttcacaactctacaactgtattctgaactttctctccttacatttgtttttttagtttttttcaggataataataataaaaaagatttaccctcagagactcgtataaattcttttgtgacctcaactcaaaaataaataaataaataaataaataaattatttcgtgacctattaaataatattttcccattttcatttcacacgtgtggaccttcagtcattttatatgtgtaaataattgactacaattttcattaaaatatatatagctactaatttaattaaatataagttttatataatttaatattataatttttaaaaaatattactaaccaattatacactcacatatctagcatctagtggtatccaatgctctatacacatatatactcaatgctctatacaacatatacactcgtacaactagaggtactaatactgttgaccttagatatgaattgtcataatagattttacctattaaagtttggtgcggtactttaacatagattgtaacaaaagtaagttctacttgtgtatgatcaaatagtctaaaaggtaaattatgagtaaaagcattgtgaaactaacaatcatggaccttgaaaactacaaaacttaatttacttttatttatgaatttgattattgaaatagtgacatagccaccgtgtaaaagctggctaagaagaaaacacaaacattttcattttcacatcaaaagttatatgaaattaaagaaaacgaatatattaggacgaagacatagatcatgcctcacctcagtatgtgtatatccatactagtcaaaaaagaaaaaaaagatagaagaagaatcttataagaatgaaaagtgattgaagcagtgtcatgaggttcattcaataacgaatgtgagcccctttgagtacttgataattagccattgtacattgtagtagtaggtaccattagctacattgaataataactatattggggcacctcgagacacatggatgtggacataaaaggaatgcccccaccttaatgagttgaactaaccaacaatttatatcactttgcagaatttgttgctatcatcatttccaaaataattaaataaatataaagaaacaaataaaggaaaattaagtttgcagttttgtcagtgcaccattgaattcgatcatgaaaccttgaataataatgttgcagatcattcatgggctataattcccagatacccaaaaagaaatattgatcataaagctaaaaggaaatcagaggaaaggttaataattagtgaagaaactaaaaatgcctttgagataaatacacaaataatggatcatgaaaagttaaacagattaaaaaataattaccaagatctgtctctaattgaaaaactaagcactggaaaaaaaatgttcaatgcacaatcttgggtttgttgttatccagtggttgtgtgagagcagtgggagaagaagccagtgggagtacctgtgaagagcttgaagggtgtggaggcagatgttgattgttctcattcgcaatcataaatgtgaacaaagacccatctctctcatcagctactactgttgaattaattgcagctttaatcccagaatctgaacaagataccaaattcaaagaagccctcttctcagcttcctccattaatctcctatacaacttttcttctgcatctctcaaaaacttgaactttgggggtggtgaagatctcaacctggtgagctcagtttctgtggaggattcaaagagagggttgaatccatggtgtttgtaagcatcaagagggttcaaaggagaagacttaagcctaggtgaagccaaaggagtaagaaatggggtgtctacacccatcattaaatcactcaagctccttgttctggacccttttctgcttctatcacctcttgatttagcatcctcagattccaaatcttctttggtttcctctttaattgtgaagagaaatctaggtgggccagctagattgtggagtctcatgagctctgactccacaccctcttctccataggccttgagcaacatatctttgcccaaaccaagctcagggtcgtcctcatgaccattcaaatctgaatcttttctctcttgggaggggttgttattacccaaagaagaagatgtgcttttccagcaaataaactgaaaaaactctttcgcaaaatttccgtactcatccacaatctctctgtctgtgattcttttcttcttccaccataacaagtaataaagctcagcaataagagccaaaagaaggcacccaaaaactagactcaaaccaagacctaaaccactgaaagatgtcatctttatctgaaaatttcacatcccccaaacgtatctaaactcaaaaaaaaaccttggattagaaaattgtctaaataaatatgtgatatattccctgtccaattattgtaacctcctaaatagtaaaagaaaatcaattgtatgtatctgaaaaataagacccaccacagccaaaaatataaataaaataaattcacaaaacactcagctttttactaaatgaaaaaccagaatcataataaaagaccctccctcgtactcttctttcttccttgtactgaacaattcacattataaaaaccttcctcaatacttgcctgaaacacacgctacgagaaataccaggttatctttgttgaaattccgtgcagaagtaaaagtttctaccctttaaagtcccaagcgtggacaaccacaaacatgttttagtagaagatgacctcaaacgaattaacaaaaacaaaatgttgggttttacaccaatttgtataaaattcaaaaacacaagtcaaaatccaaaatttggtagtatatcacttatgatatataataagcatctatatttgtattaaagagtgaaaaggaaaatgtgtatgcggggagatgaatgcggtgaaaagtttggagtgcagctcacatgggtttggaaaagcgtgtggtgtgtccacttatcaaatcatatgaaaaacggaaattaaaagaatggagtaaaaaagaaaaattctcctttttattcttaataataatataaatagctcacaaggttttctgtacttattttttaaaaaacaatgtattctctattttataaaaatatatatattaaaatattaatagatccaaaacttacatttgtatgggaaaataaacaaaaaaaaggaaagtgagaaatttttttatttttttttcaaaaatatggactgaacaaaacatttccctttttttacttttgcctttgtttccagccgcaccaaaacattcttatcttctccatttttttttcttaacaaaggcactatttcagatctgaaaaaaatcatacaaactgtgtaatgagaagggcgcaattataaagaaaaaatcgtacaagattgataatgagttcgtcttcttcttcggtgaagtttccacgtttgaggtcaggtttcaggtaattaatccaacgaagcctttaactcttgccacaccttaggtagtcaacgccagcaaccctcactctgtgggcccttatatatgcaataagtccatcatcttcttctttagtcaaagcccctctttttgtattgagcatgagaaaaagaattatagatttgaaacaattagttttctttttttcttttttctttataaaaaagaataaaaatattaaaattaatttctcttctatttttttcttctttgtttttactttttagcagaaaatttggtggccttattttttggtgttgctgaaacattaaggttagtccttgggaggatttggggtctaatttataggattttaactaaataagagaaatagagagaggagatatatatttaaagttgtttactgattactgtcttgaaatagttgtttatacatagttctcatgtattaaaacggttgtttaacaaaattgaaaaaattgatacattagttttagttatggaacctttgcaaattttgtattgaacaataatcattaagatgacaacgagcactatgctaattatgaatcaagcggaaaactaatatcaagagattgcacttttgttgaagtagtgtagatagtgatggagaaactacaatacaacagtgaaacaactcaaatacaattgaaataccaactaaaggaaggcaaccactccaactcaaggatgacaaaagtctgatgttttacataaagttattaacaagggaaattaatttcacgcaatatccattatgtgtgaacacattcagcaacacagcaacataattctttttagcaactacccaaacaatggtgtgcaacaatgtgataataaaagaaaaatgcaatcactcatgaaattcttattttaatatttccaattttattactgaattaaatacttaaataaatgcaaaataatgaaattggtactgaaattttttttttttgtaggtacagaagacaactctgtaactccagaagaaactaaaaaaacaaacaatgcaaaaaagtaaaaacacacaaagtttttgtatgttgtttcaataatcctttcagactgctactagtccacggggccatgcccagagataagattcattagataggtctaaaacatacaaagtaattgacttatgcataaat

SEQ ID NO: 36314 - DNA, 6080 bp, Cannabis sativa
tgctaacggactagtggtttaggtagttttactaccaaaattttagattagggggttagttgtaaaaacctgtccacttaaaggggttttaccgcaaataacccttcgggtaaagccaaccaaccacccaacccatttcttcttcgtcttcttcaatattctccgccaaaaagccagaagagagtgagtgagagagagatggatagcgacattgaagaatcgcagaagaaaaaacttagaaagagctcgtattccggaggggactattctcgcaaggtatcttttctcaaaccattttatcttcctatatatattcctttcctttgtctattctttttcagttttacataacaattttgtgttttcagttcaaaacaacatgttttagtatcatcaagttcgattcattctgaaaaaagaaaagaaaaacctcttaaattaccgataatctctgtaaaaaaaaaacaaacacattcatttttgtacgacaagatggtgagtgagaaatactttgaatagcaataaactagctagaagctcttctacgtttctacagttacagtatgtgcttttgcaatttttctgaggtagagaatgattacaaataatatgtatcggacattttgttgattttgattgtttaattcaactttgcgtcagtggttgttattttcaatactattatattacatctaatctgacttattatgtacatgagtgtgatgtctggggggaactattgcggcaacttgagcagtttccccgacgtccctatgacataatgggagaattggtaatgattcttattcctttaataaagtggcttttccatttcggcgagattaatgtaatcacaggctaatttgttcaatttatttggaatttcattggttattagtttgttggtatttcaaactgtttagatttgataataccattctgagagctttttgagagatgaagtgttcaaaagggcaatagctactaattgtaaatggatataatgcccatggttttctcccatgaggtcttggtttgattcctcatgcctgcctagtaatttgcttcaagtggtaatgatgcaggaaaaggaatactaaaatcaatatcatcatttattgttttgtatcaacaaaacgaaagagctcaaagagagctggttagaggttttgatgtttctactaatctatttaaggattagtgtctgaattatataaaagcttcatacttcatatttctttaacataaatgggtttcaatttttttcttctataggtatcgacatgttagaattgtgtgatctgagaataattaattgttttgatttacataatggaattatatattctgttgttggcatagcacttagtactcaatgattattgattggttaattattttaaaaacatagctcttttcttctttactgtcttcactattttctctatatataaggtcttttcttgactcaatgattgacttggatccatgtatgccatgctttttcacagacttttatacaagatgatgatatccgtttagagactacacgagatagatgtaagtttttatatttttcagcagaagaaagacaaatgagaaagctcctatttttttgctttgattttcacaatttacatgcggctggtttctacttttaaaggggctaagcttctatgttgcttcacagtttttaatgctctcaaacgacatggggtgttagtagagcgtctttccaggtgtcttttttttccctttgtcttgtttcttttagctttatttcattatgtagttttcttgttgttaaatataatctcattagcatttgtgtagtagaaaatatttgtattttgcagatttcttcatgaaaagattttcgtaaaattctactcttacacttgtattgaggttatgcatatcagtgaggagaaaatttaagtgatgacatagaagagaaagagtatttctggaatttgatttgaagaaggagtaaaaagttaatgttaacagtttgttgtcagggcatggtgctttcatgaatttggttactatccttttggcatttgatcgttatcctatttctatttcacaaacacacatttttttttttttttttttgtggagacaaaggtaacttgcctaaagcattcccatgtttgtacttaaaatatcaaacaatataattgcttggtgagaacttttatattatattttggtggaaacctacacattactttcaacaaggtctagcttcttttttttttaagtattctggaatatcctgatcataggtttaaacaatgtatagattgcaaaagatgcaattatagtagttaaactcatactacattttggtgttcattgatttcaatagggattctgacaagatgatttttgagcgtctacaaaatgaatttgaagcagctcgatcttctcaaactcaaggtagctttataaatgagcttctcaaatccagtggttcttagctgtacagattagagttatggaacttagagataatttgaaagctcatacaaatgtggaaattagcttgaattcagcagttcaactcacgtaaaagctaactttttcctttctggattgtcgggtcataaattggtggcatagttctctttttctttctgtccctctatttttcttttccttagtttgacaaattattcttatctttttcttttcttttagagatttatttagatggagaagagtggaatgatgggctattagctaccataagagaacgggtacagtattatagtgttttgcattgtttgagtttactttggttcattttgataatttgaatatggtttaggttgttgatttatgattacatgattcaggctgctgatgttaatgatcgttttcatctttcatgtttcttgatgaatgtggaattatatctcacagttgatttggattttaatcaggttcacatggaggcagacagaaaggcaatgtcgggagacacaaatgatttggcaagtcctcttgttcaggaaaaagttacgtataaagttggaagtaaggtaataattctggcatgttgaatcaggatgtcgtacatcaccttagagatgcatctcttctccaagactaagataatacaaacccaaggctacatattcctcttcccaagttaattatagtttttctctatcatttgctttcaaaggggcatttcttaggggttagtgatcatctattaacttatcccagaaaaggtttcaatcatggaaaatggtagattttgggagaaaaaacagccaaggagggctcacaactatgttacataattatatgtggaatttcttggactgggcacagattttgtgggagaaagcaaataatttgttagtcagagatggaaagaggaggtgaatgtactccttgggattgcaacttagttttgttaataagattacttggtggaggggcttaaatggttgaaatttgaaaatagttaataagaggtttttggccttgatttactgcttgtataatagttatcaattatctatctatttttctatatatatttatactagaatgtttttttagcctatattttcaattgatttttcttttttttttttggttaaatataaatactagtgcaatgctgtaatatttttaaattaagtgaaggtaagttatctcatcataatgttgttttatggaagtgtaactgattatagaaaaattggttagcaacttatttccttattctacagcagtttgcagtaatgttttctgaactagcttctgattgcttaccttatttttggtcaggtgatttgctgcttggaaggggcaagaattggaatacaatatgagacatcttttgcaggtaacattgaaatgatttttattatctcaactaattatgttaaacgtcctaactattcagttatgtttcctgttgtcaggtttatgtcatccactttattcccttttctaggcttcccattgatgaaaaatgaaaatagaatgggatactgaagataggcatctcttgattcgtctcctccactttggcccaaaccccttttttatacaacgccataatcttaaaaatcccactccacatggtcaatatttcctctaccctggaaaatcctgtcattctctccaaccaacggtcctgcaacattgccaaaacactgcagttccaaataaacttccatttcttatcaaagtctcttacaaattgaagatattgggtcatttggtaccatcttttcatctccagcatataagtcacttatagcttgaaagtcccatttgtagtagttaccaagtgattattaaatacggaatactgtacaagttatttgaacgtcaatctgttataacagtttttatctctggttgatcagatttacaaactggtataatagaatgcttacagaaataaaattactaaaactaaatgacagaaaaaatttatgtggttcaataaacctagtccacgggctacgtccatagataaaatttattaggaagaaataccttgaagcttaagaatgtggtgaacccaactgacaagacaaaatgaaaatctgtagtgttgatatttcaactgcttgtgataatttttgtacaacataaattgtctagaagattttatacatgaactctaaggttattgacatgattgtgacatttagcaacaaggggaatctgatctcttatgaaaatgatttgcaggagaaccttgcgagttgtatcattgtgtgcttgagagcaagtcatttcttgaaaagatgactgtcttggaacacacacttccattttttttgccaataaaggaagcagaaaatgatcttctttcatcaaatgctatggtaactttgattttttgcattggccttgttgacgtcactttctcctgtctgtacttgttcagttgttctcaatatttgttcttatggctgctttcagaaatttatagattatattggagaacttctacaggcttatgtggatagacgggagcaggtatgctgttggtgtaataggagatcataaatatacccttttttagaaatatatatattatatatatatatattttgctgaagaatatatgctaaatataaatatacgattgtggacatgagtccttgattttgttttggttagacattaccatatcagtaggtaaaattatgatgttaaaagaagaaaaaaaaaagttttcatgatttttgtagttattgcctgacccctttccaaacttttcttttcacatgcaggttcgacttgtgaaggaattgtacggaaaccaaattggagaactttatcatagcctgccctaccagatgattgaattttcactagatgactttgattggtctgtgcattttgttcctatgattgcttttgaaattttacttatatattcactgaattaatgttgattcttatctgccacctcaatcctttttgtttgaaatattcattttatgtttccaaatgactgtgttctgcttgtatattctacattataggatcttttataacagtctcaagtttttgtgtcttctgtgaaagcagggttgtttcaatgtttgtgccctactattattctttgaattttgtttaacaaagatctagactttgaatataagaaagaatatggggttgcgtcaatgaatctggaagtaaaactcatttactggagacacttttaattattttattgaataaataggatttatccctccgaactattagctttgtagagttttgtctcttgaatatttctctgttgcaaaaatccccttgaattataaaaattgctccaaaattcccttgcagttgcattatgcttatttctttcaacaatatgttgatatatcactaacatgatgttattttagcccaatttaagagtctagacaaaaaataaatgcataaatagcattctaatgatgaattatgagaatatgtatatacattctttgagcttttatgtttaatgtcaataaactgaatattaagtattttaaagtttttaaataagctcttgtacataagcatattgttttaaaaaa

SEQ ID NO: 36315 - DNA, 11901 bp, Cannabis sativa
  modified_base (28)..(40): a, c, t, g, unknown or other
  modified_base (334)..(341): a, c, t, g, unknown or other
aaaaaaaaaataaaagtttttttttttnnnnnnnnnnnnntttttttttttttttgggtattttggtcaattttattttatatgtatattggtagtttactagtttcacttaaatctggtctggtccagaacgcttgcactactatcggcgtagccaagaagcgaagtttaggaaaaccacggagacacacactcactcacacatttatatatataaagtgactgacccaacggaagcacatcccaaatctttacttcagaatcggaaatggttgaacccaaaaccaagtacgatcgtcagctcaggtgtgctccctctctctctctctctctnnnnnnnnctctctctctctctctctcagaatttaactaattttccccaactccatagcatcttttaactccaaattctgctcttaagcttcatgtatttagcgatgtattttttgagcgtgtattagcatttttcttcctatttttgactgggctttgcgtacttcctctttctctccaagaatttcatattttttattttttaatatttccgggaatttgaagttttgtcttgaaattttgagtccgaagcaaatttcattgcctgttagggttttcctgttgacgtttagaggaatcttaagtttgagttttccctagaactaggtagtataaggaggacactaatttgttttacttaaacttcctgcgtcatctggatttttcatgttaggggtggactgagaagaacgattaagcaagcatttgtatgtattgtgcttgctttgttagtgtgtgtattttacagctgtaggaatagatattgatatctttataattgggtaactgtgtcactaacatcttatctcgagttagattttgtgtttgactgagttagtacttagtattacgtatatctgatcgtaagctctagatgtggtattttatgtatatactgcaatgtgtgatacgcttggtttttcttaagcaaaatgagatttctatatcttttgccgttatgtaaattttccatctaaaattgaaaattgcagaatatggggtgaacaggggcagactgctcttgagaaagccagtatatgtctgcttaattgtggccccacgggctctgaaacactaaaaaatcttgtccttggtggggttggtagcatcactgtagtggatggttctaaggttgaagttggtgaccttggaaataactttatgggtatgtatttcatggtgtcgttgcatttggttactgttgagtttgtcctcattttagttgggtcttgttagttgatgaatcgtgcgttggacaatcaaaggcaaaaagtgtgtgtgcatttcttcaagagcttaatgatgctgttaaggccaagttcatagaagagtatccggaggcgctaattgagacaaatccatcttttttttctcagttcaccttggttgtggccactcaggtatggagtgatgttttttatttttacatgctattaatagtgagtacatatatctgaaatagagccaagcttatctctaagaatatacattttttttatatctcactcactgtgtctcagtgctcatgtaggatgcttattcaaattgtggtttcaaattgttaaatttctaatcattagtgtgttttacggagtttcttttactttacattcagctagtggaggattcgatgataaagcttgatagaatttgtcgggaggcaaatgtaatgttggtttttgctcgctcctatggcctaacggggttagttcgaattagtgtgaaggtaatttgtacagttatattttaggttgttctgtattttgctgttgtaacaagtgaattgaaacactttttctataatcacactcagtgccacagaacatggcaatgacataacaaggtttatctagagctttgttgtcattgatgttttctagatttaatgattaaaaggaaaatattacttgatgttgaaatgagcataccaagttttaagtataatgaaatgcaatctttaatgtttgttatgttgctggcaggagcatactattattgaatctaagcctgatcattttctagatgaccttcggttaaataacccatggcctgagcttaagaggtatggcttgagcttgacattttagggtggggtggggattggctctttaatttttgtttcttttgatggccaaaacaataatttccaagtgatccctatttgttgctttttgggcctatatcttgtacatggaagtatgcattacattttttagttacatacatttataattgcaatttattccttgttttagatactgactgcaaatttacttatactaggtttgcagaatccattgatctagatgtgttggatcctgttgttcacaaacacataccgtatgtagtcattctcgtgaaaatggcactagagtgggccaataagcatggcggttctcttccttcaaccagagaagagaaaaaagaattcaaggtttaactgcttgatttatacattctgttacttggcgctcttttaattgcttcacagtatgtaatttatttcagctaccaaatgttttaggagcttctcaaagctaaaatgactgcagcagatgaagataactacaaggaggctatcgaggcctcctttaaagtttttgctccgcgaggaattagtgagttttaatttttgatcctgattgtcatttttagtctaatttacatataaactcgtttcatatgtcatgctgggtaataatattgcactccatgaggatatgattaggaaaatgtatattagcatagtatggaattccatatgccgttaattatatacaatacgaaattagaggttaaaaagcatatgcttattcattatttaacttacaaggtccaaacttatttttctttttccttatttttttttttcaaaaaagcatgacgagggtcttctccactttttgttcctaggtttcttcatgtttctcaagttgttatgtggacctggaaaacattttcttgatttttcatttctaatttgtcgaccacaataagttataatccaaaaccaattttgttaattaggtggctaaatttacttttacatcccaggttcagatttacgacagataattgatgataagtctgctgaagttaatattaattcgtcagacttttgggtaatggtggcagcattgaaggttggttaaactaatattttgtgtgacatccttcagttgtgtgcttcacatttagtgtgataaaattcaagcagtgcatgattatttcttgtttattcactacttaatactagtttcaagacttcactgtgatcctcccctcttatatttcccttctctcttttccttggtgctattgttattataattttttcttgaatcacctcgttgatggaattcttaataagtctttattctgcaaaaggcagggcttgggttttgaaatagttgtaattatctttgtatctagggcccgacaaagttgatttttttatttaaagtcctaaaagtttattaattatctttttgtatctcttatgggactcttaaagttatgagatttgaagtgtcttttatttcttttctcaggaattcataaaaaatgaaggtggtggtgaggctcccctggagggatcaataccagatatgacatcctcaactgagttagttgcctaaattatctccaatctatatacttcatattttgatgctattccatctctctacttgagtattattggatatgatacactgtacattaactaaacctgaattaaatctgtgcagatgttatgtgaatttacagaatatctacctagctaaggctgaggctgattttcttgctattgagcaacgggttaggaatattctgaagaaaattggtaaagatcctagtagtatctcaaaggcaataataaagagcttttgtaagaattcaagaaaactaagagtaagtaaatgatctcacttcatcatctactcaacatttatttcataatttgcactgcaaacggacactattaaggatgaaggttatagacctacctcgaagtttctactggtgctaaccttttgaggaaagtctagacatctttaagttttttactaacctattgagggctcctacgctattctggaaataattttaaaaaagaagcttaaacagaattttgatatattcgctgttatattggaaatgatagtttccactgtatatttatctgctttggctgttgaattatttatctaactgcaatgatttgacatgatatacagaagttgttgagctattgaaaatagtctagatccagtttctcttgtgcagggaaataaatagaatgtttcttaattccaatttatacttggtatctgtctttccaaagttgtcacttgtagaccatatcatcatattaggaaacttgacgtagtagtgtatctagtgtattatttggtatatcatatacatataggtatagaattattatgtactaattattaccttgtagatctgtaggtatcgccttattgaagatgaatttaattctccattattgtcagaattacagaagtatataacagatgaagattacaggtgaattttacttgttaagcttttgtcacgtaatgttctgtcacagtgccttgtactccaatgatagattttaaactataggattattgagatgatagtgattttgttgtatttgagttgtctttggtaggaattgaattatagatatttaaatgttttacaagatggtagcttggtaggagtaatatggctaaacttctttattatgatcttctgtaccagccgtgctgattttgtttgatattttgacgagcttatttctaacgtgtacctcagtttaccctcaatccaaatgggagaaaggaaaaagaattataacaaaagaatgcagccgaacaattatcttgcttgtaactgtctgtttcctgtttatacctctggcagtgttgcagtaggattctacattctgcttagagctgttgataggtttgctgccaattataacagttttcctggacagtttgatgggtaatggtcaacgcctgtgaactctttttctccttacaaattaatgttatagctcatgacatatgctttgcatgctcaaagtggtaattttcctgcagtgccatggatgaggacatatctcgattgaagactactgctgttggcttacttggtgacttgggtgtcaatggatcaaccttaactgaggaccttattagtgagatatgtcgatatggtgctgcagagctacatgttgttgctgctttcgttggaggaatcgcatcacaagaagtgattaaggttttgttttctagatctcacacttagatttgcatgttcctgagaagggtttttgggttttctcacaatctctcattttgttttgtgggtggggtgctgttcctcaaatacatcattgtaattaatgttttttttcctcactgtcgagacagctcataacaagacagtttgtacccatgtgtggaacttttattttcaatggcatcgatcacaaatctcaactgttgctactttagtggaaacaagctagagcctagaactggtcagttcttaccgtttaatctttgacataataacaatgaagtgctgggaccaatgctgatgttggtgctgtcttttgattttcgcccacagatatcttcaggagacttgagcttttcaaaggcttggattggtggaagttcacagcttttttgccatcttatttgggggctaagtaaagctttcttacctcatgctgttgttgcaggaataagacaataacttgataaattttatcaagatattgaattcttttgtgacttctttattgtgaaagttagggggagagagttctgaggtaggttggacggcttcttaggaacttatttttttttttttttataaaaaagtaacatttagaaagtttggtacaccagagaatcaatcaaaaaaagaagaagattttgtgtatcaattttgatggcaggtgttgaatatttttgaacggatttcaacgacatgaaagaggggtagaagtaatcttgttttgaattattactactgcttattttgactcaaaactataccaaaatgacgtttctaattgttcatgatccattgtggtaaacttttggttatcttttattatttaaatatccgttaattgttgagacttgcagataaattatctgttccaatttaacatttttctcttcatttaatttaatctaattaataattaaatttagaaaattattatatctaattagatttcaaaattttattcaattcaattatgactttgatcggttctttaattgaatatttaattataaatttaattttttatcttaacatcaaatattaaaataaatacataaaaattaaatatcatcttttagttaactctaaaaatataattgttgtgtaatttaattaaaatatgaaataagtaaaataacagtattatcaagtaatacaatagaacaaaacattatgaaaacaaatctagaaaacaactaaatgttacaaattcaacgcaaaaaaaaaaaattactaaaaatataattaaaatatatatttttttatttttttttgaacaaatatacttcttatcatacataaataattttttcaatatatataaatataattaaattggattgattttgaattaaaatttaattttaagaacgacatttaataatcgattcaatccaattagaatttaactgtaattgaatatctatttttttgtaattgaattagattgatttggttcaattaattagatattgtccacccattaccagtgactgggtttttaattagtcaattttcatttacaagcagcttctaacccatgcaaatgcacatgataatttgagaagctaataaagcagtttaatcacagccggtagtgaatgagttgtttttgtagtagaaaccaccaatatttatctataataaagaatatcagtagcagaatccatcgttataatatgaatgatttgtcatttgcatttttgaagccacgccaagataatatagataatcggtaaatgacgagaaacttgttataaactaagaaaacgtgtaattacgatcatgaacaaaattttcaccgtaggggaatgtcaaacatgataaactaaactgtagcccaaaactggagtttctcatttttcatttggaaaataaataaggtgagaatgaaaagcaaaaacgtgttgttcatatttctctgtttggtcacgaaaacacaagttttataacaggttttgctccatgccatttgagctcatcaagtcttggtactgtcagatgctgtgttcgaaggattgtagacgctgaattctccgaagcccctcctaccactgaaaaacgaagggctcataattaaccccttgggacacacaaacaaacatttagcaactataacatacttgtagatacaactgtcacaggaataaaatttggatgaaaaccaagaagcaacataataaaggtgtacatggacatgctgcatagtgcatacgaatatggaaaaggataagttactaatttatgctactataatcattaaggtagttgtacctgtgcataatatcccagccagcaggtaagaaacgagggtgaacagcttccacaaatacttgtctccatttttgacaaaactgactgataccttcatccccctcattttctagtatataatctacaacttgtttcccatgaggtccatgtcctaataaagacaacttcgagttatgtttagaacgtgcacttccatcacttttcgaagggcagtagtcaacttttccatttggtaaacttttattcgcgcaatcatcatcaccctttacacaactgacgttgtttgcatcagaaattatgtatgtgtttgagtttgagctcttctcagcaatggttggggaatttccgtcagttcccaaatcagagtatgaagagttgcaatgtatagcaacatcctttaccagagaaaaatcacattcttctttagtatcagaggaatttgaaatattaacttctgttgtcatgctactggagctattttcatgctctatatctgttacggagctgttttgggcatggttaaaagaaattcctttctttttattaagtcgtcttctctcataaggattcatgccaactaacagagctttttccaaatcatcctgagaaatatctcttcctccgtaatagctcataacaacctgcaaagagtttacaaaataaattgtctaagatagatgatcagaaaaataataataataataagcagcttgaaccctcaattaacaggcaaaacttctagggaaatcgggcaacatgaaacgatttgcaatcagagatatattaagcacaattgaaatattcaatttataaaagtttagcagtacccctgtcagttcttcacggcgctcagatggcatcctaggtccatgccgcaaaagagccatcgcagctgttcgtaactgtaagggagaaacaccggcctcttccaatgactcgcatttaagttggtgttcttttgaatcaaccactttacgaacaaaaagtggaactccatattctttagcaactacctttttatacttttcagcagttgcatgagcaacttcatggcagtccacacaaagtaggacaatatcatgagaacggtgacttttcagatgctcaggaaaatgcattctgtaacatgagggaataatacgatagcgtaaatagtgatttctttcaccacagcctacacatatgttctttttactttgtatataaaagtcattatcttcatcttctggacgacccttgggttcaaaaagaagcataatggcaggaggattttcatcgaccatctttgctaaatcccgacgaagatacctgaaggaatatgaatgtcttgttatcatgcaaaaaaaaacatttttgagaggaaatttgaaagagaaggctagtagtgttcacaaaccattcaagcttcttctgatcacagtaacaaagcagccgtccatcgtttgcataaatcctacaattatgataaactggagctttgcaagaaaacttttgaacaaataatgctcgagaagccttccgagtaaattgctttgagtttttgaccgttttttgtttggaaactaatggcaatttcaaattacaactaaccaacaaggcataattgaatattgatagcggacagctcccatgtgaacctaagcacttttgaagaattgttggaaaaatgtcagggtaggctatcttgtcttggagtagatcacaaagattttctaaatggctgtaaacaacaggggatggagatgggtggagagaagtgaaacttgaatctgcgttaatatcagcttcgccaatagctttacatatatcctttgaactagtaggaatattatcagcaagagcaatgatagcttgatccgataatacatatctcaagctctcatcatgaacacgggcctggaaattggtagaatacatgtctgctcaatatatagaatttactccaattgtgtataaacatatgcattataatattttgttccagtggagctctttttttttttatcaggatagtaatatcatttgtagctaaacttataaaaatgattaccattaaatctctccatgcacacaatcgcctcaccacatcctgaaatccatacaaaacattgctgcattacaaaactggatgagatgatactgacaattaatatttatatttgcacaaggaagccacctgaaatccaccagatactattgagttgcctcgaccattcagacggcgggaaaatattgacaaagcagcagattccccaggagatgcttcattttcttttgagaatagttgcatacacattgtgtttgaacgtcgactagcctcaagaacaaaatggaatttgtcatcggtggaagttttctctgatacattaatatatttagtattccaattctatgaggaaccatacatgcaggtttcaaaaaggttttcaatagattagctaagcatgtgacccaatcaataatatgtgtgctgaattttcattgttcatcaagaatgaaaaattatctaagctgatatcatgcaaatctctcatattaagtacagtctatgtcaactagaattttcctctttgagagaaaaaataaaaagcgaatgcatactactcaagcacatagaacgtaccactatattagtcttgttcaacagccataataataattggaaatataactacatgttaaattgttactctttccccaactactttaaaaaaaacaggagtcgaaactagttacaaaagaaatgttgaggtcataccatttttctgttgttccagttcagcaattagacaattcgcaatatataatagatagtgtgcatcagttcgagcatattgcaccatttccattgacaatgggcgttgcctccagtcttcacgctatgatacaataaaacaatggttaagcagtgagtttaggtattctggagttgctacaccttgcgtaccaaaatgtcaaccaataatttaaatttactcccttgattcacctgtgaagacataaattcaagaaaaaagaaatttacaagattgaaagtatcattatgaaaggctaacaaggagcaaaacaaacaacataaatagggccacacctgtaacaatttgtttgtaattacaccacagtatgactccagtaggtaggctagtgacttctgtggttttgacagcacctcacatgcctgagaacaataacatgaagaattcataaatattttatttgcatatgtgtatttgtataaataatgaagtaggtagatggtaaataaatttagacaagtctcaaaattttgaactaaccttggctgtgtcaaataaattaacaacatatatgtgaaagtctctttgtagccaaagaacatcattatctgcaccatgaaacacctacatcacaacaacttaaattaacaaccgtaacatctaaatgccccttaaggaaaagaatcacatgaaggaattatagaagaggaatgcaaggaagacaaaatgaatcaccccttctaactaattgtaagaaaaatttcttaaaatgtgtcccaaatggcatgaataagaaatagaagtactttcctgatcaccattcccattaaaattcactactgatcagattgtaaatatgatccagagcaagatataaaagagtagtgagctcactcctcgaattcttgagtaaattgttcaattttaactgaaaaataccttacaaatgctaggattagcaaacaccgggcgaagaagtcccatgaaatcatgaagagcaatagtgtctatcaaataatcttctttcagagtagatacctagtcaatttcaaaccaaaaaaaattacaacataaaaacaaaaaacaaatttgcaatgaaacttgagcatttaacaaacaatgaatattccattcacctgaaccaaagctgtaaagcctagaaaggaccgtaagctgtgctgctcagtatcaacaccaaagactttctctttactcaatacggtcacaagctccttcaactccaactcagtatcaacccaaatgtatgactcattcatcttcatatcaacattcttaccaactaactgtaatccttcaagtcttggatattccagtaagctggttatctcagcctcatatggatgcaaattcaaacttttttctgtttaaaaacctcacaaacattacaagaaaactcatttctcctgcactactcttgagccttaaccgtctacttcataaagaaaacattaaaaatagaaaaaaaaaaaaa

SEQ ID NO: 36316 - DNA, 7876 bp, Cannabis sativa
gactacaagcaagcatcgaagccagtaccagcagggccaaaaggggactttgtgccggtttacgtggcggtagggatgattggggtggccttgatgatcgggctacacacggccaagcaacaactgatgcatagtccgaacgtgttcgtgaaaaagaagcgtcgagagagtttgccggaggtggcggagccggagtacgtgatggaatgcgctgacaggttcttgcacaagtcgttttttaggagagtggcgcatgttcaagatccccaagcgaattactccattaaagatggtactaggggagatgcttatgctcacactccacgtgctgagactctcaagtctgttggagtttgattaatgccgctttgggattttgggctttcattttctttttcagtaataatgtatgtatgtacatatttgtttctatcttggttatatgttggatttgtgggatagtttgttgaattctcccaaaacccatttgctgttatgattttagaataccatggtggtggtggttgtggttggccaagcccaggtgggtgattgcgaaccaatgttgatcatgagggttgatgagcgattgaataataaacgaccaaaagaaattttttgatttttattctaagagtctccattgttttggttggatattatgatctttgataaatttaaaactaaaccatggtcttcgtccaatttaattcaaactattttactcatagtttcattaatcttatggtgctcattgaatcagttattttttattgattatttttcaatataaaatatcttttaaagagagatcacggattattattgtattgattttgaaaattattattgtattgcttttgaatgtttttttccgtatacacaacaagaacataggagatttagctgccaattggtttattttttattattctagcagtcaatttgggattttaatgaatgcgatggctgtggttttatccatgaatgataataggattagacatgtcgaacgcaaattccatattctttgtgaaactcacttttcagttattcttcgaaatacgatgtgcggatggtgaaagaaaaaaaaaattcccagttaattgaaatcaaaaccttctggttctgaaggaaaagatttggttcagcagacactgtgattctgtgacaattacactacgttctacgttctgtaacaattatagtcacaaaaacgacattaaaaatgcctttttaagtgagaattactatttttgtctattttcaatctctagtaaaccgaataactctgtacaaaacaacatactaaaaagcacaatgttttatttaaagaaccaaccaaaaaaaatgtcacctttattatgacacgatggcaaaaaaaattgttctcatctaacaaaaacaaattcgcaaaactaaaacaaaacttaaagcaggtccatgcttcaaccacctttatatatgttttattttctcttttccatgtgcgattagctgactccaggtgtgaataattatgactataacttaactttaggccacacaattttcttttctaagtttcagctatacctcttcaggtcttaaaattacatttaccgccggccgccagcagcttttctaagagggggagcgtcctcatcgtcagactcaatgtccccgtagcgccacattccgcgcctaccagttcgagcttcttcctggaatttctccaggttctcaaaggccaattgcttgtcctttgagccccatctcctccttttctctagtctagcaagtccatcctgaaagtttcattggggcaaatattaagattcacaatttccaaaacaactcacaaacatcagcagtttttcagtttatgatatgattatgacatagaaccagcagtgccccaaaatatggaaacaataactacaataaaaaagaccaagtggaaaggaaagattatttacttgaagcatggcagcgtttacgctgatctcagcatcaacagcgacgagagtaacactaatgattggtccggttccctgacctttcacttttccccctgaagcatccctttcctcaatcttggctctaaactctttagagctacttagagtcagctcacttaaatactcagctgcttcttcaccaaaatcatcctccaagcctggaactttgatgtaggcaaggttacagagctgagcaaggccaggtgcagcagacactgaagcatcaacaggccgcaattgcttgtaggtaacaacctcttgattaccatagtcaatgtagaacacttcgaacttgtccgtaagagattcaacagctccacgtggtccattgacaatcttcaaggtcaacgttaaacaataagcacaagagataaatgagtcgataaatcatatgtcaagacatgattaatttacttggagaaaaaacatacacctgtaccttaaattcaaaatatttgggtttcatcatgaagatttgaacccaaaccattattctcccacccgacaccccacaaccacacacccaaaaaaaaaagacaaagaaagaaaccctaccacttgatctagcctaaaaaatgaaatgaaactgatatttaagatcatacattctacgctccacagtgacaaaaggctacacctaattgctatgtaaatcccgtagattctaacaccagatcttatgaagcaaaaagaaagcaaaagtatctttacaaaagcaaaataggcccccaggaagattttattgaaacaaatgttgaatacaaaacaaacgatctgagttttttcttaaggctagaagttctcctatatatattggaactgtcaaatttctgttgaaataaagtgaaacaggcaatagcattatttttgctagcagtactaaggagagcagtgcggtaaattctaaatcagaatcatatactcatacacaacggaagaaaaaagaaagggggtgaaaggttaactcaaacacaaatagcagagataaaactttgaaacaaatacaagaaaaggatgagccaagatatcaagacagagcacaactcaccatagctcggttccaagaaccatctgcactaaactgtgcaagaaccatgtccccctttttaggattaaaagctccaatcacaggagcttcttgaatattcaaggccgccaactgttgttgaatgggtgcaagcttctgatccccaactgtctgaacatacaacatgcctccacccaaaacttcagtaaccaccacctgaaaatacaatcaagaaggcaagtttattaccaaccaattcatcatgctcttaaattgctaaagctatggtgctacaacaaacctttagtacttccttttgtttactttcagctgctactgctgctgcaccgttggagacttcctccccttcaacataattctcccatatctgtaacaaaaaaattgattagaaaattaacagaataagatacctatatgcacttgtggtttgcttcttactttcagcttctgttttttggcaacttgctcagctttttcaagaaggtggaattcaataatcctgtcattgccaaaggaattttgaagtttggccagtccagcttcaagaagtgcaactgccacattgtgtttagactcccacaaagatccaatgaaagttccagtcttatcgacattttccactagaatctgcacaagaaaaaaaaattaatactgtagataaccagcaaagcaagggaacttcaccagtctaaaggaaaactagaaatacctcaacatctctctgcattattttccgcctcattaaagcaattgcttcttccgaatatggttcattacgagcagggcatcgaacaccagaaagtgacaaggcaatgctgcatgtttgctttgggagtaatactttgaaacggtgaccactaaatacatactccaccacagcaggaatcctcccagctctgtgtagggatggtagaaagtccttcgatttctttgatggtgcctattagaaaaaggaaaagaaagatacagaattatatagagaaaatattaacaaatacatgatccttgcattagtttaatctctcaccgcaataagatcggttacgtgcatgactggaggatccttggcagagtgaattcctttcttcccagcaattgctcgtgtttctgcagctagaagggcatcataatgatttgacctttcctcaaaatctcgatgcctaataacagttccaaagccacgcccaaccacaagctcagcaacattcaccccagctggctggctggcagtagtggcttgtactgggatatcatctccctcagccttaacaggagaaactagaaagatcgatccaaaatccattactctggaatctgtagatccagctgcagctgtaggcgcatcagtcatgccaacctttctagagtactccatttgtacatttaccttcacatatgaccaacattaattaatgctcaaaaccaccagaataaaaagtgaaataatgtacaaaaaaaaaagtgtcaagtataacttattataatcattatagaaataataatagttgaaagaaaaagaaggcttcgaaggacaatttctaataataataataataatcaagtattgtgcaacaacaagtgacatacttgttttcccagaatccgagttctcaggaattcttttgcttcacgagcatagggagcaggtttttcatctctccgagggttgcctattctaggacacctaatactagacaaattcactcgtcgctcagctgaaggacttccaaattcaacagcgtcatctgcaacaataacgcagtccccactaacaatctcaaccacctgatgagcaaaccatcaaaaaattatatacatgcacacaccgggcagaatgaaatggcttataaattaaactgtttaaggaaaaatgcacaacgtaaaaaaggcctgtcaacctacctttcctgtgaaattctggttgtgaattgcttttgagtttgtagcaggaggaatgtaatttgtccaaatcctcaatctggtttttttggcctgaagttctgcagtctttagctttctcttcgcatcttcttccatcatatttgcgctccattcaacatacttaccaagaccctatggaaaacgttagaagaatttaagtatgggcccttcaaaataaattcattataaaaagaggaagaaaatattgatagtaaagcaaaccaggcaaataataacatatcaatgtaagttcagctggcagccatgattatatgttattacattttccacgagctccagagccaggtcttttgctgattctccatcaggataatacactgacccaatcaaattactgaatttgtcgacaccttccaagacaatacgaacctataaaacacaccagttagatgcaaaataaaataagtgcagcaggaaaacctatataatcactgtttacctctcgattcaatgtacggatctctgtaaaatacttggcttccgcagcaaatggatcagcaccttcgtttggtgaaggtgttgaagctgcaactctttgtgcagatgttagtggccctcgaggttcagtagaagcatttccatttgcttcatctggtacttctgcttcaataacaggctcaggtgcaggtcgtcttcccattgatggagactaattcaataaagataaagtgtaaaaataaagtctacacacatgcacagaaaaaagagtgccgtgtctatagataacttaatgaacttttacatagaacatggaagtgtaaattacctggattccagcaacgaacacctgaacaaactgaaactctggaagcaagtaaacgcgaaccgtactaccatcacgaacctgctcaacaatgccttgcatgggcctgcccttatttgctgccaacaaacccatagcatctaggttgctaggatcacctatagcagagggaggtagatccctcacggatgcctcagcagcaccaggaacctgcataacatgaacacaataatgtttatgggtcagcagagagtaaaacaagagggaaacctcaaagggagagaagtatacacttctactgtcttagaaaattagattatcaattattcataaagctggagaaagaatttaattgagaaccttgctccagcgaccaagtccttcttgcttagcttgctcttctaggttcaagagctctgcaatgtcaggactagcttcccctttctgctgaccctgctccctgacctgataacaagattaagctgattttacaggaaatattggggcatggaatcttgtgtccaattatagaagaataacggttatacctttgcccagcctgcagcaacaaccagctttgcgacattgtctctgcctataaaaacagagccaaattcccgcccaatagacggtactgtgtagtcgacgtgaaaagagacttcctgaaaaaaaattgtgacgggcatgttatgaactgactagtatagcataacctgtagccaacagcaactgacataaataaaaattaagcacctttcctatacagagcttcctcagaaactctctgctgtcccaagcgaacggctcatcaacaccacctctccgagcctagtacaaaggaaaaacagatgacagagacatttatctcagaacaaattgcagctaaattttgtttttttttatataaaaaagaaaaacaaaaacaggattctttcaaggataatgataattactatctgggaaacgacaattaacagtagggattgtttaccagtctgggagcaatcagagaagctaaagtaatggtcttttccggtggtggtccgggcttgttggtcatggccacaatcaccacggaatccccagaagggacagctttgacctttcctttgtaccatcctgtggccccagctacggaggacgccatcacaacacgctccttgtatggagatctacacccacaacaaaacaattaaatgcaacccattaacaatcaacaatctgataaatgtccaccaatcatcatagcatgcacaaatacattatactcggttccatattttgagagccagatccgtaaaaaaagactgccaaaacagcatgcaaaacgcgtaatagctaaagcataataatttcgatctggatctacaactcgattgcaccaataccaatttgaaaaaaattagaattctttaaacatataatcgatcgactgagatccgaaaacaaaatctaacgactaaaatagagtagtcatgcaaatttagcaaagaaaaaattcaaattgaagcggaccagaatgcgatctaccagagtaaaggacatgcatatcgtaaaagaacaaaaattcacataagaaaagagagtttgcattaccagaaacgagcgccggcaccggaaaaactacgataaccaaaattgaatacgaaacacagatgatagatctggatgagacggagatcggtaagcagcagcggtggccgtctaggatcagccgtgagcggcggatcggagacagttagagagagaaggagagagcagtagaagaagtagagagagaatggaattgaaatttgggagaagaaggaagtgagattttatatatagacgaacgaggaaaacgaggcagcaacggtacccttctttttacggaaaattaccgaacgtaccctttgttttatacttttgtttcaaacacttttaatcctaatccaactcaaacacagacacaaacacttttttttttcatctcaaattggtgaaattatatagcctaggttttgatattggatacgtatgttggactttttaattgggtggttttttaagattttatagaaggtccaccattctgtggtggccacttataaaaaaaaaaaaaaa

SEQ ID NO: 36317 - DNA, 3567 bp, Cannabis sativa
attaaaaataaaaataaagtgttaccaaacattgcttaattattaccaaatatatccttagtatatttctatgtgtttattacatttatttgtcttcttccaaatttatcacactcttatttcagagtatatcttaattttttttaattattattattttaccgtcatttgacagtaggtaactaggtatatgacaatgaagttattgttgtcttggttaaatgaagtttaatgttagttttatgaatagtatttacttattcaaagaaatgaaaataaatgtagatgctataaaattcacaaccaattgagactgatagtttcacttgattatttccactcactaacaacctacaaaacaaagcaaaagatgtccatttttttttttagaatacttgaatagtgtaggccaaaagaactccgacgtttaaatcagtaaatttgacagtaaagaacgataaactagaacaatattttgaaataactagacaagcaattgagtataatgacaatattttgtttcactcatataatggctttaatagagatatagcattcttcatcctctttcagagactaactcgtgttttcgcgatagatttaactgatcaattcaacgtcggtttaatgttgacttaccattaggttgtgggccttatcttagtgtctgacttgacaatactgatcttgtggtcatactagtgtgggactttattggacagttacaatggttgtgtatttcattttgtttaaagatttgtaactacttacatccacatgacttgggagtttaggctttgatctcaaatttctatgacatgaaatgttgttgaatcaagtaactggtctgaaattcattcaagtgcactaagatgaagaaaacacaaactccaatattcttttggaaaatcttagtacatcaacacattgctgttgttccactttttcaggtaagatgcaatgtggcaaattgactagtttctattgcatataataatctatatgtaaatatatatacaataatacaaagaaagaatattctcatgcttttgttctttaagcattgtatgagtgaacaaagcactaaagaatcttagttgtgtgaattggcattaagcaatagaaaccaaaaagactctactactgattaatttatcaaaggtttgaaacacaaagattgtttagaacaagcacatagtgttcatttcaacaagcttttgaaagttttcttcctctgtaaaaaagaaatacagagtaattaaagtaagaacatgctgtagggaaggaatttctaagcaaatattagttcattagtataaggaagctaacaatgacagggcatagaatctgtgtaggcgcaaccataatgagcgttgagcaaaacaaactaaaaagactgaacactaaatcaatttgttctaatgacaaataataccatgttcaccaaaatttaaactaaaaaacaagcatagtgatgtacaaatcatgtgtgttctggcttccattcttccacttgcagagaaagtttcttcgccattccattcgcgaaagggacatgagagtagtgaaaagaggaaggagcaacatcaagccaatttaatgactgaaacccttctaagttcaaagtctctatgacatagttatcttcctgttgagaacaaacatccttttcaaaatttaaggacaagaataatgaacctaaatgaggagactttgcaccaacaaaaactgtatccatgtatgaatggaaagccaaaggtctgcagaaattgttctccataccatacttttcatggattttcgaaagcttagttctaagagaccattcataggtatcagaaagaacccaaatgcacaaactcaattccttgtcaaatgccatgaagtttatctgatcattgcttagcccaatacaattaaggccatagctatttggagggtgtttggaagcctgaaacttaggcaaatcaattgcttgagcctgatccttgattgaagtagcttccttatcaatcacaaacttcaacaaatggccagaggtggatagtctaaacaatgccccttggtaaaacacagtctgtttaagccaccttgttttgcaagtactaacccgagttgggagacgatatctaagcttgttccaactccttgtctctgaacaataaacattcaaacacctaaatccctgaaactgaacaactctatagaaacaagactcagaagggttataagccaatgcagcatacattgtgcttttagcagtaacataaggcttattaacaacataatcaaaatcaacccattgattagtcaaagggttataaacaatatatgaatagttaaaactcctcttagactcattacaaccagaaaacaagatcaacccattacagcaattcatcaaaactttatgttgagaagtgaaaaaagtaaaaggataatgtctatcacgttcaatattgctaggcaacactgaatgtgagtctgaattttgaagggcctctatcaatatggttgtattgggacgtgaatcatagttaccaatgaggacaacaccgatgaaaggaagctttgggtttgtcttgggaaagatctttgttgtgatcaaccaaaaccatgactttgaaacaagagtaagtatggcagctttctttgttggtaatcttcgtaaaatctcaatctttaactcttcaggcaaatcatcaaacacgttgggttcactttcactattatcaatcttcctcttcttcctcctctcgaacatccacttgatctccggacgacgatgatacatttgtggggtttgatcgatgatgatgatgatgatcaatttcagtcgttaatggcttctaattctaaaaacttttgggtaaagccctagattttttcagtttagagaattgggaattgagatgatctcaatctcaactcatgaggatgaggaagggttaaaacaatgatatatatatctactttcttaatttttttttttaaaaaaaaatgaattgagtaaatttttgaagtataaaaaaatcttgaaaattacatttacattaggttataacatcatattgtatattgtagattgtatattctatatgtgaaagtatattggattatactcttattatatttatgttaatgcaatattttgtagtgtagttaattcgatattaaattatatcaataattatttatcgtatatgtaataacatatacatcttattaaagtaaaatatgtaatatgattctaaatttactcttaaaaaaaatcttaattttattatgatttagcctatttttactttctatattcgagtggattattgaaatttattattatttcgttatgcttttactttctgtttgagtaaatactcgagcttattttgaataacaaattcgttctcatttttttaatcaaattaaacaaacttcaaaataaagaattggtaaaaagaatagtctctgaattagtaggaacaacccttcaccatagatgtaacgtccccacttcaagtctccattagatccttacacccacgaatgaatgactcttatacacga

SEQ ID NO: 36318 - DNA, 8688 bp, Cannabis sativa
atattttttttaatacacatagataagataaataaatattaagacaaaaaatatataaaaatttatttttggtaaaataatataagaaagagtaataatgaaatgaacacaatatatttagaattggtgataagtgaagtaacctatgttcttatacatgattcaatatttttacatttaattcatgtggaccaggaccgaccttgaggtgagacgaaggaggtggccgtcttaagcctcccaccgctcaggttccctatttaaaaaaaataaaatataattaataataaaattaaaaaaaatactcataatactaaatatatgttgcaactaatttgattagagtaacttattgtttatttttatctaaggtttaaattagcataaaatcagtacgtaggacaatgttgttcaatatctccctttaagatactaactatttttcactcactaatcttatttgcggttagagtgccatttgctcgttttcgattcactaattatttagatatgcgtggatcgaaaacccgttagaaatataacttcgatatcacacctagtatatatggaatatttatttatttatttattttttgataattatatttatttatttatttaattggtgaattgatgaaaaaagaaagaagtggtggtcgatggtcgtggaggaaggcgatgcttccaaacgaatctgatccaacatagcctccactccagtccagtccagtccattccaccgcaacattctcttcattccaactccaatggctactcctgcaactctctcactctccttctccttagatccccaacaccaccttccccaccattactgctgcgcaacccatttcaagccccatcaaacgcttctcttcaactccaccactcctctccccaaatacccacttcttttccaccccaaatccgaccgttacatcgtcaaatcttcatcttcatcttctccgccttcaccttcttcaactacagctccagaaccagacccagaaccagcctcgccttacttcttagacacacttggtacaggtcggttcttgaccaatgaagagcttgataagctcaaattccttgatgggttctcgtattctcaggaattggaatctggggttttatgtgttcgggttatgagagcagaggaaatggatatgaccatttctttgctcgctgagtcctttgctgagtccatggctatggcttcggcttatgatactctgcttaagttcttcataaagcaatacttgatggaaagaaggtctctaatgcctcatgctgtaacccttgttgggtttttcagaaagaaaaaacagcaagaagatgatgatgaagaagaagaagaggaattggcgggaacagtagaagttagttttgacaagaggggtgctaatacgtctcctccaacgcctactcctcccaagaattcgccttatatatgtaacatgactgtgaagcatcagctccggaggtaaaagcatatgataattattctatcaatatatttttctaattcaatgtctaatgatattgatattgtgtcttgtatatattatgtgcggactagttctctgtataaactgaagggtaattaggattttttatctaataattgagattgttggattaaaggatttttgctaaattttgttcaatttgactagaggtgtaactaggcaattgttcatatatcaaatcgtggctctctaacttctatccttgtcggttgtcttttactaaaattaaacagaattggaaggaagtccttgaatccaacaatctcaatagttcattaaaaattttaatggcctaaaaagttcagggcacaatttggtacatgacatgtcaaaattcggggaaaaaaaattctaattagccttaagataatgatgggtctttcaactttgtttacttgaattggatagtccagttgtgtatgtggatttacattttaagctctatttgggtataaagagaaatagttcatcaaatgaaacaggaaagtggcaagtgttggttagataagcatgatgagtatttttaatgttagctcaagtgtttagagttgggaaagtatttaacacttagttaatcacaatactaacttctttagctatggatcctctaataacatttggtgacagtatgtgtattattaagagttggattttttgatttatttttggaactctcaggagaggaattgggtggcatcttctaaaggcttcagaagaactaatttctcagatgagttcgactagggatgtgtacttacactgcagaatgattgatgaagctccctttaacatgtacataaaagcaggttaccatgttgtaaagacagataccattttgattttattgatgttacaacgtcgcaagcacttgatgtgcaaaaagcttccagttgtaacaatctccgaagaatcatccgatgaggaatgttaatgaattaagcatgtttgcctgaggtattctaagctactcacgcaaattgttaagaggcctttgattaatattcatactttattccacttctaagtaactcttaccccattacttctttactgttgatttccaagatcttcatgtcagtttcatctatgaaagattgtctctagtgtaaccccaacctacattttttgttgcttgtatccaggtgaaggatgtaattgaatgagatttttgacaaatatggggttggctattcgagtggcaggtcgaattggcatccagtaattgttgcttgtatctattataaaggtgggaacctgctctgttgcaggtattatcctcatgcaaactagtcctcatatacaatattttacttccaatacaattacaaattcacaatgcattcatgatttactttagtttttcttctttttacatacaaaataatcgatttttaccatttaaacatatgatattcacggcactagaaatacaaatcattccccctcacattgcagaattttcaaacttaattcagaaacacctataactacaatcccattcccatagcctattgtatctagttacaattactcaattgcattatctatgaacctcaccaaattctgtgtcataatcttaaaatacttgggatgagcctccaacaagtaatcggtatcaatgaaatgatcgagcatattattattatgatataaacagtttaactcggtattattacagttaagctcaatagagctttctaaaagtatacgtaaccccacccaagccttttgaatttgtatagattatcagctggagttcttttacacattcttccatggagggcctttcactgctttcaactcgaacacatctcgatgccagattcgcaaacattgctatagactccatggtgtatgaacttcgactcagctctggatctattaccttcctcagtttctttctatcattcaatatatgccttacctggaatatgcatcaataactttcattgctcaaattctagtttcttgataaccaaatttcaaagagtgaaaaagtaaatagactttttcttttctaacctgtagaacaaggttttggtcgttcggtcccaggttcagatccacagcccgacgtccagtcaataactccagaagaaccacaccaaatgcataaacatcactttgtaaagtgagcttccctgtctgtcatcaaagcaattaactttttcactgttttggttttcatttgcattagtaaaggtaaataagtaagtctttgcatttacatgatttaaattctgggcataaagtatggtatttgcttttaacattgtgcattagtacatagtgatgagaacatttgatttttgagtctgagcctggggccacatgatcaggattgcttgatttggggttttagggaaagattatcttatattttcaaacattcattcattccacaaaggacatgtttcacttacaattgaaactaaatagttgcttataaatgcataccgatgtatattcgggatcgaaatagccaaatgtaccaagcaccctagctgtgacatagatttcttggccctctggcataaacttggcaagaccaaaatcagaaatctgcaatgaaaaaaagaatgtgaactttatctcttttcaagttttgattagaccacacaaatcaccaactgatattgttattacctttgcttcaaaattggtatccaaaagaatgttggtggatttgaaatctctatgtacaattggcattccaatagctgtacttgaatggagataagctagtccctttgctgctccaattgccactcttagccttttaggccaatccattttagcttcccctattcctagacaagtagaaaaaccttattcacttaacattatcatatattcaatagtattttttgacttgaaaaacttaccattcaagtgatcttgcagattcccatttttcatatattcatatacaagaaaccggtccttcccatctgcacagtagcccaccaaagtaaccagatttgggtgatcaagtctgctcagtatatcgacttctacacgaaattccagttctccctcggcttctttaaatggcgctagctccattttcttgattgctacaaccttttttgtgtccaaaacagtaagaaatcaatatatgtatcaccaaatacaaacattcttatacttattttgtttggtatatgaaaaattattatgtatctttgggaagatttttcatttatgttttttttcaccatacctctcctgatggcaaagtgcctcggtatactcggccgaaacccccttttccaagaaaattttcctccctgaatgaacctgttgccacttccatctctctcaatgtgaaaactgatgatccatggtgtcgtttggtggctcgtggcgtttgttcttcaatctgccaatgctccgcgggtttataaacccctgaaaaacgagtcataaacattaaaactcgaaactacgaagcctaccttagaagaagaaaagaagaagaagggaatatacaagggtctgaatgatcatgggatttgcttctccggcgcttgttccaggccgaaaccaaaccgaaaggcataatgggtttccctccaatgagatgagaatactaatcctatgttgtttttaataaatgaaataacagatcttatgatcatatgaaatagactcttggatagagaaagttagctgcatgacacccttcagagaaaaccattttaactttattacacgttcgagttaaaaggtcttgctcaagccaaaaactaaagaaaaaagagaaaagaatgataaactagtattttatttttaggtgtatgagaatttgatctgataagaaaatacactattctcaaaagggtacgtatagaataagtgaaggtttgattagaagaatttactcaactactacctcttcaacaactatagaattttaaagatatgggatgagatatggggttgaagagcttgaaatgtacttgaagaaaaagaaaaagcaatagaaaggaaagttggtatgtctttgacaaggaagtagaagctgtaacctcaccccccaaattctagtttcttttacagatttcttagcaatgaaaggtagccgttgagagggagttttcatctgaatattattatttcatttatttagtagtgttcttttttttatactaaatacccttctctctgtaagataaagtaattattatagtcattgtttgaaaatgacaagatggtcaataatttcatcaccatccatatggacctacagctttttgtttttgtattttgtttttttgtgtaaaggataccaatttattattttcaagcaatcttttgggaaaaagaatcaatttagatgccctaagctagcttttttctaagttaataggagtgtttagagccagtactagctttataaaaattgaatttgtagggagtgttttttggctacataaattgttaagggttgtttaaacaaggggttaggtccatattggattcaagtaaggctcattatgctgctggtttacctaattaagcctcatgccaaatgttggtatttgattttatattccttaatctcaatgatgagatagaagaccacacattgaaatgggacatagaaattcttgagggcaatttggtcattttctagtctacttattaaaaacatattgtgtattttgtcaagttactcattcttaaagtttcctcttttccattttgccttgaactaagagaaaaacaaagaaaataaaagaggatgcaaacacaatttattattttctttttggctgagttatatgcttaagcagtccaattttatatgtccaaatgttttctaaaacaatttggagtggattgtatcaataggtttaaggggatattagaatgatattggtagagatttttaagtctaaaagggcaaagcaaaagaattgttgatcaaaatgccatggaggattaggtttaagaagctttgttcaatataatccagcattgatacaaaatagaagcgacacattctagtgaatcccttgtttcattatgcaagtactaaggccaaatccaatggacattcaaaaatattaaatttattgagatttgacactgaattcattttaaccttactctaaaattatcttatataaaatattgtctatagtgttccaccttataatattaaggaaaaactttattgtaacacacacatgtatatcttagttacattagtgctgtaacatttttaatttatatattttttttatgttcacattgttttattaccgtctgttgactgagattttcagcaacttcttaatcttgttttaagaaaattaattatgagtagagaatgatatttttatgtggttcaagtgttaattaactttagtccacgagccacttttgttgatgagtaatattgttattacttgagagtatattcttcttacaatttcagagtttcattaattctctagattcttcgatgccatttcctcttacatttctcttttatttataggtagagaaattagatatttttgggtgattggtacatcttctttttatctctaggctctacatgactttttttgtatgtgtaggaaatgatgtttgttatgtatgcataagataaaccctaaagtaggagtttgttgagacaagacctatcttctgtgcaactgatggggttagccccatatcaactcatcctgcaggcctattgtttaatggtcagactctattttttatgtagctcggaagtgggaggctcccactcttgctgatattttattttttaagaacttgtatcactcccatagaagagagataaatttaaggatagtttttattccttgcaacctcacccaaaacataagggtaaagtttcatataaccatcaaaagaacgtcaaagattgcgggcatcaattggttttcatctgggtttcaagcctttgagagcccaaagctcatgactaaatgaacgattcctctactgcggatagctcccactcaacacttcaaggatcatgaagcggtgttgcacaccctcaataggatcgagttgaatgtcgaagacatggtgactactgccaattgtcggagggtaggtctcctaaaggctcctcagacgtcaaagacgcaaatgtttcgaaggtcatctgtcctaacacccaggataaggcagcggaggaggaaattcgtaggtcaaccatccaataagctaagcaaagtataacaccttccaaagacaggaagaggaagaggaccaggtggcaagggctcaaagcagcgccactgactgaaaggcagctaaaaagacagacaaaccccttgaagccctttggtttttaataatattaaatcagttgacatattgaattttgaatttattttaagttattgcttacttttttatttgtcattaagttacttttaattctgaaaatttaattcggtgaaaaaacctatagttattttcttgtaagttattttaaaatcgatcaaaaatattctaccaaagaaatttgtgagaatacaatttgataactaaaatattacctatttaatactagtaagaaaaattatatgtttcctacgtatcaaaatgatcattaaaaatagatcataatagtgcaatttttaagcacaaataattattgttgtgactggaaaagtataatagaaaattaaaattaatcaacattgcttcataaaagtaaacttatgtagcatacaatttagtaattttaaatattaaataataaaatatatttttaataactaataaaattggttggtatattttattttgtttaaacttaaacttaaattttgatttttttgttgttaattaaaccaaaagaaagtaagtatgtttgttttggtgtaatcaagattaaaatggaatggagattacaattacaatgtttggttggagcttttaacttttataatcattttacattgtaatgagtattacactacttgatgaataattacatgagtatgactcatgaatgatgagtatgactcgaattataattaccaatatactacaaaaaggcttttttatatttctttcttatctctttaccaaatgtaatcgataagaaataaaagggattttttcatttttacactttaaaatattttttttttgcattttt

SEQ ID NO: 36319 - DNA, 1413 bp, Cannabis sativa
aagaaatagaagagaattagcaatgtaaatcattcatgtgttatcattacctgagaaaactccgcatgaggatcatattcatcaccattgtaatcatttggctcatttttcgggtacactggagattttttcatagttttgcctgaagtacaaatattagcataaaaacacaatgctttaataggcttagaaaaagaatcagaagaaaatattatgtgggatatgttttgatcaagttacttaactgatcagtcaaatccctctcattctgctattgtgattgtgtttttaatgccattaatgtgtatttaagcatcagaaaaggaatgaccaactatctcaatggaaaaccaagtcagagacagaacattttggcaatgttaagctttcttcatataatcaatgatcattagaataaggaaacacagatgacaccaccaaaccatgtaataatcatattttaatttcaccagatctgttgcacaacattaaggaaagaaaatatttagacagatgaccccaacttctattataagaggaggaaatggaaaagacaagttcaccccctaaatcatgatatttaatattgatgatcactgcaggaaggctgaacacttaaaagaccaaaagaataatgtaaggctaaattaattgaattaattaattttagaaagaaattacccacgtcattaatcaaccccacaaaacaggcgaaccccacactttgccttgacttttggtatcaactttcaaaaagcacaggtcaagctgcaagccagtggtgaccataaggaaagaaaataagatctctttctcttaagccaggatttttatattgatcatttcagagttcaaacaaattaactttttagctaatgggattagaaagttacgagaaaaagttggaaaaagttaattaaatcccaaggaaacaaagacatagcaagcgtaggtactaattaagtattttatatatttattattaaaaaaattatgaatgtgaccggtgactcagccgcatttagcggagaccaattgtttttagtcaacctcaaactcttgttacttgtgtcgtaatattcagctgagttctcggtttaaaatgcctaaaatccaggaaatgtatcctataggtttatgaatcattgtgggtattttgagtgtgtgcctagagcattataataggtttactatttatcattatacacatgacaccactaaatttaggaaggaaaaccaccaaccacactcggcatcaaagtcgaacttgttgagttattatagagagtttaatagtatccaaagaaagttcaacatacataaaaagatctcatgacatagatttttccttacgtaatattgattggcttcaaagagagccaaaaaaacgggccaaagacaccaaggtatctt

SEQ ID NO: 36320 - DNA, 8482 bp, Cannabis sativa
ttaaaatttagaattaattaaagcatttttaagaactaattccataaattggctttagacttcaagcatttatataatagaagaaaacaaccaacactagtgaaactcatgctacattcataagaactggtaaaatttagtccaacctatttgagaacaaacatttgaaaaaaatattatataaaagcacccattataattaagaaagaaaaaaaataaaataaaagcatcatcatccctctacaaaaccccaaccaaccaattaaaaaagaaagaaaaaaaatgatcatcctaatacagaagaaataaatatgaggggttaatgagatgagaatggatcaatggaaaatcaagtgaagaagagaatattccatgtttgctgcaaaagtgtcttccccccctaaaaccatatgctgtgcctttttcttgcagagacactaaaatcaagagaacgaatcgtagtaagcttcaccctctgctcgcttccatcacatatgcttgttcgctgccccgaccataactgctaccactgccaccaccactactaccaccccacagcttaatgataaacttactattaaagaaagcagcttttaaaacaatgtaaaatagcgagcaggcgctagccactggaaattcagcaactaatttactgtttcatcataggaaataatcgggtgttctcctcgttacgtcaggctctcctctccttggagccggctcaaactgtgaaacaaggaacagacagacattcaaaatattgaatctaaacaagtgcatatggcatgtgtgtgtgtgtgtgtgtgtgtgtgtgtaaatgcccccatgaagcttagttggtggaattggtggaacctgaatgaatgtgtggtttttgcagtcatcaacttccagaatggatgccatgtttccacaacgatagcaataattaggtgcactgaatatagtgaccactttttgttcctgtaacaaagatatgaaatcaaacatggttgcaaagaacgattaagttgaaacctcagcaacaaatataggggatagatacatacatgaccccagttatacccttccataaccagctgatgagctctagcaatgagcttcaagttattggtgtggttgaactgttcagatatgtcctgccaaaccaaattgatcaagggattagtttggatgttgcttcatccttacagaatcaaacttggaaactcccagccctgacgaaatggcaaaagcaaaacataatgtaaaatacctgtccaaatgtgtatccagcccctcttggagagataccccatccacatcgatcatctgggtcagaccatagaagatcacacataggaccctcatggggaacctcttgaacacggtcaaaattgcgaatgttatcgagcgtttcgatggatggtgacagtccaccatgcaagcagaatatttcggattcaacctgaaaaatgaatgaaaagtttaaaaaaggaccttcgtatttgcagaactccaaaacttaagataaataagatagccgaagaacaagtaattgaacattttcttttacttctaactaacaggaatggaccaattgctttgatattgaaaaaaatttcaagaaaacaataataatatctgattaaactcaccaaagctgtaagtggaaaatagtcaaataaatctgtaaagatcttccaaacattggcattgccatacctacacatagaaacacaatatgattttcaaaccaaacacataacatcatatcatatatactgaatatagagtgcaaatgagaaatggatgattcgagtgaaacaacagaaccccataatgtcatcaaatcactatgaaaataatcaaataaaatttacagaatttgtttgccaaaacaattgataaaattgtgcatacaaaaacaagaaaatgacattttttattggggtgctacaacagcagcatgaagctatgttctaagacaaaagtaacaagttactttagtatctcattatgctaaacagacttttaaaaaggtagtgagaaactcacttccgcaggcattcgtcataaaatccataaacttgagtaatctgcaatgagaaagaaaacaaatacacgagtcattcaacacccaattataataataaaatcagtgcaaatttatatttataacagtaatgaagtaatggcccttgaatttcaaaaccttgaaaacccctaggaagataaaacatcaggtaaaggacaataatatcgcaaaacgttgtctcaaatactcattcctagcggaaataattatgatcaaaccacttttgtataaataaaataaaaagaacccacaatttcaaatagaattaagcagaaccataatacttaaattattgttatacctgacgactttcatgatttcctcttaaaatagtaattcgttgagaataccgcactttcaaggccactaggagctgcaaaaataaaaattgaataattgtattataatttactacaaaaagtatcatgtcaagtaaaaagtcattgtaatgcagttgattacggaaacatcagtttctcataggcactccctcccccaaccttctcaaagcatcattttgaatcacactataacaagtttaccattcaactaccttattgttgtaactacattaagtattaaaagggacattgcaatcaaaggaaacttgcatgacctgtacaaaaatcctgaattgcatgcagagacaaacacaatgaattcaaggagccttttgaccttcctaacctactacttccagttctagaagtagaaattataacacatgcacaatcaacatatgctaaaaatggtaacagattctatatagaaaactcgttagttaaaaagagcaagcatacttactgttacagtctcgactgaatagtagccacgatcaacataatctcccataaacaaataatttgtatctggacactacaaaaaaatttaaaattgaagattagtataatacttagcgcgatcaaattaccaacacatcaatatagaaacaaaaattagaaggagctgtgtgagaaggcaaaggaaattaatggacaattcttgtttctatattcaagagatgtactaattgtgaaatacatcattgataaaacagcagtgagatattaaacaagatatgcctctaaatataatgatactacctcaataaaaaaatatacagctttcctagacgagtatttcaatggcaaaaacaaatgtagccaagggcctccaaacataataaatacctttcctccaattcggaaaagctctgccagatcatggaattgtccatgaatatcaccacaaatagtaacagggctcttcacaggctgcatgaaaccaaaaacgtcaatactgacacatcaaatcgttacaaacaaaaaccagatatgcagtacagaggggaaaaaaacaatgcaagctaatttcagatccaccagtaattgagtaccaagatcatgcaaccaagaatagataataatcccctacagaatatacatattctcaagcaaagcaacagataagcaatagaagatataacagtatattacaatgaattaagtagaagtttagacaaggataaatacgtagaggcacctcccaaatggtctcgaattgtccttactaacaagcacagatgtctatagcaagccgttcaccattggatacctcaaacttaaaaaataattgttcttgaggtatgtgaaaaacattaagcaagctagagttcgaataagtaaattaataattatattaaaaaaaattgattaatcaagttatttattataaatgatgatcataaaatatggtaagatgagcacctgaacattgctttcatccattaatatctccttggccttctcgcacagcacccttacctataatgaaaaatagagagaaattaacagtaatgtcaaacaatgaagacagaaagcttaaacaaggaaactccaaggccaggatgacaaaggattatctaaaaaaataaagcaacagtttcatcaaatttgttcccaccatattgcatccacaaattaaaaataaaataaaataaaagaaccatctgggaccacaaactggaactggtgttcattagtaaagattgtcactccaatagaaaaaggacagacacttgtttatttgaaacttctaaagttttcagaaagggaaattaattatacataaattgttctttctttttatttttgttaggagtcaacggaagaaacccagattgattaaaataagctaatcttaataaaaataaacgtcactgtattaaaaatgtcttaacttaaacaaaatgaacaatgcgtttatgaatgcattaaattaaaagagaaactctaacaattgatacaaaagatcaaaatttaattaatgtccgctaaggaaacaacagctccataaataatcttgtcatcaccactatcaccaaaacaaatagatttcagatgtttgtccatggcaagcaacaacgatattatctcctgcatgagcacatgggacctgtctccagcaacaaattcattaaccgaaccatcaacttcaattagactacaacctggcacttttgttaccctcttcctttccattgtctctcttactgttttcacacaatcccactggtcagcagaggcatacatatttgaaagaagaacatgaaccccactatggtccagtccttgtttggccaagtgcccaaccatttcttgacccaactcaacattaccatgaactctgcatgcattgagcagtgcacccaacacatacgagtctggctccataggcatcgttcttacaaccttctttgcctcatctatcattccaactctcccaaggagatccaccaaacaaccatagtgttgaaccctaggctcaactctataaacagtacgcatgctctcaaatattttcaacccttcatctaccaaccccattctactgcaagcactcaaaacacctataaatgtaacttcatttggtaggactccttcatcgtgcatcctcgtaaacaaatcaatagcaagtgtgctcagaccatgattagccaggcccgaaatcaaagaagtaaaggcataaacatccctctctagcatctcatcaaatacaacacaagcagtttcaatacaaccacacttagaatacatgtcaataagagcagtccccatcattctgtctagttttattttgtttttgttcaaatatgtatgtatccactttccctggtctaatgcaccaagaaaagcacaggcagttagagcacccactatactattatgattaggagcaaaaccggaagcctgcatgtcactgaaaacctctaaagcctctttgaaaaagccaacttggcaataaccattaatcatcgcgctccaagacacagtgttcttttcaggcatttggtcaaacaagtctcgtgcaatcagaacttgaccggacttgccatatccattaattaaggatgtccatgtaataacatcccgattcccactcatatcaaacagcttacgagctggatctatacaaaaacaactagcaaaaaaatgtattaacccattctgcacaaagtcatatgactcccaacccaaaacaatggtttgtccgtggatcactaaaccgagagataggtcagaaagctcagtacaagatctaagaagaaaagagaaggtatagttgtttggtaaaagaccattctctcgcatactcttgtaaagagacatggtttttaaggcctcatttctctcggcaaaggctctaatcattgtgttccagatgtaggtagtacggtaaggtagacaacagaaaagccgatacgcatgacaaacatcaccagcatcaaatgttgcacaaaaggatataatcttggcagcagaataagaatcaaaaagggtgcctgaaatagtgaggtgtgattgaatttgcttgatttgcctgatttgccttaaggcgatacactgatccaagagggaaagaactctcctactggatttcatatgatactataagtaatccagctcaactagctgccaactagaattaacaaacaggcttagaaatccaatatcccaaacatttgaaatccaagcctctgttagtcaaaacaacagatgagttttcagtttcaatggctcgtatgctgaaatctgaacagctcgtcaactaaactaaaaaagtctataatgctcccatcgcaaacccaaatccaacaacaaaagaaactataactcacatttcgtaatatttttcatatcaagatacaaacttttataatgcacggctgcccattacaaccaaagagagaaagaaagataggaagagaaacaaagcttcaacggatctgataaaaatcaccaaagacaacaacaagaatctcaaaaatgtaaattcgcacaactagatcagacagcctccgaaagactcaaattcagctcaaaacaacagatcaaaaacgaacacaagcaacgaaatttctcgatctgaataacattaaccccaaaacaaaaacaaaaacctaatccaatcgcaaaattaacgaaaaaaaaaaaacaaaaaaaaaacgcaacatttctaaaaaaaaaataaaaaatccaaagtacctcttgttcggacaaaggcttgcactgcatcaactgagcaatctgctcatcgaggttaccatgggagttcgaagggaccgaatccataacaagtcgttctccttcgtcgtcaaactcgctccaattacagatcaaagagtgaagatccttctacgtattcctctcctcagaaacctagagctaactccacaaaccctagaattcgtcttcttcgaaaacctctctggtagaaagagagagaaagagaaagagagagaagaagaagagagagaaagagagagaaagagcggtggtgaagaacccgatgtttttatatttttatttttattattttccaaaattattttgaggaaaaatagcctttttcattttttttttctctttttagaaattttgcatgtggacaacaaaacataaaaaaatatatatattattaaataaaatatatgatatttgattggttagatgtgtgatctgaattcctttttggggttggagaaacaatttgtaaattatatttttaacaatttgtcatccattctaagtgcactaagtattaatttatgtacaacttaatggtcgagcgacaaacatgaattgaagatatcttgaaaaaattagacaataaattaaaaatgttatctattaaagaacccagctcattacaaaaaataaaatttctcgaaaagctaaagtcaatactaagcatttaaattcgagcgaactaaaaagtaactcaagagtaagaggttagtccaacgcaaccattaaacttacaataacagcaaaagtcccatcaactctccatgaagttgtaacttcaattccttgagttctacgagagccattatacaaagttccttagaaactggctccaatccaagtgttaaatcaattacaaaatatatttctcgttgtgatgataactttgcatgttcttctaggaatacatctaaaaactcttgtactactttgatatcttcaggtagaattgactcgtgccaagtggtatctaacaccactgctagaaaccatgtgcatccctcctggaacaggtctctagccttcaacactgatatgtacatttactgaggaagacctctaactcatggcttctgtagcttattcaatctcttacctacaccacaaagcacccataagtcacaaagactcggtaagaaaagcaaaaacataaacaacttacatccttacacaaatataaatagacatactcattatatcataactcgattctcatatacttaattcacaagcaagaaatcacgttatccagcataaacaattaataataacaaatatttgtctaaaagacaaactaatacctaatagagtaataatcactcaccgttgcctaatgagaaaacttttatatcgttgcctaatgagataactcaatgtcactatcgttgcctaatgagacaagcgataaataagaaacctaacaatatctttagattagagtaataactatttcttatattgttgctgtacttttcttatcgcaagtccaaattcaagcgtgccaatcaacttgaatggagaacactcaatgatctgagccccttatgtcacaacaatagtaaactagtaaacaactcatcttaatccattataggacttaaactctaaacttgaagtttccttatcaataaatagcgtggaaataccctatatatcgataaaatacaaaaatcaatgcacgtaaatctgggcctaactggtccaccgaaaccccaaccagttcacaccagataggcaaagatttgagtttttaaagagaaatttgaattaatatgcttacatcatcttaaaattgttctcctaaacttatacttaacaa

SEQ ID NO: 36321 - DNA, 4076 bp, Cannabis sativa
aaaatcaataaaattagatatcaatacactttattataggatgatcatgatcatctatgtatgaccttatgccttaagccaatcgataaagttgttaaagacaatatgagattggccaccttgcatggcattgttcatggccaactctttgagactcaaagcattgttcttcaacttatcatctcccaaaacttgctccaccttcttctttatctctccttgtttaataatcccactttcctcgtctctctcaaatctctctcctacgttccaaacatcacatatatagctttcgtttacgaactggtctgcgaagtacggccaacacaggaaaggtacgccattgctgacaccttccaatgtcgagttccaaccacagtggcttaagaagcaagcaatggaagggtgacccagaaccttttgctgaggtgcccagttcactacttttccacgggactctgttctgtccagaaaaccatctgggtaagcgtggttcaacccgtttcctatgtcttctctcacgacccagaggaatggtttgttggagatttcaagcccaagggccaattcatggaactgggtcttgtcaaaaactgtgaagcttccaaatgcaatgtatattactgaactctgtggttgttgatctagccattctaaacaactgaggtcttctgcccagaaactgcctgatgaaatgcctagccgagtagtcgctaacattgggccaattggttgaatctctggagccaaggcgaatgctgctcgctcaaggtctattgccgagttgcaaagaatccagtctgctagtttcacagtctggttgtttcgagacatggtttcgaatacgattctctgtgtggttgcatcaccaatggatgcccaaaccaagttctctggctttgtaaagggcatcattggtgcctgctgaatcatttggttttttagtagaactcctgcaaaaagattaaacgtagttgaatttcttgttaggtaataatgtccttttgtatttaaaaatcatgtatgagtggtttttgtagtgttgcaaacctcacctttggtgttaataattccatcatcaatcagctttgggatactaaacgatagggtcaatacagccgccgcagaagtccataaaacagctcgcttgatattcattttctcggccacttcaagagcccacccgagcgtctcatctgcaaggacacaagtgatattgtcatcttctgaatcattgatgttttttatgagttcttcaagctttgtccgcatgactcttttaattgtttccaacagtttcccaatatcatttctgtcttcccagggatccattccatctggaatggaaaccatatgaatttgatcttcaatatgagctgggcttgacattgcattgatgatcctcttgtgattatagtctgtgttgacgaatgtgactttgcagccctggctgactaagcattggcacaattccatcatgggaatcacatggccttgtgctggaaaaggtatggctaagatatgtgggagtggaatcaccattctctgttcttacttatatgtatagttataagcttttgcatatgaattctgagcatatatttgagatgtttatatagggggagctgggcctgcgctctggggttaaggtgccattgctagagatttcacttgaatataaagtgtgggggaatcgctcattttgtctcttcttttttcctattttggttaaatctgtcttttctctgttgtcttacctgcatttttcttgtttgatattttcttctttgcatttgtatagtttctcacgtcctttttcattttttttttttgcttaccctcagtggctccattctttgctcctgtgtttgtattgtaaaaccacatatataaggtttagcattttcttggtgcttatgaagaaagacgaaaataaaaggagaagaaaatgacttccatataataaatcatatttttgagtgcctactcgttgagatcaagtgcccctctgtgctgtctagatcatgaaatgaattcaagcttataataaagtacttggtttatatatatggcaggaatgaaaagaacaccaatgaagagtcattggtacgttgtttgcacttgttttacaaggttcaaagctaaatgtcttcttacctttattcagctatattatgaccatcttaataatattgcagagtaaagagtaactaaatattttgggaatctttttcaaagaaaatccacctagttattatcatcataagatgcttggtttgttagtttaagaatttgcagtttgttgacatcatcatcatcattatctaactttattcatttatttattttatgatttgacccattcaacaaaatccctgaaattcttgttagagcttccatcttcttcaacaatattagcagccatttccttgaaacacaagactctttctttcatttcttcatcttttatcactctcttgaccttaattcttatctcatctcgggtgatgaccccacttttatgtcgatcaaaccccaacctagttttccaaacatcacaaatataactctgattaatgaactggtcagcaaagtaaggccccagcatagaaaatggacaccatatctaatacattcaacagttgagttccaccaacaatggcttacaaaacaagcaacagaactatgattaaggaccttctgttaaggtgcccagtcaactatcagcccttgactggctactccttcaagaaagccttctgggaagaagtcacccttattaacttcctctgtgttattgtcccttaaaatccagagaaaaggtctattactgttagagagttctagccccaaggccagttctcaaagctgtattgggttgaaaatggtgaagcttccattgtggtctctgtttgtcgagccatttgaggcactttgagccatgtgggtctgagctgagtaagactattgttacttgacagaagtggaccaatgggtcggatttgtggagccatattgaacgcagcaggctgaaggtcgtaggtggagttgcagagtaacaagtcagtattgttgactgagttgtttttaagcatgagctcataacttaagtatttgcttcttcaccagagttcctgcaatttccatatcaacattcactcgaacatagtaaaaattttcttaatttatagaacaacaaaaatttatattagtagattttaacaaaaagatagttgctaaagcatctggcctattagctcagctggttagagcgtcgtgctaataacgcgaaggtcgcaggttcgagacctgcatgggccacttttaatgcaattttttaaaaatctaactatataagtaaaacatgatcgaaacttaacaaattggcctattagctcagctggttagagcgtcgtgctaataacgcgaaggtcgcaggttcgagacctgcatgggccaatttaaatttttttatttttgtaattataaaacgacagtaatttatcatgaaacgacaacataccgtcttgaagatgcgttgatttataaagtttggaatataaaaggacaaacccattcttgttgatcatcatcattttttgaaccaactcctccactttcccatgcattacttctctggtctttttcgatgatcaaagccacactaatcccttctctttctatgctattgtaattatgaccctacatttatgtgccctttaagacagttgaagtagtggaattatgtgaccctccgctggatatggtaccaccaatacatgtgctttcctcatctttttcttttctttgttttttgaagttcaaattttctaggtactaggtagtaatataacaatatcaatagatttcatgaattattgtccttgaaatgtggttatgaaaatgatctccggcttctaatttggttttattcaatattccatccagtggatattatttttaatttattgtcaagtaaatgcatttttggctctagttactctactacacattttagtaggtattttttcgtatatatatatatatactaaattgaagttacgtgccaagtcacg

SEQ ID NO: 36322 - DNA, 6401 bp, Cannabis sativa
tgttttactagtgttttataaaacacagtatttttgtaaagatttttgcgtgacagtatttttgtaaaaattaacctaaattccagtatttttgtaagtttccctttaggtatattgtcaaccaagggcccatgacacatattgagagttgcaaaaagagaaacttacaaaaatacttgaatttaagttaacttttagaacaatattttcacacgatttttttgtaaaaaatactgtgtttttataaaataacagttggaacacaaaatagaataaccaaaaacaacagtggaacaactaaaagacaatcgtaaataacagtgaaaacttaacaaagtacacaatatttttgaaaaaaattctgccccacaatataaaagtaaaaaaattagaaattttatttcacaaatacacaaaagtaacacaaaattataaaaatacagttatacatatttttaaatacttttacaattttattcatagttaatatgatctttttttatatatttctatattgtactcttattaatcttttattattatttttataaaatatcgtaaaaatataaaaaaaaaattattaaaaataaaaatgtaaaatttttacaaaaaaaaacctataatgtatgtattattccttctaaatatccataagaaacaaaaactagttggagtgggaccctgaagtaaataaatatagatagtagatagaatcatcatataataaaatatttcactaaaaagaaaggccaatgagaagacatcttatcatattagaaattagactagcattgatttaaaggtgcttaatccaaagtgttcatgtcaataaaggttgtaaagttccgaatcaagccgctaatttagtaaatatatgaataaatttcaattgttttcagatattcattcatgggtatggggccaataagtaccatattccattatcaaaaaacaaaaaaccatcattctttgctttccattgagagcctataaatcatgtcaattattaactccaacaaacttaagactttccttttcttaattactaccataaccatcatcatcattataattattaagcttagtgcttgagttaagatggttagattattagagaagattaattggaaattgcaactcataaaaggacaaaataaaaaattacttataggttaaaaccaaaagtagattattttcctaataatgatcatcaagtagaacaaattattagaatcaaagtacacgaaatggtaagattagtgaagaaaagacaaaaacataaataacttactttaacaccaaaagaaattataatccaagtaaatgagtaagttacattgctactaagaaaaaaagacaaaaatagcaacttaatttaaattaataccaaaaggaattagtacattatttcactaataagcatcaagtagaaacaattagaatccaaatatatcccctttcctctaataattttaatggttacaataaaactaatcaaatattaaaagctaatatgcccaaaataattaactctccaacctccaaaaggcaaccccaaacccaattaatatatatataattttttttatatatatatataaatataccccctcacaagaacaatcatatacaccgtgtgtggtgataatatgtgcatgatcatttcgcacgttttccttctcatctctctaattttttttttcaccttttgtctggtcttgtcctgtcttgactttaatccaactcattaaaggcattgataagggtttttgaaaataattttagatccaaacccttattgacatcatctttcctagtgatcaaattttcaacttcatcaaagtaggtgtgatgagaatcgagtagtatagtggtagtagtaggtccatctagtcataatatcgcttcttggatcccaatattaccacttagatataattgtgtgggaatttcacatttgtggggacctgatactactgttgtttctgtctgtcccaaagtcaacgacccggtcaacgctaacaggggttctaacaaaaatgtttgattttgatcgttttgcctttccttgtttttaccaatatcttctagtatagctttaccagtatcaatacctatatatatacacatacaaacaacatcttctttacatatatataagactaatttaaaactaatccattttgagttaagttgaaaaagaacaattttttcttaccggcaaggtatccgccgtgtacatagccgctaaatctctcacttgtgtgttcgccgctgaaaaatatgcgtcccactggagcctaaccaaagaaaaaaaccatttctttcaaaatttcgaattcaggggacatttattgtaagcaaatgtggggtgaaaagtgataccttaatgtcacggaaatcttggtcattagtgatgagagggtagttactatagctgccacgctgaaaacggttgctccaccagcgaggaacaagaatattagtagcatcaggaatattggggccaaacatatctctaagaacttccatggcttcttgcaatgtttcttcatcagattgagattccacacgctttgattcctcatttgtcaacgttacaacaagaatatttgagccaggataagcattctccatgtgctaatgacacatcacattaacgtacaagattaggagccagcatggcttaaaagacggcgagtagttggaaggaaaccagattaaaaagatggtatgcttatcaatcattcaatctgatatataaataaatatagaaagatacagatattaaatttggtataaaaatagattatagatatagaatccatattgataaactaaataacattggaaatgaatgagacaaaggagatcccacactgtctccgcaacaggccacgtgtgctcattataatatatcaattctttataaatacaaacaaattgaccaattttaaaagatttgacgtccttttcaaattaattaaaaaaaggattcgaggaaagaaagttaaataagttttttttttttagttatttttgtttttaaaaacaagttgaggaacagcttagacagagattggttcatagtacaacaaaaatggccagctctacgagagcgacaaaaacatcaattacgctatcaaagataagaaccataatagagactaaaaatgtaaaaaagtattttacatgagaaaggaaaaataaaaaaaaaatatctaaattacaatttgcaatccaaggcagttgatagcataattggacacatatgggacaagggtctcaatcataatccaaacacaatgccgctcaaggggaaaaaatgttgagcgtttgttacataattggacattttggccacaagcgatgacaaccacaactgtgtatgtgtcaatcaaaaccaaagctcttcacaataatactttatatatctatacagtattgttaagaatacatgaaattgttctaatgcatgtacatgcaaacttataaagtaagtcatctttaagtaaaaaatactattctattttaacaactttatatttgaatcttttgcaattaggtgcatgaatgtggacacgtaatcacacacataaaaacactgatgggtgattcgttgtcgtgcaccaatcaaatataaactactacatagcaagtgataaattaagaatggaatcagaaccaaaccaactaccacaaaaaacatatagcttatattatatcatatgtagcaaaattagaaatatatatagattgcatgggaagagtaaaaactaaaccaacctgccaaaaagtgtagtagcctctccgttcatgggcatagatgaaaaactccttcccgggtccacatggccagaatttatcaggaaacttgagaaatatcttagtgtacactatgacatcacattgttgtatagcctctgttttccatctctgtttacagttataaattatgttatcattatgatttgaaaatatgacataaacaaatatttcacggccaagtgcccaaaaaaagtaaaaatataaaatttataaaagagagaggctgcatggtcaccagccaacaaatcagctagatgatttctttttaatttcatgttgtctatattataaaatacaaataaatagcctaatgggccatcccttggtaatcctgtgggttgcaaattacaatttgattgcatagattcagccatccacaggatttgcataatgcaaacaccttggaaatcttcccctcacgtcagctgccagcataacccagttgggtgtgaagagctagctatagctagctagctcatatctatagattctgactaatttaacttaacacattaaacgttgtgggccattcttacatataatatatacaaggggaacaagttgagattggaactcccacctagagggacccatacagcatttgaatttccaccatgttggacagaaccatagtgaaacttatgagcatattgagcggtaaagattctccaaataaaagcaaataaatatggttgtaaatagggaaggatgagagatacacaaatctaagaaaaataaatgtgtagtgtcacatcctattaacgagaagctcatcaatgtgtcttggaattgactcttaaaaattattttaaaacagaaaggaattaaataagggaatataaagacgtacgggcaagggtggactgaatgaaatgagatcactttggagaacgccaatgctaacagacaaaattacgtagttggcatcgtagacggaaccatcttctgttgtcacagtaacgccgtttctcgagtgccgtaattcccgtacaacctgccccaaattatgcatggcaaacatagttaataaatgtactaatcaactgtactaatattatctaaaagattctgaaaagtaaaaaaaaaaaagaaaatttattgaggagtaaaagatggctcagaattcagatgaacatatccaattacgccaaaacaatttttgggaaatcaaaatcacgatgaattgcatcgtggttatttagaataataataaataaaaaaaggtatatccattggatactgattttgtgagcaattcggaaataacataaatacacagcacatttaatggagaaaattgacaagactccatactttcgtgttcttatttgagctttgatatgacatctcacctcaacggctaacgttctcaagtcagaataatgcaaattgggacctctggggcctactaattaatgaaaggtaaaaggctttgagtcacctcaaaataaaataaaataaaaaagatggcggaaaggataatattgctttccattccattccatggttccatgattgaaatcaaagatattgttggtaggtcaaggtatagctcttcgtggggtatggactcaaaaagtgctatttcttagctttcctgtgtacaattgactccgagtggagtacttaattaatgaaactaaaggtaaaaagcaccaacacttggagcttggttgaatgtttcaaagtcaaattttggttacagaacagaagaagagaagatgtacatgttcagcaaaaaataaggaaaatgttaacagaacagaagtttacaaaaagattgccttcaaagagaggtaactcaatattttaattttggcagtatactcaaaaaatctgactcaaattttgagatctctcctaaactactcctacaaaatgtctcttaattttttactgcaaaatcgtaccatagacgtttcatcttttgtattctaatacggatcatcagatttgtcagtattatttaaatattcaagaaaatgatattaaattttgaaattaagaaaaaaccaacagaaaagctgttaattgcccgtgatacaaagaccataaaagttggcaaactatattatattacccattataaccactcttaaataatgaatatatgatcatgaatgaaagaaagaacttatctactcgagcatatgcgaaagaaaccagctcctgtaggctaataataataataattaaaaaaatattaaaaacaacaaaagtgagttgacccaagtaaagttgttgtttccccattattattataataataacgattaaggacaccaaagaaaatgaaaagaaaaaagaaaggaaaatgcttctgaaaacgtcattatctttaaactccaaaagtgggtcaatcaatctcaactcaacatacaaaaacaaaaaatgaaaaatcaaacagtacgtgctaatagaaacagaaataggatttctcctctattctatttctttatctacgtcctttgttttcatatgttatgattggatgattaaaagtaagaaaacaatgaaaggaaccaaatcatttttattaattttccaaaaatatataaatcataaaaatatat

SEQ ID NO: 36323 - DNA, 3327 bp, Cannabis sativa
ataatcaaagcacaatataagcaaactacattagatattataaagcaataaaacggtagaggcttacattctccggcaagcaatatccatgatcaattggagtgagcacaattgggcttccttcaccatctttctgaatcagtatgtttccagcatgcctatctgcatttgccaatcttatgtccaacacagaaattttatgaacctcagatacagggaaagctcgaggacccatatcctcacaacttccgtcgttcttcacaaacacctgcagtgacccaatctttacattcttgggatgaccatactcatagccatctggatgattgaatcctctgtgcaagcacttgaccataacagtaagaggcacaccagcaaatcccttctcgctgtaggacttgcgaggtccatccagtggatgatccaaaatgtatgcagcaacttctctcaatgctccttctcctacccgtgttccttttttcaatccctcgccatccaaagacaagggcaaaccacgcgggttctttgcagccattggctcttcatcaattggcttaaaaacagaaacatagtttagaccagatgaatcttgcatgaaataagctcctccagatccatctgaagaccgaatggggtcattcccttttgctaaaccatcaaaagtagacttaagtagctcttcaattagtgacagttcaacaacagaatttacaactagaggttccaaaagaaaatctctctgtactgagtttttctctacaatctgctgccttgcaagctttgtgctcaatttgttcactaaataagaccttgtctcacctaaatcggatgcctcaatagacacttcaaaattcttctcaacaggattggctgttactttggcagatttcctaaccaacaggtgaatcatggcatcgctatttttgcaaatatcattgatgagtctctgatcttcaagctcctcaccattgcataacagttcttgatcattgagatttggaaacccttctcctttcttagcaatttgctcttttacataagccacatttcgattcctctcaacatggaactcaaactccttcccgcatacagtgctaactgtaatagcttggagatcagaaagccttagcaccaaatgaaccatatgtccatcagaaactccatagtctcttatacaagaattgttccgagccagttctcttccttcaaacacgagtttttgtgtctttacaaaaaatcccttagaagcctggattttcagcttcactgacgcaatagaatcagactccataatacgcatgggaatcacagaaccagcaacagtaaggtaaatcaagattgaatgaggggagctgcttatgccattaccaggataattcaaagagacttcatatcctggacttagagctacccttgcaatcgacatcattgatccttcaaatcctaaaccaatcaatcctactgactaaacaaaaccaatctacagacctcaaactgtaaaagtacaccaaatgtagtccatggcttcattctggaacagtattttaacaataaaatctaaaacagtcaatcgcaacggacagaacccaaaattggtgctttaagttctcgactgcaaacccagaaaaaatccaatttcgattgctgaaaagaaatatcccagactctggaatacaaaaaacctacaaattaacagaagaatatttatcattatcaatgttaattaactgatcgtagtatattaaaagatcaaatgaaaaaactatgaccgaataaccttacatgctttccataattaaatttgagaaacgaaaattaacaggagaacaggaatgaagagatttaacgtttgccaaaagcttaatcttttttcctcgtgatcgaaattgagaacataatatgatcaatgcagagaaagtaataaaaaaaaattgtcaccattgcatgagaaatgaaatcaaaacacgcaattaaatcgattaatcattctcgcttcatcgttctcatttccaaacaaaaatctcacatgataaatcataaaaatcactgtcaaaacagaaagaataaaataaatcaaagaaaagcaaagaataatcttatcttaccgaaaaaagctaaaacgttcaaaacaaaattccagtaatcggcagcaatggaagaaattttcgatcgatgaaagcaaaagatttcttgagtactttcctcccaaattttcccgagaaaccggaattttctacaacacaattacatttttcccgagaaaaagaacaaagaaaacttagagaaagagagagagtgtgtttttgaatttggatagttggaaaaataacagattcggaaatgggtatttataggactgtaaaaagctttggtctcgtcaatgtcttgtaacgaaagtcacgccctatcattaacgtcgttactactcttaacacttaaaacttaacagacgttattttctccttcatttattttattacagcattttatttattaggataattattattattttagactttatattttttttacaaaaattattgatttgtattaatattattattttagtaaataacaatttaaactctgtattattttaaaataatatcttaaatttaattttcataaaaataaaatttttagatgggttttatttaaaaaaaaaacaaaaattaagcttatgatattatgttgtactatttcagaaaacaaataatgtaatcaataatttttacaaagctaaaatgatattgggtgcttatgctttacatccttctaaaaaaggtgaatcgatgtactttttatctttttcgacatctacaaaaaaatttagtctagtttttttttatagttgtgcttgttataattatttaaaacatcttataaaattttggtataaaataaaaaaaggcgcgcatgaaataaaatatttgaactatatttttagcgtgttaaattttacgaatttctcaaaattttaccgagtgtcttaaatatatataacgtatatgaacatgaaaaaaaaaataaattaattgttttttacattctgaaatacatataaagatgtatcggtacattctttttaaaatatatattgcataatttttgaatagtatttatttctttttctacatttttcttttttaatgcaatgacattttagaaatgtaaataaagtttggaggttattaagtttaaacttaaatttacgtgttaatatattttgtgggagacacctattattcgattccttttccttttatttatcccacgaacaaagtataatgaatataaaataaaagattaagatattgaatattt

SEQ ID NO: 36324 - DNA, 3788 bp, Cannabis sativa
  modified_base (2288)..(2288): a, c, t, g, unknown or other
  modified_base (3365)..(3372): a, c, t, g, unknown or other
cacactaaaactaaaatctgtaacgcttttcatttcctgctgtgtaactacttttaatactgttgctgtttctgacaactcatttgatcgttgtggtatgtaaacaatttttctttcttatacagcctgttttagctttctttgctggatttctagtcttatatacattttatgctttcctttgctgctgagctgggttatacttcacatatttctggttgatcctaatggaccatcattgtatgctgtgtattttagagaaatcatccagaaagtggtcaagagctgcctaacaggttaattattttacttctgattcattgcagactcaactgagagaattcgaggcaacactgagcaattccccaaaagacccaattgctcttgaggtgagtcagaaatggttaattttagattatgttcttttgtgagtctccctaactgtctctcacaaggacacagattattaatatgagaaaagattatgaatacaaaaagggaacaaggttaactaggtgtgtcctacaggaagattgcaatattttatgttctgaaaagtgataaaacttgtctaatagtaataagctattgtgctgattgttttatttcatcctagctgggtttaaaaaagaagtcatctgcttaaatcacttgttattatctggtgagggttaaatgtaaactgaagccttgattgcttcttatttcaaaccaaaacagctgagatgattctacatcttatatgtttttgtagaaaatattaagattttcattgctaatttcaagctggccagatgtaggatcactgtaccctgaggttgagaataatcctatattttttatatatattggacataataaagactggaattgttcttattctcttttaataaaattatagtatagagtaaaaagataaagaaagctggattagtgtttaaactctaaaagttagataaagaatgagaaaaataaaagatgctactagctgcaacatcatctgatttaaatttacagtaacagtgctctgagttgggtatggtgccaaagggttttcttaatttgactgtttggtttaccatgtatattcctgttgtctgtttagcatcatccatggtaaatttgttttgggctattttcagggagctgctgtaactttggctgagttaggagaatatactcgggcggcatctttgcttgagaacttgacaaaggtttgcttctgttcttcctgaagagtcatgagctgtacttggatgatgctggtcaagtgaagggttcagtaaaaaattatgatctaagcttgcttgtatttgtgttttttgtgttacacaggagaagccaaatgaccctgatgttttgcgtttgcttggagaagttaaatataaactaaaggattatgacggaagcgctaatgcatatgaaagttctgcaaaggtgttatttctgtttatgcaacacattttactattcttcttttgcttagtccactgatatcttttcttgacaccaagtttatcagcatcaaatacctgtacttgataattacaggttgtagattatagcttatacttttaatttctattatgttcattgtacaacaaaatgatatgtgatttagtgaatcataatgaaaaatatctgaccacccccacccacgcataaattaacaagaataactgctggattaatttacttttatatcgtttgtttttccttttccatagtactgtttcatgttttatttattttacattttatcttccatttagttttcagttatcttttagtattatgaacaagaaacatgttaatgtggtgctcccttgaaatgtaatgggaagagattgaagaacataaaaaacatgatattcatttctcaaaactcttttaggattaatattgatagttaatgaataagacatgatcatactactgaattggatttaataatatggtccattgacatcttgttactatgtggcaggtgtctaagtatctcagttttgacgttgttctacgaggccgagtaaatgcattacttgctgctcagaaaccatatgaggtttgttgtcacattgtggaccacattactttacaatgatcctttgataagaatttcatagaaagtaatattatgtagttctctacatgcatggttcacaaagttttgtcgaactttttatgtatgttattgattcaaggcactgagatgaactgcaaatgactatgaaactattgtatcttaaattcagtatgatttactgtctctctctctctctctctcnctctctctctctctctcttttaggctgtacggttcctagttgctacccgagaagacctaactaaggaaaactcaaatgcaaaagctgacagaagtaccgaggactcagaaatacagaaattagatcctattcaagtgagttaaagtgtttgtttaaatataaatgatacctttaaatgaaatcacaaaatataggaaataactatgagttgtgtatgaaatgtgtcatgcctcattggttgctctagctgtgtctaagttgttgaatttttgggcaaatgatacacattggcatcttgttaaatatacttctttttaagtaagctgttaattatttatgctgcctttaacagaagtgctataccaatagtattaaagttttttcttttctttcttttttgtatttctttacactctcattgattttggtttccgtaccatcattacggaatttatataaattgtatcctgaaatgagttaagagatgagttacctatgtatatattcatgttttccccacattttgaattgcacaatatctgtatgaggtgaactatttacatttatggaaatccttggtgttttgtccttctctttttaattggatgtgatggtgagtattcattcaggttgatttacttctggggaaagcctattcagattggggtcatattagtgatgctgtatctgtctatgatcggattatctctagccaccctgaagactttcgcggttacttggcaaaggttctgtaatgctacttaattagttatgatttttacctttatttttggttgctcttagatgcaattttttgtggattagctaactatccatctcactcccactgcaacaaaaagatagtcttgttatagttataagtatttaagtggacctagacagagaaaattgctattagttgctaagggaaatataaacccaacaaacaacagtcacatgatgtgggacagaatatacacacacgtctttcttttttgataaatttaattacactaaacacaggatttatgtgtcagttatgttaataaaggtatacattaataataataataatannnnnnnnaatactaataataataataataagcaaaaagtttatcaactgttgtctgctaacttgtaaaaggtgaatactcatatgccctagacctctagtatagtactaaatatttggtgaatacctgcataacattctcttttaatatgcgacttcatgtctgtagttaaaagacctttcaaattaaatatctagtatgaagagaattttcattacattatttctgtgattctttttccagggaattattttgaaggaaaatgggaacaatggagatgcagagaggatgttcatacaagtaagtaaagattataggttaacacttctgtttctttcctaccgtaaccctaatggtaatctaatgtctaatatatttttttttaagaaaaaaaattacaactatgctaaaaaattgcaactat

SEQ ID NO: 36325 - DNA, 6009 bp, Cannabis sativa
tgaagcattttcatactggaaaagtatttctttgaaacgaatgcaactagccacataagcttcaatgcaaaaaaattgtcatccgcaaataatagatgagaaatcataggacccctcctcctgcaagtgggacctaaaatagtgcccagaccaatctcatgtttaataagcgatgcaaaaccatcaacacaaattagaaacatgaaaggggaaagagggtccccttgtctgagacctcgagatgacccggtgtgaccaattatctccccattaacattagaataagtcacagaggtaatgcaacacataatcaaaccaatctagccaggatgaagcccaaacttagacaccatacctttgaggaaggcctaatcaactctatcataaggtttagccatatctggcttataagcaagaaaaccctcgcaccctttcttgtatcgtttaattgcattaagacactcaaagccaatgataaccttatttaaaatcaactgtcctggaataaacgcgctttgctcttcaaagataatttcatccaaaatttctcttaagtgattggtgatcatcttagtaatgatttataaagcacattgcatagattaatgggctgaaattcactagtaagagaaggagacttcaccttaagaatcaaagttgttatccgtattttcggatggaggacacttgtaattctaagatagtttcagctcagttgtgctaggccctatcgcaggcccaaccaagataatggactggatccattagcaaagtcaagccttctggatgctggacagatgactcgtccacacaagatacacctccagcatagcgtatctcctaatggcatcgaacaaatcttctagatgagtaattaatgagcatctagattcatatcttctgattaagaaaataaagtaattatcaatcaagaatttatgtgtctttattatcaataaaagcaggacacagtttgacaactatcaacgtgatgtggcctctacgtcagaagaaaatcaatgcctcatggattaagcctcaccaaatcagcccaaatgtcataatataatatttgtatttaccctatcagtgggaaagaaccctagcactataaatataagaaaactcattcatgcaaagggttggaatctcattccttgagtgcttaggaaaattctaggattcaaacacttgggtaaatcataaggcttttatagtcttcataataatattgactcgtggattagagtactttaatccttgaaccacgtgaaaaccttggtcttattccttgcctataatatatttctttcagctttattatattttatcagtttctaaaattctcaataaaaattttggtgctttcattgagagttgaagaaagaagtaataccaacgaaattgtatattgcaacaatggtaatcacccaaaccactgtcgacaaatctggtagtcgtgatggagatactcccatgaacgatatgaatcctgctactcggatgaaagcaggagttgatggagatccgacagaagcgaacatttgtcctacttagaagactcattatactaaaagtatgttggcgaaaatcccattaatgaagagaacccaaaagatctagaggatgatcctgaggatgaagatcctgaagatggtagaaaaggcaaagaagatgagtattactatgagctagatcctacaatcattcaaatggttgaagaactcgctaaaactaagaagaagttagcaagattaaaaaccagaattgaatcaagaggagtggctcacgatgaaaatattcttgataaccctgctccttaggaaaataatgctacgaagaaaacaaacccaaaagtccctagaactaatgatcccacgagggacaaaggaatagttgtcatgggagagcctacagaaaagactactctaactgatccatgaaataacacgaatgttgccaaccaacctttacagaaaaagaaggtggccaatgctctagagtaatgtcgctcgatcaatctgtaaggcagagttgtgcggggcgataggtcgagtactcatgtataaaggcctaccgcttagggaaggaaaaattgctctagtgatttggttaactagagtgttggagtagaggaggttcacctagctttagagggtagttattcaacagtggacctctgagcacgtttagatgcaaaaaaagaacgagcgagaggtgagaaggcaagaccttatggaaacaacctcataaatcatatcaatgatagagttcatgggcgtgagttctaggatgacagtataaagcgtctggaagatcaaatagctgaattggccaacaaagcgtcttacccataagcaaagtggggctatatcttattcgaaagaagaagatatgtaaccatatacaaaaagaataatagagacacccttgccgaaactttttagagtgcctcagattgagttgtacgaaggtaggacggacctagggtccacctgtctaaatatattcgattgattcatgtagcgaaggcaagtgatgatgcaaagtgcctataatttttgttaactttatcaaagtttggcaaagattggtggaagagattatctcctagatccattcgtaactggaaatatctacaaacgatgttcaaaaaatagttcatagccgcgaaggattatgacatggaggtcagctcgttgaccaatataaaacagcaactaggagagagcctcaagaagtatatccaaagaatgatggatgcagcagcaaaaactaaggtcaacaatgacatgagatggtggcctcaactttagggatatctactggatccctgttaaagggagatttgcaaagaaagaggtctgatacatttcagatttcttatccagagcttaaggcttcataaattcggaagaggcttatgtccatgcttatggagtacctctggcaccatcaataaccatcagtagttcaacactggctccccaattttctgctccaactattgctcctcccagaagtgtattcgcgactttgacagtgtatggacctgacgtctcaagaaaaacttctgcatagaccagtttttccagcttcaggatggcataaactgaatgtagtgttgcccccagacagacgcatcaacaaacgtaagatttggaattaaatgtgagtcattcatagaacaaaagaagtgctaagaatcagagtcacagtgaagctccaaaaaatgagaggactcatgagcaaagatattttgagtatactagtttggtgaatactcaagaaaatgtttacagggaaacttgcaacaaggtccattacaagaaccatcgcctatgtacaatggtgaaaggcataaaagggaccaaagaaaaatatgtgaataccacaacgatgttgggcatactaaaaatgagtgtgattatctaaaacacaaaatcaaaggatttgtaaggaatggtcatttatccaattgggtatggatctaatcatctatcccagataggatgtggctcatatgcaactgtttgttcctggacaacaggataccttaaatcctcctcaaggagtaatttatcctcaagctttaggaatacatgcactaggaattcaaaaaccatgtcttacaggccccccaccaatccccaagtacctaagcccattcaggctcgtagactatgtaatctttatcagccatgctttgcttcacctacggttgatggccatgtatcaaccatatctgaggtccacacattgcccgtagtaccataaaggctcagaaaagatacctcaatgagctatataggggaaatatgtgttcttgtccaaacttctgcccaacatctaagattgatgaacatccccaaatcactttcaccgaagaaggtgccaagcatgtgcatttgcctcacaatgatcttgttatggattttccaacatgcaagtatacgtatcattcacaagtcatggattcataagagttaagtcgatcccacaaaactatagttaattaccaaacaattaaattcctaattctatttggtgacaataaaaagaagaaaagattttttatttctgctaaatagaaaacaaagaaaacaaataattaaggtataattaataatgattaaagcttaaggtgattaatttcaattacatctactttatatagtttaacataatttaattctcaattttaaattttcatgtgatagcggatttactaaataaacttatatttgggctaggacatataaatctcaacctacatgcaactttctactctcgtgataaagttaacaaataggaggcattaagcataaaaatcctaaatgctacacaaactatataggtactttcatcctatatcaaaatctgtgtctatttcaatatagcataatcaatactcacttctcagattttgtattgaaattattaaacaattaattggtgatcatgcaattaaaaataattaagtatgaataaaatagatacacgtagataattggggaagaactaaatcatattaaaatcaaaataaagtgtcaaacaatcttcattaacacccaaataaaaagtctagctactcataatcattgaaaacaactgacaacaattaattaagaacgtgaaaaataaattagaagaaaaaattcatcgaaaaaataatgttgacaatctccatagccgccttctgcctctaatttttgtactcccaaagttgtctccctaaagtgttgaaaattggcctttaaatagccatcagaaaagataaaaaaaacctaaatttcacagtttaaaaaaaccaaaaaaacccatatcgataaatagcgttgaaatagcctaaatatcgataaaacacaaaaacttagttgctggaaacaccctaaattggtccaccatttttcatggttcaaccttggaaaaatggtccaccatttttacagtaccctataaaaacagtaagtcgtttttcctgtagaaacaacctaacttcatgttttacacattaaacccaatcaaatcttcttcaaatctaatcaaactttccagaacagttaatatagcaaatcaaacatatcccacaactttattacccaaaaaaatcaaaattgaaaaccaccatgggtgctcaagcttgagttccatgaactcaaacttggtttcccaaataaacaatagctcaaccacccttagaataacacaacaacagataatttaaacttagaaacatgatttaatactcttctaattatacagaagataactcaagcaaattcaatctaaaacctatttttttcttaaaggaattgaaatagaaaaggtttgggccaagcttaccttaatcaaattccaattgtcctaatccttgaatcaaaacctgggctgaattggagcaaaaaccagagtggaaatttttggtttccttggcttctagggattttgagagagagagagagaggggaaggtgatgagggtgttatgttttttttttttaattttacttagaataaaacattttctttttagcctagatacttctaggtgcaataaagacaaagaaaaagtagagttttattatttaaaaggaaaaagaccctactgcccttacgtaattatcaagcaacttcaagaactagtggtaaaatggtcgtaaatacttaccccaaaacacctcaaataaaacaatactaactatacctctcaatttaactaacacttattctattaccgtcgtgtcatacttcgcccaacagttgagtttctacggttgccgaatccaaaaatattttattttaaaaatagtatatactatacccatatatatcaataaaatctccgtatttaataaattatgcttgtttaattattttctcaaaagtccctaattattccataattaactttagtaagattataatcttactctaatatttacaaaactacatatttaataaaatatgtctaataaaatataattatattttcaagatattacatagt

SEQ ID NO: 36326 - DNA, 4479 bp, Cannabis sativa
ttgttttcgtgttattttttgaaaaaccgtaaaaatgtaaaaaaaatattctttggacgtaaaaatgtaaatattttacaaaaaatgtgccttatataattattccataaattaaatgaaaaaaccaattcaatactaataaaacaaacattttatcttaataacacatgacaaaaaaaacattcgcaacctataaaagaaataaaaaaaaccaataaaaaattattaacaataagtaaaaaacaacaaataataaaataatattagcttgctaaataaataaataaaaagtattagtaaaattagagcaattgaaagagttagtaaaaagtattgctcaatatttgcctcatagtattttctttctttttatttatttatttatttttttttttgagaaaaaattacttttactaaagtcatccatttaatgtgatgtatgattatagtgggtaatttttaaaattgtcaatcattgaattatttttgtagaaaaatatgttaaatcttacgtgaatgagagaaaaaaataaaaaaaattatattttaagataatatatgtacttttgacagcttggagatctccaatagggttaatataaatagttgtccccttactctcacctaatacatttagccaattataatttgttttgttttttattaattaaaaaatttaaaaattctccttacttcaaaaattttctaccatctctcttttctcccatatgtcacatcatatacctggcctatatttttttttttggtaacaataaaagactacacccacgggagatggccttaggcaacttaaagtgtctaacaccagagcaatataacaccctataattagttggccaatctttatatcatttattaaattaaaatgtgtagaatttgatattaaaatgcatcaataatagtatatcatgtcttgagatacttggccccttaaccttaagtgccccttagtatttctcatttatatttagtagcattgattagtcattgcatttaccattatattttgtacagcaaaaataattaaaagagacacaaatttggattttcttaaaaagatattgcattaattctcaatgggatcttacattatacagctatgaagtgcagaacatttcacaaagccaaacattcaatcacctcaactctcttgtagggttgtcacttatctagcttcaacctatgcttccactcttacattgacagccaaagacatttaaaaatttatttggtattattgaaggattttatagcatgtatcatatgtgtaattatacaaccaaaaacattgttattcacaaaccaaataatccattatctaaactattgttctcaaaggtaattgtaaccaaaaattattctgatacaaagaaaagagattgaaatttacctcaaagtgtccaattacaattaacaaaagatcatgcaactcataacaaaacaataagaccaagttacaacccagattttggccttctcccacataccttaaatctgcttcattctctatgtcttttcaaagattctaccatttctttctagccaaactgtgcccagaaaataggaaatcagttttcaagtttcggtatggcgatttcagagcaaactggctctttttttgaagagaacttctcccatcttcagggttgcctgttaaataaaaaggaattgcatataatgagcttttgtatctttaacaaatgatttttagttgaaagtgaatggaataagaacatccatttcaaagaagtctgcaaagtgcaattaataatcaatagattagtgtgtgctgaaatgccaataataaagaagctttcttaacaatcatttcaaagttgaaacatagagaaaaatgaaaccaaatcaagaaatgttaccttcactcattcaattgagcctgctttctatgttgaaatctagaaagacacaatcacacaaaatcctcaaaattgcaaccaacaatagttccccacaatcagatcggcatggttcttcttggtgcttggaatcaaacaacaatgggttgttgttttcttctctggctccctaattttggctatgagtagttcacaattaatgtgtcacaatgagaaagccccacttgttccagcaataaacatacctcaattgagtaaacacagacttattgtattccatggacaattgagatttagaaaaaaaaaaatcatcatattgacaaatcaattttcatcatagttctctggcatctcatgaattaagaatgttccattctacaaattgaatgactccaccattgatatccacatatatgatttgaattaaaatggtacacactaatagtatatagtaaatcgtacttaatagttttatattaaaaattctttttactttaatacactaccaatgactagttttattcatatcgtataattttaatttttttgtacatctttacaagattatactttttctataactttaagatatttattaattatatttctataattaatgtattcatttatcttataattgtatttcatatattatgtaatatattttccattaattatttgttttaagacataagtatcaacaagtcccacatcacatgaaattattaacaaataaaaagaaagaaaatgtcatgtgatcatgatccatattaagcaacacttttactaatactttcagttgctctaattatactaatactttttatttatttatttatttagcaagttaatattattttattgtttgttgttttctactggttgttaatattatttttttattgactttttttatttctttgataggttgctaatgttattttgtattgtttgttgtcgtttgtaggcttcttatcagttattcaggtagaatgcataattctatttgtagcattagattggactcctactattactttttccatacattttattaactcggatggtttagtagttgttaatgcttttctagacgttcatttttcctcaatgaacttgattctttgtcagaggattagtaaatttgatgtccggttttcctaaagtgtccttaatccatgttcatcagtcagttaatgaagctgtacatggattagctcgacatgctcttcgacatgctcgacatgctctttgagggacaaagttattagttaaatatcccactgagtagcattgctttctataatattttgacaataaaaataattaaagaacaaataatagaagccacaaaaaaagacagaaattctcattaggatctaacattttgcagctaataactaagaagactaccaactcaaagtagcactctagctaaactatatagtttcttagcaattctaatctaccaattctaatcagtcaaaaactaccgatagagtaacacaaactcgaaagtactaatgcagccattaacaacgaaaactaatagaagacagtcatcactgcacatttaaccattgtttaaaatgtttatatttaatatttaactgttgtaaggtgcaccagaaaatttagagtgggagaggattagggtttaggttgaagaggggaggaagaacaacactccacaactgctaatgcgttgagaaatttcttaagcagtatttatatcataattcatgacacgtgtccaacccaaataaatatgtgacagaatctatattttgttgtcagccaatataaaaattataaaataataaaccattattatttttttttagcaaataaacccattaaatttttttacaaagtgattagaatttacgacgcagacgtttgctgccggcgcttgaaccttctcgacccagaatagctcatcgtctaaccagagcatactttgccaatcatgggccccataagacaacccattatttaaatatagagaatttttgaaaaaacactattggttgagtgtcacatagtttttaactaatatcattaactaatcgtgaaacgctactataaaaagtactcagcaccactagtacccaataataatacataaaaaaaattaattggatttttcatatttttaattttttgtaactatgtgtattgtgtcctatggataaggtgttcatccaactgcccataccgcacaaattgtccgcactttatcacaccacataaaaatatagtttgaaatcttttacggtacggttgtgatttgcattttttttaaaccacacagtgcagtgcaatttgcagttttgaatttaataattgtggttcaaacgacactccactgtatatattttaaaattactaatttttacaatatatttttattcttatttttatataaaaatatatatatatatataattgatgattagtatatatgtaataagatttttgtttgtattgttaaaatgccatagattaatttttaaatttttattataaagttcgataataatagtagtcaggcccggccatgggcataggcgggctaggc

SEQ ID NO: 36327 - DNA, 4062 bp, Cannabis sativa
ttggtggaggagccttggctgtggctggtttagtggccttttatgctatcaagagatacagaagaaacaagggtggttgtactactaaaacacccaaagaatgctttttcaaatgtctgccaaagaaggatgaagattcaggtggattgcattctcttcttgagacatcttcttcatcccctcttaacagttcaaggtcgaatctttttcttttggttttatatataatatagataaatctcatttggggttgagtgtctactgcttaaagggtctctttttgggtttgcagtaaatcatcagatcgtgaaacttcaaccatgagcacggtggtggcgacccaggtgaatttaaagctgtcattttagtttcaattcaagtctgccaaaaaaaaaatgatgtatttgacaactatttttggtgtaggaaatgaaaaattttactgaactggaaataacattagagaatgccctgcatctaaaggaggatcctaaggttgatctgcaaatgcaatcagccaaaggcgacaccgaagaggtagcacgtccagcagaagacaatacagacgaacgaacctactacatgaataaaaacgatgtcattttcaacaatacagacgcgcaagagttgaaaacaactcaggacaaacgaacagaggagaagataaaggagttggagattactggagaagaagtgaggtcgtacaggttttttgttagaattttgtacgtaatgctcctgctgctgctcttttaccgtcgttctcccctgcttctggtattgctacttctgcacctatttacttgttcagggaggttcaaagcactgttgtaaaacattcgagctaattgcgataaaataaaatgaccgtgtatatgactggtgtattacgagtaaaaataagaagcatttattatgatgtaagttttgcagttgttcaaggcagatttttcagttctgttctgatcttttcttttcattttttttttactacaaagagggaagataaatgaggtagtatgtgtactgcagaaagattaattctagtacaacctcagtataggtgaatcaatgtcctcccacaagtatgtttttacaaaatgtatgctaattatcctaactatgcactctttttccctatatacagtgccctgaattcagactttgctcgcaactggctgctgctggtttattttgttaccgagtgtccaacaaattaatcaaaattaaaaaaagctactacttaacgaacatggtgatgtatctcaactttctggggacaaaacttcataccaaagcctaccattgctgggatgaaactgttggctggctggtactgcagatcaattagcattcaagaatatctgggttatctgttgagcttgaccaactgcaacccgtagaccatcccaatacacctagaataatgtcaatgcttgagcaagcattaacctgaataacaaaagttaatgtcagaagctagaatgtacagtgtacataacaagtgaaaatgatttaaaagatttagaggtattgggtgcgcgataagctaccaaattctctgtgctgcattcaacatggaataacatgacagccattcctcttcctccatcaatctcagcctggtcatcaaggttgaaagtaggtgattatgggattccaaatttaagaaacactcgtatatataacagcgcaaattcaacaaccaaatgtttgtaatgtttgagcatgctttcaaccactcaccacgcatgaatatattgtaattcctgctgctgacaatgttgttgtgacctcggccatcatgcctgaaaaaaatttagatcaacataacaagatattcagtctgggcacttaccatgagattttcaaattaagttcgtacaacacattacagagtatattatagctggtattgttattcatttattttacacttgtcctcctaaaaccctacaaccttcgtaaggcactcaatcaaggtataacacagtccaattataccgaaaaagcaacataaagttgtaacgcatgccccttcccagcactgaaaggcaagatgaaaccacaccttgttgatttgaaaaaaaaaataaaaatgaaattacctcttctatcaatggaaaccacaaaaagccagtggatggagtgcccttcgacattatgccaagatgctatcttactggataaccagctttctaacccaggcaagacctctttgtacgttggaatattagcttgcatcatcctggaaatattgattccttgtgataattcccctttaacgttcaaacttacagacttgacatgcttattatgttttccatttactttgggaacccaagcacttccattttcattttgaagcgaagccttggattcatttccttgtgatgacatttcgacaatttttgcaagaaatttattccacaccggcctgtatccttttggggtatcagaaagttcctctgcttcactctcctcttcagagtcagcagtgaaatcatttactgtatctgatgttatttcagctgcagagagtgcagcttgctccctcaagaactacacgagatgaaattaaacaaataagcaaaaccaagttgtcaaagaaacaaaataaaagcacttggcgaaagaggcctactttcataattttgtgcctggcactacgcgtttttgcatgctgcaaccactgcttatgcctctgaaaagctgatttcccagaaagagcctgaatgttatttgaaaaaacataaaaagatgtgagccggaacaaacagaacaagatcaataaaatgcagtctgtcactataacattagattgttaagaaaggtgaatggattcacatcccagaacatcattcccaacaaaaaccacagagtgaattagcataacacctttatatgcaagaaaaagatcacaacaaatgtagtgtctatttgctagcaaaaatattctgtgttatggtcacactaaaaatgcaaaagttgtatgtcagtgatcaaaatatacgaacattataggtgattatctccacaacttcagcgtttgaaagtacatgcatgggagcaacaaaattcccattgacctgcatcagagaaagttaaagttcttcagatatttttcctcataatttagaagtgaaagtttagacaactgataaatgactcaaagaagagggtaccttagcagcgaccattttgttgccaatatcagtgtgtatcatgtaagcatagtcaatcacagtagcccctttaggaagattttttatctgtatgttttgtaaagaaaattgtaagggtactgaagcatagaaatctcatgtctaaaattgactttactcatttacatccaatgaaaatcaataaccgcatattacctctcccctgggagtaaacacgaagacacgactacctaacaggtctctcgtgatagtgtctacaaattccctagagctcatgttgcccacaaactcctcttgccattctctaatagcattgagccagccaatctgaagtaggatttcacaagaattggcagggaagtgaatggaaagaattttctgaaaattattttccaggaaatgattaacaatcataaagcagcaatgagaattagaaaaataccctgagtgcaatgtttgcattatttagacagacagtctttcctcttgaacttctaccatttggcttagcatgtccaactaaaccagtaacaaatactttcccactataatgagcagcaatgcctctctcagctattagattcatttcttcagttcttatctgccaaaagatgagaactcagataaataaaactgacaaatagaaaggaatttaacaaacttttgaatgaaaatatgttaatacatcaagagcgtataacaaaatttaaggcacatgcctaaactacttgtgaaaatggtacatgctcaataatgagaatccaagactacctgcacttcaattcgaaacatgctctcataaaggaatgggattacagttgtatgaagactttgataaccattgggttttggggttgcaatgtagtctttcatctgt

SEQ ID NO: 36328 - DNA, 17239 bp, Cannabis sativa
  modified_base (10773)..(10775): a, c, t, g, unknown or other
  modified_base (16777)..(16777): a, c, t, g, unknown or other
  modified_base (17153)..(17159): a, c, t, g, unknown or other
tgtaatttttggtgttgtggttggagtagaaataatttttgacaccaaatttggtgatagtgtaacaccaaatttggtgtctctttggagatgctcttaaaacggtaggttcgaattttttttatatagagtatactataaaagtacataaaataggtttctgttgtcttaccatgtatgatcatgcttaataattgccagtaaactattgaatgtttttttttatcaatcactcttcctctaaatttctgacaaggcatcctcaatagggtaaaataggacattgttagaataagtagtgttggggcatattggtatgtgtaaggagattagtagttgagcagttatggctgttattttagtttggagcaatagttctagcactagttgggagatttccgaaccgcttgaaagtttggaactttatttgtattttaagatatttataagcaataaaaataagagaagtaatttgagatttgattcaagattcatcttgggtagagaagaaattcctatcaatttcatttcttcatccacctagatattgttgagagtgttcttatttatcagtaatgaagaagccttgtcagtaaatttagtaaccggttcttacttatcggtgatatagaagcattctcagtaaatcattaaatcttctagtgtagtatatagttagttttctgttgccttaccataccatatcttatcatgttaaataattgctcatacaagagttggatgcgaggacccacaaggtacaagatgttatcacttgggaaatcatttaaaatggcattgctaacacaaaaatatgattctcttgttaaagtttctcatcttgtgttttagacatcaattatacatttgaggcttgggctttcctttgttttcagtgtgatttgattcctggatgcatgggatggctgaggctgagagtatccaaagattatccaactctttccatgctagcttcaaacaaagtcataatcattttattatatacaatttactatgttgctttgaggcttgattttatcaatttaaattttacggagtataatttcgtacatgtcaaagttcgaggacaaaaattttaattagtctttcaaaaaattttattttcgtttgaaaaagaaaaaagaaaacatttttttcttctaatatttggattaaatcaatatattaatatattcttttttctatatatagtatagtataattttatgtgtatgattataaaggagtgttaattataacaatttttttcaacttccatcttaaaaaatatatgataatttttttttttcatgatgatgttcgttataattacaattttattcttgtaattttttgaatcattctgaatagtttacagtgtcaaaaacaaaatttttaatatttcagtttaccatgcgtattcaaaatacttcaaatctgttatggacactgtaaattatttagaatttttcaaaaatttataagtagaacgatgtcgtaattatgacaaatattactataaaaaaaaatttaaaaaaatatttcagtatttattttcaaaaatagaagttgagaaagaaattatgataggatgttattattgcagtcctcttatatatatattttagctgaagattgaagtaggcctaaaagagtttagttttacagcaattatttggtgtgatttgtacaacatggattaatatgttatgaatctcagcagctccaccttacaattgtggcattcagttctaaagcaagacatggaacatcagtcaggataaaaaaagtgaggtagagaacatatgatgctttcagaagagtagatttaaaagcttcagtggtctttgttgcataaatgttttgccagtatgaaccaagagaatgaggtgagtagtgagtaaaatctatgttgatgatgcatgactaggaactttaggaaggtgattaaaagattgaatttacataattatagtcatgagttaccagagatatataaatgtacatatatatatatatattatgtagttgaatggaattggtttagctgcgtaattattatttttgattgatagaaccatcggcaattcggtatgtaatagtaaaattagaataagataatatggcatagaagagagaaaatacgaaaatagtaataataaatttatgtacacattaaattatgtactcgtatcataacatacattccattggatttggtaatggagtaagcttttcgtatatttcttttcacggaatcttgtgcattgctttcacatttttcgcatgtacataaaaccctctattatcttcatctttatgttcgtttcatccttcatttttgaattgaacaaaaaaaaaggacacatatttccttcctcaaaagaaatattaataataataagaagaaaaaaaaatgttagtatcttttcaaccacatctcttcccaacactttgattgatctggcatgtggcagtaacttgttgaaaaaattaaacaacatccaatccagcctgtatgtactacaaatctccttccgtcggaggattttgattttcaagtccactttccttgtcatcacctttaacaaaaacgagatgatcaccatctctaattacctctatgttatcaatttcagctccttctttactttccactttagctgtggagaaaccaaatttcttggcaccgaattcaagtagatcctgaaatgttggtggaagaagaacaagcttgcctttatattcacccttttcggggcaactaatggtcactctaggagggttagtaatcccatttgtgtttctgggactctttgtcatgctaactgagtataatggccctttatctacattgtgagcagcagacattataccaaacaatgagttgtgaaagttattagtcctcctccttggccggctacggccccatgaaccttccgagccagggaatgagccctcctgaaccacaggccggatggtaggctcgcttgtaaatctacccaaaaaccgaaccttgttgtctctctcaccctcaggaatgagaattatagattgagttttaggctgctctttcttgtacaagaaaagggacttgatctcttcatgaccttgttggtcagctagtgctcttggggtccaaccatcatggtctgctttgtcaacatcagcaccttgttccaaaaggaacttgactatttcaatattgtcttcactaactgccacgtggagggcagtagtgccattagctcgagcagctgtgacattaccaccatatcgaactatttccttgagcaagtttaagttgttttgctcggccgaaatgcatgcataatgccccacatcaccttcgttcaaaacagctccgttttctagtaatagcttggctacatggtcatgcccgccttgtattgcttcccatagtggtacattgccttcagagtctgtaacgagaaagaaaagtcagcgtcattattatgaaagatgtgtgttctgactttttaaagaaaaataggttttaaaatccatcaatcttaaatagataatatttatatgatcgattgattggttataaataaatgggacacatacacgggcaagacaattagaaatgaaggttgtccctaccctactactactactaggagagttgacaaagatattattatatagatcaattgttcgtatatattcctctaggctagagtttttaattcgagtaacagattggagaacatttatgaaagaaatacagaggggtggtccatgttaggaaaggggacccatgttatccacaattacatgatgatatatattttaaaataaacaacattaattgattaggaaaagaaaataaacagcaaattattttgtgaagtcaaacacacataaaccagttgctgataaagtaaacatatatttggatgtatgcaaatgtaactacaactaccaaggtgccaagtctttaattcattcgaacaatagaaagtttcttcagatcaatgaaatactaaaaaatatgtaatacactatcttagtttttattgtacatttttactagttataatgtcgttttccccatccctttgtggaaatgacagaccacaataagtcaactaggaagattacatggttaaagatgacacattgattcatgctttcatattttaatctgaattatggaggagattacattattgacaccgtcattatattattaaaagattttgttttgtaaattcggagggcaggggaggttgcacatgcatgactacagaagtactcatgtatttattataaattaattaatcaatgatatgaatgaactgtttcatcagatccaattacagtgtcactgattttcattcaacttcagagacaagatatgttaaacaaaacaaatacagaatatcaaatagttggttgcctaaataggaaattctataaagatatactacattaatattctcttgttattcacggaaccgagtgataattataaaagaccgaccaaatgaagggaacaaaatcaggtgagccacattgcttcgcctttattaactaattatataaacagaaaacgtttgacttaagagttagaatatatagggaaagaaatataaagaattgatcaaatttcttggatcatgaaatgtggctcccaataaacaactaaggatttcaattcaattactggttttagtatacttttgtttttgttttgttttgctctgtttgaagggtattggctatgaatagtgactgtgcagaccaaatcaaaattgatatttctatatttaatagaccacgtagtgttatggaagtcaattaaccaggatttatctaaattctcttcatcatttttggcatttttttcaatttaatattggaaggaagttagttggtgaaagactaaatcaacccaagtaaatatttttaaattccagttggggactatttgactcaaaactagactacgtaaccactcatgtaagtcaattgtttatcctccatgataggggagaaatattttgtttgacagtgaagtctaataatgtcattacattattagtttttttaaacagaacaacacccttctcctaacagagtactttcaaataatgcaatgcaagtcttccgcttaatcttttctattgttaacttctagactttactaaaaaatagaaaaaaagaaataaagaaataatatgtatgaatgaatgacattaacaaaaattgccttatctacttgctttagatatagttggccccactactatttcatagactcggtaaatttgaccccttgccttgcccctacatcccccaccaccccaaaaaaacaaaaaaaaaaaaaagaaagaaaagaaagaaaaaaatacctttcgaattaggatctgccccatggtccagaagaagaagcacacagttggtacttcctttggatgatgctatgtgctgttttttacatgaagaaaagaaatacacaagtaaatatcaagttatcaacagttagcattattatgtttagactaaaaaagcataaagtgggaagaaaaataataaaacaaacataaacagagaaatttttcacacaccaaagctgttctgccactgttgtcagactcatttgcgtccagaccccttttcaacaattgatttaacatcaagtcatctcctctaagagctgcaaagcatagactgagtggtaggtccattctaccacgagctagcatgttctctgtctccaacaaaactccctccataatagggtccttaaggtccttcagatgctgtaccaccaaacaaagaaaagacagcataaaaaagtttaatgtcaacatacaagatcttatattatattgaaaatgattctcttattggttttatatgtaataattgtgtgaaaagctacacacctgaagaagattgttcatgattatggtcccatctccaacattggcctgaacaatattcatgaacgccgtacggttcagccggagcaactggctcaaccgctttgttcgaacagtaaagagttgaggtcgataacaaagtacaccaatttcaccacatagatcaccactttttatttctcctacaacctgtgatgagttaacacaatgactattagaatctcaatgatcaaagaagctaaatgtcactttatagtgttgtcacagaattcatcaaacttgcctgctcaactccatttattaacactactaagtccgctgaaccagttacaagtatgtagaaatcagtaggagcttcattctgcaaaatgacatcttctttgggtgggaaatactcagctttcatctccgagacctttgaaattaccaaataaaacaatacaattaaaaatattgaacttgtgggaggagagaatgtaacttgaaaacacataaatgacatgacttaaaaaattaccagctgaaaaagcaaatcgtttgaaaccccacgaaacaagtagaccttatcaacaagagagtaaaagagataatgtgaaatactcgatcgaattgctttaggaagagagtcaagagtctcttgttgttgcagtccttctgaatttgtcctaaacttgagagacaaatgtgccaacatctgatcttgaagtcgaactggtagttggttcctctgggcaaaactagaagcagcttgtatagtatccctctgaagattccagcacaaaacaaaggtaaattttttatagacatacttagtttagtatacatgttaaatcaaacgaggagactaaataattaacttacaaattttctcgttttgctggttccatgtacaacaaggttagtcatgttaccaatcaagtaggctgtcaatccaagattaaagagcatgtagaaaatgtcaaatatcatctccctcgtatttacaggatgcaaatcgccatatccaacggttgtgagagtggtgatggaccaatatattgaggtaacatatcgaatccaaatactttgttcaaggaaattttccattgaactaccaatccaagtccttttcgggtcatgataacgtgccgcaataagataataaaagcatccagcacaatgaacagcgaaaagggtaacctgcaaaaaccatccaaatcagaggggtttaattacttacacaaaagaatttttcacagccaactaataaaaaaaaaaaaagacaaaatatccaaaaattcattaaaaaatacttacacatatgagttttgcacaacgaacccagaagtagttgtagtttctatccttttccaatctgataaaaattaaaagaaaataacccaattaacactacacataaaaattactacctctgttttttaattattagaaattcttataccttgaaaataaagcactaactcttctaagacgccataaccgaagcatattggataagccatatgatctgaataccgaaggagaaatcttacgggcaagttcggctggaatagtggaaataacatcgaaaaccagccaagactttgcatactttaaggcaatctgctttggctcgtccacaagtaagtaggttgttttgtccaagtaagctacaaagaaggtaacaataatatctatgaagaagaatccattgacaacattatcagtaatggctagtggtcccgctggcttttgaaggaagccaaactcgaatggcgaaacccaagcagtgtaaacgaccagaactacaagaaaagtttcccataccctgaaaaatagcacaatgttttgttagaaaaaaaaggttctggaatttccaggaaacaccaaatagaagatggtcaaaagaattttctaattagttcagtttctcacataaatcatgtgatcaacaattcttaaggccatcaattaagaattgaattaaaaaccaagtatagtagagcaacacagaaaagagcaaagtttatgtgttgaccaaacgttcagtttcagaaagtttaaaaaaaaaatgtgtatttaataacaagctaaaaaacaaataagaaaggaatacaaaattcattgtcgtcttttcagcaattgtaaagttggaagaacacggtaacaggttataaccattcccaatatagaattatgaaccattttggagaataggaaagtgcagacaaatacaaaataacacaccgtaagaaaacagaaaaaagaaaaaaaaaaaaaaaaagtcgtaactgattttgagctttgaaaaaaacgcatatcacaatactcaatgccattaatatttgccttaattattacttacctacccaggaatcccaaatattattattattatatatttaatgataccaaaagtagtttttacaattaaggaagaaggaagagggaattatttttgaagaagaagaagaagaagaagaagaagtattacctgtaacggtggttgtatggagatataatgaaccactttagtttgtttctccgattactggctctggcaccgagggaaggtaatatcccagttgagagactatattgactaccctctcgagagagttgctcaagttcttcttgaccacacaccctgaacatacccatgttactcatattcaccgccattgtttctactggatctgctctgtgcttaattttctctattatttattaatttgcatgttctcaactctgcttctcaatatcatatcttaattcttaagacctatcaccgatatatatagactgccctctgctttgcttctaatataatgagtttatatatattattattaaaatacacatatggaattgtctataggcacacacgtacttattttattaaaacgtgacaactccgagtcttcctctctctctctccaactatatatataacgattaatagtttttttttttttttaaaaaaaataacaaattatatcatattttatttttttttaaaaaaagattaaatatgatttaaaaaattaaaatagttattgaaagtatcacaaaataatacgaattgaaaaagctataataaaagtaactttttaaaattaatttttttaatatgagatatattttttataaggggaattattatatatataaattattttttttttatttttttttttcaatttacggtttgggtttctaaagtagttacaacactacttagaattgaggtttctaaacgattttttcttgcaatataggttacagcgctagtcgcaatagaatttctatgtaaaattccgtaaaaatgtaaaaaaaattgttttgaagtgtaaaaataaaaaagcccctatatataatttgtgaagttaaattaaaattctcaattaagattatcattataccttttttactcttctaattttcaaattaccatttgtgtatgtaagggtgtttaaaaaaatttataaatcactcaactcaaataaactgtttaaactaaaccgaagaaagtgacaaaaaatataattcaaataacctaataaaatattcaaatcgtccaataaatatattggcgggttaaatattattataacttgtccaaatataaccaataaatcgatttatatatttttacaaaaattatctataatataatttatatatatattacgtttaatagttaaactcttttacttgtattttatagtgtttaatttaaaatgttgatgatattgaagttaaaatttaaaatttagcaagaatatatttcttttttttaatacttaaatgtctattcaatttatatttgtcttatgtttatatttttaacattactttaaactataactctttaaatcttgaaatatatatatgtatattttatacatttattttttcaaattaattatttgaacactaaaaattaaccataaaaaataaataaataaataagtaaagattgatttggacaggttaacagtaccaaaccgatctttatttattcattgaacatgttactattagatatttacaataccatatttatattgaaatgataaaaaatacactataacacgattgattgtgttggataggttgaaattgtgtttgcttaactaaatatatgataaaatagttagagcatctctaatcatattgtctaagtacatttttgagctaaaatagaaagtaaggttaaaaaatataagttctaactatacaaaaaatagttctctataaagaatagatacataactcttcaaataagggagcctctaatttttttgttaagttttattaatagtaatttcatgagatggagtaaattttttttattattttattaaattaatttatatttaacaaattaaaattataaaatactgaataaaataggagcatgatttgagcataaataataagaatggttctttatttaattttttagctattttagctaaattttggttaaaaaatagagaatgtaattggagatgcttttacaaaaataatttttttaaaaaagataataagataaatttaatttcaataataattatataaagattttttttaaaagaaaaaatatttgtatatgaataaaaatatatcttttagaattaaattaggaattataataatttttctattttgactaatagcttttcaattattattttacaaaaaaaaaaaaaaaaaaatctgtgaatgtgattttccaaaagggtaaataccattttggactttctattttgcaaaagttaccaattagaccatctattttattaaatgtcaaaatagacccaatattttttaaaatggtaaaaataggatcttgagctcaatttttaacaatttnnntttttaatataacaaactttaagacaatttttaacacgaacagatacagaaaatgtaactagttttttcgtattttttttagattagattattattaagttatattttgataaaaaatcagtttagggtcctatttgtacaattttggaaaatatagggtccattttgttatttaatagaatagaaggttcaattagtaacttttacaaaatatatggtctaaaatagtatttaccctttccaaaatgatatttaatatatatatatatatatatatatatattttgaatgggatattttgaagtttaagtaattggataaatgttatatttggagtgatttataacataacatatatgtattataacataaatttttgctgactaaatgtaatttttagtcacaataaaaaattatttgtgattaaaatattgtatttagatataaattgttactaatttagtttagtcgatcagaacaagtattgtgattaaaaacacatacaacataataatgataatttataattaatcatatttttttaatttttagtcataaattttgttgtgagtaagagagtaagatttttggtagtgaaatgattttttatttttatttcaaacactcctaaaagcattttttaaataataattaaaaaaaaaaactttaccaaatagaacttatgcattctgtgtcacaaaaaatcacaccataatataggaaattttgcaatattatgccaattaatatactttaaaatatatttttatcattaggctttttaaagaacaatcatataattaatatatatatggatttgttttttaatcttacattaattacaaaattttcatatattaatcttcacagatttctttctaaatatggataattacaaattaattatattgttatacagaaatagaataaacaatcacaatgtaaatataaaataataaataaacggaaattattacgaaatattatttatagatgtccaaatcattaaattaattatcaccattaatgtttagttgtattttttttttattacattgatttagtttcctattttttagtgatatttttgtataaatatagaatttacttcattgtaataaataactgagaaattctcattcaatttctctttctcttttcttctattattatttattttatattattttataagtgagataatatatattactcttttattaaaaatatctacctcgttaatataatgtatagcttgagctgatacaataatctatcattgtttggtttccttatctatatattgctatataatctaaatgtgaaaatgcctaaccaaaatatgagtcaatatttctattttctaacaggtatggcggattttaattttctaattttgacatcttattgcttgatattattataatatcctaaactaacaaagtggcatatataaaattacaatttcatatatatatttttggtttgaattgtatgatgtaagttacatcttaaaaccaatcgtttaacatcccttacgatgatagctaatttttatttattaattcaagacggttcaatcacaaatagtatttttttggcttataacagatcacaaatagttcaccaaacttttgattactcacaattgatcacaaacggctcaacgtagtgagtagttttcctcactaatcttaggcacctcgatcacaagtagtactttttggttcacaacggattataaatgatttttgtttttgtctttttagattgataatatacttttgactcacaacgaatctcaagcaactctttttggctcgtcttttagaccatcagcacttttggctcactatcttcaaattacaagcggttgttttacttcgtcttttttgacctattattaaattaggaatgaatagtcattagagttttttttttactctaatactatattagaattgttttttttattacaaaactaattagctatgagataaataatgcaatcttatatatggtattatatttttacatttagctatctacgcaagtaggtgtgggcatcatccaatccaatccaattgagccgaaccaatcaaatccaatctaattacaaaaaattagatatccaattataattggattggatcggttattggatgacaatcttaaaatctaattaaaaacatattaaaaaattatttatataataaaaaatattgaaaaatataatagatatttattagatttttattagattttattgtatgttaaatttgtaatatttgattgttttgtgtatttattttgatgatattttgttctattttatttcttaaaaatgttattgttttaattatttaaaaattttagctacattacacttgtaagaatagtatgtatataagtattaaacttaaatactgtagaaggtgaaacttagtttttactacttttttttcttcatatttttaagttaatattgaaatttaggtgtataattgtatattcaattaaaaaaccgattcaattactcggattggattggattttgagatctaattggattggatcggataatgatttttcaaattcaattactaatgattggatcggatgaaaaaaaaaaaaaggttagattggatcggatgcccaccctatacgcaagagtaacatttttaaatataatttcttttaaagcaaaagcaattaaacgaattagaagttgttaagtggtgacatatatatagagagagagctacgcatgcaacactggttacacacgaatttagtagcttatttgctgacgtgcttcataaaaaagttatttatacagaaattaatataacgataaaaaagtacatgacccaaaatatatatagagagagagaatgatatgtgaaaggagtcagatttgacatgaactcactcgtcgaagcaacggtgaaaagcagctgattaatatatgataagatgatgtctataagtgggcattgatatataaaagcgcgttttaatagtattaatgttccctgctcatgcaaaccaactccactcaataattttacacaccaaattattctcatctcaccctttctttctattattaattttgaagtttgtttccttccccttgcaaaaaaaaaaaaaaaaacacagtttgcttctttttttgtgtccaaaatagttataatttttataataatacggtatgtattatacttcccgataatttttataatttatactgattatcgctaatagtactttagcatctctcgaattattctttgagttattactttttcttccatcattggattttttttctattatattgagcagtactttgataataaagtaatttacacgaactaataggactatatttaatatgtattgatacgaacacatatcatattcaaagattacacactttaaaataaataactagattttaaaataagtatacatttactacataatatttaagaacttaattaaaaaaaaaagttacatataggttaatgagcgagggatgcatcatgcataccagtcccaaaaccgttaactattttaatttttattcctgccctctattcacacatatttcctcttagggtcggatataaattatattggtgtcgaaagaatttagataatactaaaatatgcgattatttaaaagttattcaaatcctaaaaataaacatgaatataatgtataatatatatttatacatataaacacacaaaaaatataacagtttaattgacctgtctattccactcttgaaagagatgcatgtaatattttatttttttattcagattagcccaaccccggaaggcacctacttatagagagtaggcgatagttacaaattgtggtcactatgagatcattgtaaataatatttataataataataataataataataggtatttaattgtactaattattaatgatacttgaatgtttgaccgttatctttgttgattggtatgtgttcacacttttttagtttacactacagttttactaaatatgcgaggtgtcttccatgatacagcgatatttttttttagctaatattgcgaggtccttccaatactgcaagttctcttagtgtaggcattcttgaatgctttgatcacggccgtttcacatttacccctatggtatactagatgggccgttttgattcaagacataaatgttttcttttagaattcttcgatctattccttttttagcgtgagaacgataaccaaataagtcttgatactattttttttttgtctctaatccttgcgtttgccatcgtacatggcagcactatatccacattcctcttgtcgatgtccttgcggttgtatggaatggatttgtaatattcatttatgcaaaattttgtggtcccttaatcgcgaggttcgcgactctgatggaacaccggagtgcgagatgtcttatagttttgtgcatgcatgcatcttggttttgcgtttgtttttctcggtatcgtctaccctttactcaattttgtatcttgaaaaactacactcccttgttaatgtcgatggcttcgtgaacggtttgactgggtcacataaatatgattgcatatatggcttacaacgttgttgtcattgctatcgaaaccacaatttgcttcatctccgtcatttggctttgtctatgcttattggttatacgacatacatccagaactcaccgtacatagtatactggacatccatttatctcactgtgtatgttcttcatcagttcgagattttcttattcccagatcatcattttttgaatattcagtatatatttaggggacttcttatatgacttttgagattcttcaaggttgaactctttgtgatgtttgagactgtatggtaaattttcttttattttgccattgtttctgcccttggtattgtcacaagaattgaaataacacattttcttatcgtcgtttatgacctcattgaaggaagttgaaatttgagatattttgatgcccgagcaactccaagattctagcgtcctcgagatttaggtgactccaaagtttgaggtagcagtaagagtcgctccttcttcgctgaatatattgtatatactttcgattttcatctcgctaaagttggaatttttttaggcattgggctgatgaaattgctctactgatgtaaattttcttatttctttgaacaattatattgataagctcgaacatagatttgtattgatttttattgatcttttaataaactagggctcgaaaatttctcatatatttatctttatttgtgtatgataaaaatataggttgattcaatgtatctgtttggttcgccaccataattgtcctccaaaaattatagaaatattactgaaataccctctttctagctgaaaatgttatcgaatgtatttagacaacaccaaaatatgtgagtattcaaaagttatttgaataataaacatgcgagtactcacttaaaatagcgagttctcacaatagttcagcagagcttggcctacctatttcattattgaaagagaactcatactacgtcactttattcaaatcaagtcagcccctgtgacagtcagtagtcccgtgatccttaaaggaaaataccgggtaagctgtgcaatcccgcattagttgggaaatgtcaagtatgatgatttcgaggctgtgtacgtaggtatgggactacacaattgaagagggcataaattgattgaattgtactacctatatcaacaaggtgcatcttattttttgatagcccatcttgaaagaactccacgtttaagcgtgcttagcctggggtagtttcagaatgggtgacctcctgggaagttttctcaacaagcgtgcgagtgaggacaaagcacgctagaaacactgatgttggtttgtagggtcagtcatcattacatgaagcagccagagtggcgtacncgtgtataagagccattattccatagatgtaagggcccaatggaggcttgaagcggggacgtcacaaccccctttgaatggaggggagacactctacttataaagagttggtgatggttacacattgttaccattatgaggtcgttataaataataataataataataataggtagttaattgtactataattacaacgattgtaactccttgatgaatgacacttgaatgcttgaccattatctttgttgattggtatgtgtttgcacttttcaggttgataccgtaattttactaaatatacaatgtgtctttatattcatacaccgagatttctttttatattgtgaggtcctttttgttggaattattttannnnnnncttagatttactcacaagtatattgattaataacctaaatatgaacttctaaaacgataataaataaacacatataaagt

SEQ ID NO: 36329 - DNA, 4465 bp, Cannabis sativa
ttattattattattatattaataataaaaataatgacattgagaatgagaatgagagtgagtgagtgtcttaattaaaaatcttcatctctcttcagttgtccatttttccatttctgaatccttctctgttgtttttcttcctcaatttcactccaaaaagggaataaacaaaccctaaattacttctctgctgccgcaccagtcagctcatgatcaccaccattctctgcagcaaaaatgagctcaaatttcggtacacacaaatctatctcattctcaattttttcttattaattcgctctttatctcaatttttaattttatttgttttggaatatgatgtatttataacaattgggccatgcacatgcctctgttggaaacttgtttgcaagttcagttcttgaaaattgcggaagtagcttctgataataactctagacaatcttttattttggggagaagagttttttttttctttttttttggaaaaggggagaagttattgttgagctgcattaatttttaattgaattataatagaaattagtattagtgcacattaatgtgatttgcatcaatttgtttttgagagagtttgtgataggttatgttactttttgttctctcttaaagttatttatgggtttggtgctatctgtactgtgatgtgttgtttactcatgattgccattttttcttgtaaaaattgatagtgcccaaaacaagtttgagatacttaggcatacccaattagtatatttttcccacttataatctgttgaccctttagattcttgggtttgcaattagaatgtagagtttctggaaagcatttttctctagctagagtcatatttacttgtgatttattttctggcattagtgttaaatggttgtacattttgtaattttcttttgtgacctttgattttgatgtcagaattgtaccctgtcagtcataaacgacctagattttctattgatggaaaatatgaaaatggaacaactttcaattccagtatgggtgatgacactgtgttgaagaaaccaaaaccacctacttctccgaaagtagttgatttttctgatccctttgctattcaaaggatgattgatcggttagattgtggtaagtttggaagtgtcacaaaagatatagaagccctttttgctccaaagatgcaaactttgtacccatattttgaaaagtatccaacacttattaatcagttctttgatgcgaagaagaacaatgttgatgatgacggggctactaagttggcaaatcaacaattgactccgttggcaataacgtgtggcaatgtcattgatttggaggatgactgtgaaacaaatggtaaaccaacaacatcattggctatcataaatattgattctgacgaggaagacaaacaagaacaggcaccttcttatcattttctaaatgttgccttgaataacacaactggagaaattgtgacaaaggaaattgttacaagggaaatagaggtaaattgcctggcatgtgttgtggaaatagaggtgatttgaaactttatcccattgtgtcaaaattaatgttagatttattgactttatttatgcaggtcaggaaccttacagatagaaaagatgtagaagatgttaactgtaatgggagaactgatgctgaaattaagaaggatagtggtgtttatcttggtgtagatgatgatggtgatgatgacagtattcctgaggatgatgggcttggaaatatttggaatgaaatgtcaatggcgttagaagtttccaaggtatcattgcagaaatgaattgcaataggaaaaggacttttttttttttgtttctgtcttgtagtgtgtttcatgacttcttttctttgtttttatatggtccatgtcttctaatttttttggggaagtacacaaaacgggcgctttcaaattaagatgatttaaagtgtctgcgcatgcttccaaaatcttaattttggaaaagcagttaaagggttaaaactgactgaaaaccttggataatcttctctctttcctaaatttggtgtttattctaaaatgtatcattgcattgtaaactttcacatatataattctttttttttttaaaaaaaaaaaaatagttaatgtatttttctgctatgatgctgcttgtaggatgttgctacagatccttcatcaggtgaacaagtgaaagaagatgaggaaggctgtgatcattcttttatattaaaggatgatcttgggtacgtttgccgggtttgtggagttattgacaaagcaatcgaaaaaatatttgaattccagtacctgaaggtaacctttaattatgagcttttatgttctttgttacaaataaatgcatctttttcaggtagggtctcaaaactggactgttctttctgtttgcaacctctcgcatgaaaaattaacctgaagattttgcatctaaagacttgatgtttattaaactatgacacatttttctgtgtatcacactagcttctctaatctcttgcgcaactaatgtgtaaactagatgccgaactatcttatacgtaaactacagaatattaaaactatgttttatatattcaaaatccttttaagctaattcaagtctattcctttcccaaaataaaagaaaaaaatcaagattttttgtaaattggggcaaacttcagcttagtgcctttctgtgggtgagcctcttgacctaactactaccttaagttgtaaaaaataacatgtgcaatttattttatatatctgtgagtttagttacatttgacacagaaaacggatcgcactaaaggtttattttgttcaactttccaatgggagtttaacttaagaagccgctggccctaagctggcaacgtgcccgtaattactgatctattcagccctagggctcagttgtgaagtatgtatagctaccaatgatgatctgaaggagaactcaatattttagttacttgtttccaataaattatttaactcttcatgctattctaaagcattttcctccaaaaaaaaagagcagattttcccagatatttctgcttgagaaatttatgcttcactatgtttgaactttgaagtaaactggtttgatctaattgcttctggtggtctgtgtttttcccagttcacactatttctagtgttttcatgtacagtttgaactttttgttagtgtcgtatcatttctgcgcttttctcttcagttatttaaataatttgcacattatttttgtgattttgtttccagtagttgtgtaattaaggctgcagtaaatttatgccttagattccttattagagctgtttttattaatattctacatgtcctattatttcattacgcttaaaaaacatcttattgcaggtgaaaagttctcgaacttacgtgactgactctcgaagatcaaaagacagagaatcagctggaatagatgggcttaacttgtctgatgatgatttgataatcgaggaactgcatgcccaccccaggcatatgaagcaaatgaaacctcaccaagaggagggtttcgattttctcaagagcaatttggtgggtgctaatcctgggggttgcatcttggcccatgcacctggatcaggaaagacattcatgatcatcagttttattcaaagttttcttgccaagtatccgagtggcagacccctagttattcttcccaaaggaatcctgagcacatggaagaaagagttccagatttggcaggtagaggattttccattatttgactgttattctgtgaaagcagataaccgaacccagcaattggaggttttgaaacagtgggtagaaaagaaaagcatccttttcttgggttacaaacagttttcgtcaattatttgtgatcttgaaaacagtgaggcatcaatttcgtgtcgtgagatattgcttagggttccatcaattcttattctcgatgaaggacatacccctagaaacgagaatacagatgtcctgcaatctcttgccaagatacagacacccagaaaagttgtgctttcaggaacactttatcagaaccacgtcaaagaggtgttcaatgtcttgaatcttgttcgaccgaagtttttgagaatggaaacatctcgtccaatcgtcaagcgcatcatgagtaaagttgatatatcgagttttaggaagaacatcaaaaaaactggtggtgatggggctttctatgatatagtggagggtactctgcagaaagatacagatttcagaaggaaagtgtcggttatacaagatctgcgtgaaatgaccagcaaaatccttcactactataaaggtgactttctggatgagctacctggactattagatttcacagtagtactaaacctcagcactaaacagaaacgcgaagttggaaaaataaaaaagttatcaagaaagttcaaagc

SEQ ID NO: 36330 - DNA, 4787 bp, Cannabis sativa
aaaagacataacactatccagtccgatggaaaaataaattgatgggatcacatacatctgacttttaattctatttttatcaaatggcattagctaatcgagggaaaaattccaaaaatattttgtactgtacaagattgtgaattatatttcaatggagcaacaaaactacacttgtaataattgtgatgaagagaaaaaataaaaaagtaatagcatctaaaacttgagtaattatgtaatcaatctaatatattttgctttatcaatgctgtactcaattgatgagtaatgacaagatgcatcagcatagagtgattgatgagtaatttctgtattctttttctttttatttcttcctaacggcctcaaaagctttgaaatcttcacatggcgagttgttacagaccgagtcgaggaggaggaggaggagtcgtatgtatacgtgcgtgttcatgttcttgtctgatttgcttagattggtttcacaactggatggagaagccaaatgataaggccaactcactcactggatggcttggctttctttgaatttatgttgattccttccatattacaggagacacaagcatccatactacaagagaataaaagagtcataattcccttaatttctgtaatctacaatagttttggtctaaaatatattttagtggattggagtacttacaataaacacacactgcaagccattcattcactattctgacccaggtgctggtccaacccacatcaattgtccatctattgaagttaatattgtcatgaagtcagaacatctcattctcaaattttgtcaaaggtttgtattggatagacaagaaatgagagaaggaaaaagataaagataaagatacctcttcatggtatggtggggattccagcttatcaacaacatagcaaagtacattgccccagttgcaaaaacaaaatgaaaaaagccataaccatatggaacatcctcttccgaccgtgtttcctctttcctaagctgtataagctcttgttagccactgtttggtgggagataatgttataaagatgaaaagagtagagacaatagtactcagatatggtggaacaaaccttaaaacattgcgaatcgatgcctgttgaaaatgttgcgataaccatagcaagaatggcaatgataaagctctgtcataaaatcaagacttattgtcaacttaggaggaaaaggaaaagagaaactgtagagctttaaggatgttagggaaatcaaaacattactatgatagaaagccaatctgtttttcctgaagttgttgctctcctgatgcaattttcaccagctggttcactgcaatcaaaatcaataacaaatatctctttagaaactgaggactctattcctaaagttttttttgttctagagttatgtcaattgttctagcatcccttatacagaaagaacaattgtttgactcgcaactaacaaagtttgatgagagatcactttcttgaaaattgagtgtgacaataagagaggagaaacaaatcttgccttctaatggcacaccagcagatgaataccacatacagtcccatcagtcctggagtcaagataccagcattcacctgtttcaattttaaatattgagaattcaatcaataatgagaatttgagggtagaatacgatgatgatggttgtcgaatcttacttttggatggagagaaacactggtcataagttggagaagcactaatgtccaggtaatgaagaagatgtttaggaggcaagatggttctggtgcataccaaatgtacatcataatgatcccaactagacatacaacatatgaagcagttgcaaataacataacatgtatttggctgcagtaaaaaccataatatgaattactcagcatatgaaaaaagaaatgaaaaagaaaaccataatatgtatttgaataaactaggcttacttaccatctttccgcatgcttctctgacagacaacaatcattaagccatgtaatgaaactgattatgcttatcagctgaattaggagaaataccctgaaaaaaattgatcaaaactactccacttaaaatcaagttattggcagcctcaactaacatgagtaatttctaattaaaatcggattaactaaagcatacccggcaccaaaatgtgcaatctcccctgcaccaagagaaaaagaaagaaaattgtattaacatcctctcattggaatgtgtccacaggagtaaaatgacatttcaagcttgtaaaaaaacaaaaggacaatactaaccatagaactgaataattggagaaggaagtaagaagggaattataagcaaagctgcccacaggacaattttggcagaccaccatccagattgccacacatctcggcggtcattcaactttgaggtaccaaccgtcgtaagaaacatggtgaaatagaatgtctactatgtcgttaaggtttgatttgattcagcaattggaaagaaagaaaaaaaaaagccaaaaaactacacaatttgagacaaacatagtaattttcttgtataaataatttcacaagaaaacaaatttaagttgatactggtaaaaaaggatacaaagcaactcaagctaactcgcaaaacgccatgagcacctaaacagtcatgttcatcgtcacatccttttagttctgaatacagaaaaatattgtatcagcagtacataaaagcctacacaaatgtagagttttgtttgagtcaaataataacattaattttgtctcaagttttggaaacgtacagcttaaatctcatagaagcgtattagttagttgttccactcaaagtcaaaatccaaaacttagctttgtctttcaagctttgcctagattcatttgtcaatttcaatcaacatgtttaatcacctatgaccattttaaacacacatacataagtttgagacttaatttttcttttcacttctttcctcctctactgtaaactgaaacaatacacatatcttataaaaatactagttcaaaggtcaaaaaagactgaattctgtttcaaaccagataatgcaaaataggctcattgaacataacagaaaataaatgaaatatcaataagaaaaaagttcagggaaatcttactctccatttctggcagaaggattttgctgtaatcccttgcagcccaagccaaaaggttagctattaaaaacataaaggcgtacacatatctggccatccaaggattagatgcattgcggaattggctaaaccaagaatcatatttcaaaacgactcgtggtggttcattgccatggttcactgtaccactctccatgattctaagactgaaaaaaaaaaaagaaaaagaaaaactggtgcagcaaagattcaaagagaacccttttgttttcagattctctccacctctctgctcagcttcaagaatttcaactcaaaacatccatcggagaagatccaagaacagattacgcaagcccacattaatcaatgtacttgtcctcattattatatataacttctcttcccagatcgatctctacatggttaacaccaaaaattctcacttttgtcttcgcactccgatttcacctgatcaacaaaaggtacaaactttactcaagtactgtttttcatctgggctatcttcacattttttatatgaataaaaaaaatagaaacttttgaaacaaataaaactcatcccaagaatggaatggtttacgttagacgagagtaggtacgaaagagaaaaataacgtacactctacgacaataccgtatagtatatagttaatgactgtattccccaactgaagaaaatggatctattttttttttttttttgaggattatttggaattgaaccattgcaaccaaatgcaatgatgatgataataataatagtaataataatgagcaaagatttaagcatgcacgccaccaatggagatttcagcctttcaggtgtgaatcttttgacgaaattgaacctcttttgattggacccacatgttaacaacacttttattttattatatttaatgcagcagaaatcaaaagaatccaaaatctcacagctttgttctatacttcttgaaatgcgtgtatgttcctcataccaaatttcttcaaaccaaagtgttctttctatactggaatatcttaggctcaattctatgacaattttgtctttcaaaaaccaagtattaaattataatttcaaacctaaaaaagggtttttgaattggttgatgtaacatagagtggcaatttcggtattcgactcaaatcactttataaagtcgagatttttggttggactgtggatatagtacagagcagaaaaggcatatataacaagaagacactatttacaagcaacaataagattctttatttaattggttttttgtttcttttctaatataaaataattggagagggaattgtttggttctttgtttggtagctgagaaaatgaagaagcaagtaagtaagaaaattgaataaaatctcatgtttaaactaaatcaatcaacactaatatgatgtatatgttttagcaaggtgacttcatttcacttatgacaaaaattgaatgccaagataatgacaactcgttttgtttttttccccttccccattttcggttaaaatcacagaataatataagcggtcatcttatgaatcaattcaatcaaataatcgcacaaagaaatcaataacagcattgagagacccaactcatcatc

SEQ ID NO: 36331 - DNA, 2323 bp, Cannabis sativa
tatacaatacaataggatgtaccaaacgaagtataaacttttcattcctgattaaggactaatcttaagtgctaatcagtagctagattttaacaaatacccctattacacatcttcgtctaaagtcattttagctttagagttcttaatatattgcattttttcccatgcagctattgatcgagcctatagtaaaccacttagaaaagacaacacagaacaaggtttctttcatcaagaaatatcctccaaaatatagtcataaaaacagacctgtttgaaatatagcaatatattcttccaaatgatcatatttgaggggtactcatattcaaagaacagacaaatacaggttcaattgcattgaaagaagcaccaaatatttgcaacttactaccagatcgaccccaaaaaaaagttcactgattgcccaatgcaaagtcatgccaagtatccccagaaacttgtcgagcttcctgatctgtaagatagaaaaaaccaaaaagaaataagaacgagagcattttattcttcactcttttcttctttttttccattaatcaaatagagatattagcaggagtaagactacagcaacaacccatctaaaattacataaagaaacacaaagctgaattgacaaataaaaggcataacaaaatcagccacgaaaaataatattataaatgatcaaaacatgttctactctcaacttttcaccttcctcagtcaacaaacaaaagggagcagaaaattttctacttaaatttatcatattgtcaaaccatcacatgtttaaataatcttgacataaaaagaactacaggtcacccgtgctagtaaattaaggacacagttcttagtatggtatgaaactaaacaagcattactgaataaaaattcatacttgaatcctcagtgtcatcagttcggacaaccaatactggtggtaatggaagatctgcaacaacaaaacacaaattttataatgcaacgggaagagcaaaaatgaattaattcattacgaaacaaaagaagcatatataccatcatcaggaagagtgtctcccatccatgcttcgtcaacaatatcaataagtatacccaagctcaactctgccatttactttttatctgaagggagaaataaaaaaggagcaaaagggtcggttttttcaccatttcaattgtgagccgaacacaaagtagaatggccactaatttactataaacaaaattaacacagacatcccattatacatgacgaaattcaagcccaaaaactacccagaattgtttcaaacatcacataataaggactaaacaaacgattagaaaggtttttccattttttggctgaagaacgattaaaaagcttaacaagcccacaagtacatgaaaatcgcaataattatctaagaaatcccattcgataatcctagtcaaggaaaaaaagcccaaggttcaaccgtaaatatcaataaccataactttaatagccttgaaataatcatgactataaactctatttatgaaaatcgaatagtaaaattaagtactcagcaaaagaaaaaaaaaaggggtaacattaagtgaaaggaaagtaaagatttgaatacttaatggtaatgaaccaaattacgagctagggccatgaagagtaccaattcgaggtcgaaattcccaagtttcgtgaggctatctccctagaaaaaaaagacaggcctcaacctttgaagggttcgacggaaatggctcaacggtaatggaagctccggttgtgactgtatgggagtgacagagggctataatcaagatttatataacattctcggcaaccaaacaggttcttttacaaagcctgagtaatgacactcgtttcatgctatgctcaaaactcaaatttatttttcaatgtcgtttcctagtctcaatctcagatgagaaaactaagcttttaaacaaaaaaaaaaaaaaatagaaaataatttgggctgatgaaaatgaaagggatattgaaagaaaaatacctacaccgaatgagaagagatattggattggactcaagtgagggatacacgagtttagaaagaaggtgtgtcttgtacgcttcactcgatgaagcttgtaatagctgctaatggtggatactgattatttagctgaagaaacttcgcagagccggagacgaggtccgatcaaggattggtcgccgcagcgtcgacggtcgactcgtcgtgataacgagttcttgggggttttttttaggattttgattctttgaaagtcgataggaaattagggattctgaatttttctttta

SEQ ID NO: 36332 - DNA, 11082 bp, Cannabis sativa
  modified_base (133)..(139): a, c, t, g, unknown or other
tttaaatatttttacgatttttgtgattttaattacagaaaacacggtctttttttgttgtacatttgttaatttattgatgattttttgttatttgaatattattttgattttattttcatgttacttttannnnnnnttcttgttattttcgtgttgtttttatagaaaatcgtaaaaatataaaaaaaaaattataaatgtaaaaatgtaattttttttttttaaaaagtagtaccttatgtaattattttgttaaatttaaggtcattttgcatcttatctcattctcgccatccatcttaaagctgtatctcaaccccccaataaccgtaacgggtcaaacccgtagtagataacccggcccgtatcgtttttaaaaaagcgggtcaaattgttatcttttgttttatcagttccacataccctaactaccagcacgtgcgaggtgtacgcattctttgataggctcacgtgcgggacacaaccgcccatagacacattagccaaatcgcaatattgagaaatattacacagagatagataaaagaaagaaattaaattaaaaaagaaaattgtaataacaaaagaaaaaaaaaatacaagaaaaaaaagagagaaagaacaaaaccaaaccttttagaaaccctaattccagcttcccacaaaattcactgtcaaaaatctctctgcattttatcccattttataggtacgcgaagctccatttccttcgtcttctctctctgtctagtgtttatatatgcatatctcatatgcatgtgtatagttgtataatttaaaagctgagtgtattgttctatatggatgtgtttgtttcggtgtttttgctttgtttattgggtgaaaagcttgattaggattggaatttaattttttgtttattaatcgaaaatgggggttgtcttcaggctgtttgttgtgggttcttatcttattcccagctcgagctgtagtgtatatggttccccatcttctctcccaaaccccaggaggcgatattggctcattgtttttatttattgtatatttagttatttattttgtctaaatgaatcattttgtttgggattttatagtgcggtcatatatcattttgtttgggattacgaatgggaacaattattgttttatatctatgtgaaacctcactcaatttatgaaatttatgagtgaagaaaaatgtctattgatgcgggtctgtctgtgtagataaggacacagtgttttttttttttttttttttgaaattttacaaagaaaaggaggtgggggttcagacttcatatgcatccttgaaggaacaagtgttggacatgtttcttaagcctatggtccttgtatttgtgagaagatatttgaaaatttgttttgttagtttatacatatatcgtgatctgaatataagaaccaatgacccacgaggttctttgtaaatttccctgccatgtagctcctcttctagcagaagattattacgtactttttaaaaacttaatgaggtttgtttgtcgttttcagttttttttttttttaatatttgctttgtttcaagatattttatgtgtacatatttatggtttttatactgggttattgacatgcttttcattttttttttttgtattttttttcttatccttgttatgtttgctgctgctttgatttttttatcattatgaaggtagtaattttaaagtaacaactaataagtgaaattatcttaaatttccaggcacatttcattgtgttatcccctttttgctttgttgctttccatctgaataaggcaacgacctgggaaggcgccaataagaatgccaatccccctgtttctgggattcagcattgtatcaatttggaagttgttgttaaactattcatctctatttaaaaaatctatgcctatagaagaggatttttattctcttgcttcttaactttcttcattttttcgaaagttgaagggaattgtatatagtgatttgttgttttaaagatcctaataagttattgtagtgtcatcatcaaatgtcagaaggtgttatggcggtagtaaaacctgaggtatgcaaaatagcttaacttccattttctatttaaagttgcgaattttcttgtactctttattagttattttgacctaggtaagtttataagttccctttgtttgcttaagaggttagggtttcaatttctttgagatggatattgtttaaaggttctctcttagagatgggaaatttaatgccgaaattacactagaactaatttgttaaattattggcttatggctgaagtaaggtttatatgcatgaaaatagagggagacgggttgggggtttctttggtttataggctaagatagagaattattaactcacttggaaaattttgtgactttcaaagtgtgattgaattttgtaaataaaatattatggtgggaaaagtttctgattttaaataggggttggtttattgttccgctcttgttcttataccgatccattgctaaattttaattatattctgtgcattagatgaagtcttacatctggcttcagactgctgatggttcaattcaacaagtagaagaggaggttgctatgttttgccctatgatatgtcgagaagtaattaatacggggatgggatcttccaaaaattatgcaatatcacttccacaacgggttaaccctgctatcttgggattaatacttgattattgccggtttcatcaagtaccaggtcgttcaaataaggttggcctttttatttatttatctatatagtttttatgttatttttgcttttcttcggtctttccccccatccgtagcctgcgcaatgaacttgatgcatgctagaggaatgtaaacttgaaaattgaaatttcttccttgtaaggttatcagtttttaatattttccatatcttatttggcaacagttatcatatcagcacgcatgctgcatttcgtatttggtaccataggacatacatagtcacacttaagttttgaaggacttagcaattagttcttatttgtaggaacgcaaaacatatgatgagaaatttatccgaatggacacgaagaaattgtgtgagctgacatcagctgctgatagtctccaattgaagccgttggttgatctcacaagcagagcacttgcgcgaattattgaaggaaaaacaccggaggagatacgtgagacctttcatttaccggatgacctaacggaggttggttttttttccttttgcaaaaagttgatgtcttttatttttattttcggcttgggttttatggtttttttatgtagattggtttttcttttaggaggagaagttggagcctctgcgaaacataaccgatgatcctcgtattcgccttctaaatcgattatatgcaaggaagagaaaagaattaaaagaaagagagaaattgaaggtgcttactcttacttgaagagtttgaagcctttagcatatgttgaatgcagttttttgtggtaaatctatattttgagaagcatgttaatttggaatggcatacaaaatagctacagtaatgaaattagagtactccagcttgcatatgcttgtctgcaccagcactgaatggatatatttattgtagaatattgaggttgaagaggagcgtgtggatgagcgctcagttgaggatctcttgacattcataaatggtggagatggaggtatctgtgagaagttctcttccattctttctgcaaatatctgtctttttctcctatgctacacatttgaacttcccacatcattacaggaatgttaattaaaaaatttattgtgcattttagtttgatgttatttttttcctaacaatagattttgctggttagattgttcatttattcttttatttagacgtattagccaccagtaagaagttttcttctttcttcttttatcaagatgtttttggcagatttgcaaaatgttaaattctgttatttgtaaagaaatcacaactgcttggaacaaaattatacgatatgcttttactcacgccgtgtgctcagcctctttaatgcatatatttcttccaatataatcctgcattccttgcccattttggttggattcagggcctgttttgtttttaatatctgacacatgagaggggctgtttaaatattactagcaattttggaaatacagttggtactttcctttctatccaccatggcttaatgactgaactggtagcaactgatcttacattcagattcataaatttgatgaatacggatccataataattctgcattgtgaactattccctttcttgttcaaactctgcaaagttgaatggtcaacaattgtttaagctgtaattttatgttgtatatgctactacatgagctaatgttactggaatgagacctgatttttgacagttgctgattgttttctgcctttacagttttaaatacatttccatcttttgcccgatcatttgagctacccttattgtttcctttttgttgaggttctgaatatcacagaaacagaatctgtaaccataacatgatgaatctttcaaattagtattcctttaaatatgtttgtgtatatcttttgaagtttttaaacttatacttgttttggtgacagagtcaaaaggggctagaagcaataagagcaagaagaaaaatcggagaagaaaggatcaaataaagaattcttcaaatgatataaatggcaaccataataaggtttgttactctgtatctgggcttttgttgaggaaggggtttatgtggttgtgtgtattaacatttctatgggatttcttgcatagtttcatttaaggtctttatgcttttctcatgaatggtgtctttttctgtgacttaggaattggatgatctttcttttcacgatggcagtgttaataatatggcatctccaagtaaaacatccaagttgcaagattctacagcagtctcttattccccaaagctcgattttgatgatgttgatatcgatgatgatttagatccagccatgaaggaggagcttgacaggtaacaggggttgcataattgaatttttaagttcttactctggtttttggcgaaaatgttgaatattgatttcgttaaattaagacaaacaatatatttatgtttgctgttagtgttataatatctatacagtttgctcatgcttcacgttactggatggcgggtacatattggccattgtttattgatatgatagtagctcaatgcattgttacttctctatgcagagaagtcgaggactttgcacgtaggttgaattcagattggccagaaagaatgcaggaaatattatccttaggccaagaaagaaggcttgtaccagtgtcaaatggcaatggttcccagagatataacagtacgtgtttttctgtcttattgttttgattctggctttcttgtacataaaataaccaattacgattgtacgagcaaagggcagttttggaagaatttatacttttgtttcagcactggtactgcatttcttggtggggtgggttaacagtgtgttcttttatcaaagacactacaaattttgtgtagtactttgtttgatgtatttttccaattctgtgttctatttgttcctacaacaatcgaactttaacatctttagataaattgtaagattttagttttaatttaactaaatttgattgaattttcttgcaaataccaaacaggtttggatcggagatagtggtatactgttagaatattttacgttgagattacccagcagcagcgttgagcgaattggaaagatgctatcgtgcagcttgcagcaaccgaggctgtggaaaagtctgaaatatttttgctgcaacaaagctcatgagtatatttgtttgttttaacatcatccaaatgcaatttttcatccgaggaatcgatgtgttggagacacaaaaagatgttaggaaagagttttataaaccaaaaaaaaaaaaaaaatagaaaatgcatttccaagggtgactgacaaatagccagagcaaatatgcttgcttgcttatttgtttatccttgtgttctgttgttttcagccatggatggcagttagctcatgtactgtactgtttttttttactcatcctgtttttgcaaatgttctcttttcctttttccagttcttataggccgcatttggcttttgttaagttctacgagaagttgtaagtacttgcaggtgaagtaatgaattgggggggaaaaatgttttatctcaaattgtgtttgtctggattctgaatcttaacattaacttgtaaactgatgtgatgggatgaaacgtatacccatcacaaattattacattacatttagattacatagtttgttctttaatctttaactttgtaagccgagtaatatcttttgaaggctttaggaagataaaaaggcaataagaaaccaaaaagattgaaacaccaaaaggccatattagcaatggcaaggcctcttccaatgtaaagtctcataggagaagagccatcatatccttcgttaactttagaaaactcattcctcagccaatctacgatgctaaaaatcctcctagagttgtagaaaaccgggacgaaaacccgaataggagttgaaaaccatccggaaaaggccaccccttccatgaaaacttggctggagagtaggaaaagatggggtgcagctgcttttattccttctttgtttccatgaaaaattccatccaagatgtatgctatagggagaagaagaccaattattgctccaatggtaacatagatgagaagaagcttgttttggggactgaaaactgttggctctagtgaagactggagctttggaaaagcaatctttgatagtaagaacatgtagacaatggaaaagaggacgaaaaacaagtcttggggactaaccatgccactggctaagagtagaagaaccacagcaagggcaattagatgctggaaagagagaaacatgagctttttaggagtttgagtgttgttttccattgaagcttggtttgagctcttcttctattggtaggcttctgtcgtaacttcaagttggaccagctctggccattttccttttttttttttttggtaatctgaataaaattacagaacgagagacaactaaaacttgtatgcaaaaaatgatactgaaaatgaagattcttaagttgggttttgcttctttttttcttggttggatttttcctcatgagaggtgggagttaggacacgtggcccgtacaagtgggaggatatattgtggatagtgcgttacataactttcttgttttttataacaaaaaacatttactttcaaatttatctacacaattttttttaatcataatctaattttgtattctttccaatcaaaattaacttgcttttttctctcatttttttctaatttctatcaattcactgtttgtttacttttttctctcatcatttatataagaatagaaagttttcaaatactatttattttttattttagaataaaaaaaaaattaaaacgtatgcagaaaaaacattacatatatactctgaagttttggaaaatattaaaaacattatctcagaaattttgtgactcggcttaatttatctgagctaatgtttacgcaatttttggtattggcatcggaattcttgttaagttgttagtggtaataacaactaagaatatatcaatcaatgacgggacttgtaacccaaaagtaccgaaacagtaaaccctaccctaacccaataaagatggtgattcctttccttcccatttcacgccacgtggcatagtactagaaggttttagaggaaaaaaaaaagaaatttggaagatctctcttctctttgcaacagttgaagcaacaaaattcattacagacaaagctttgacaaatgaagtcactaaccaaattaaagaaaaaaggacggaagtaataaaagaatttccggaaaaatctttctccttttttttgtttttttttttttttgttttttcgacagaagaccatctgtaaaactggaacctctggctaagaattaacagctggtggtgtggtggaggctgaacccccatgtaaaaactctgcacaaattgtataaagattaaaaaaataataacccattaaaaaataataattccttcctaggttggattgcttctctgttttgaaatctcctttatcttgttgcctttgccagtagttgaagatccaacaatgtcaacattaactagccggttttctgcatcgccaagaatgcaacgtctacgcaatttcaatgtttgagatgctgtttcatgtgtatcattttcatctaaaggaaaagaatctgaggttataacaagtttgacatggtctgcagcaatggcctccttccatcctgtaaaagcatcaataaaaggatcattaaaacttgtattttggaggacgaaactaaagaatagagaaactaaacttactctgggcaagaaaaacttgtgcagcatggctagaaaattctgagtttccatttaataaggattccgtatgacccttttctccatttgggactttggttccattccggctcactggtctccaatgcttaactgttgacctgcttgtgccactccgaactgggttggatttgttgggtttagcctgaacactgttcttcggcaattgatgttctgttaggcatgtatcacatggttcggagagattatttccctcctcactgcaatttccaagtgtaacagaaatggaccctatcaaaacctcacggttattaatttgatcaagatcgttcaattcctctttttttactctggctttcaaagcatctatgttggtttctggtttagatttccggctccatactttatgactagacacacccactcttgaatccttatgagttccacgattatgatggactccgagctttgatgattgagagccattggatgcaacccattgtgattttggcgacatttgccaccgtttccaacgaccacttccttgtgcaattcgcttttcaacactagaactactacctgaatcaacttgtccgcaatcagaatcaatctgaaagtctgaatccagatttccatcagagttgaagtgatcaacaatagacagcggaatatgatttggcaagtccaggctgtctatactgttatcacattctgcttgactggatgcttctactggggccatttcttccaacactaggtcaatgctttcatcactatctgccttctcctcgtgtcttcgctcctttgccttttgttctttctgcctgagcttcttctgcttcttcctttccaagagctcggcttgtctgcaagagtgaaacacataacagggaatttaacttccattttcggataaacttttcgggtggtagtccaagtcaaaattccaattaaggaagaactgaaggtaggtgagcttctgatgctgacaggtccgaagtagtttcaaaggaatttcatggttttaaaattcggacaatgcatcttataaatgtaggaaaaaagtcactacagctgtcacttttctatctacaaatcctttagttatacaggacaacaagaattaaacaagttagggctaagttacataacaagaggacattctttctattattttctgcaaattatgctggcttcagactattaatcagtgaattcaagcttgtaatcaaaatttgctaagataatggaaaaggtagtgtaccttttctgagctgcttcttcttcctccactagtaatttctggaatcttaatgcttcagcatccttttcagcaagccaagctttaacctaaagaaattcatgtagaaacatgtttaacttaaaagccatcacctccaacaaaatcaaaatcctagagataaaagcagaatactatttcagaaactcatttacaagctctaacacagccaggagtcactggatagggactgctcgctgtactaactaggattatgcagcacagaaaaagagaacaggaagagaattctagatttctagtaaagaaacaacttggtcgattattggaagatgaaaaaagttaccagtttctgttccaacaaaaagctagtacaagcgacgaggttttttgcttcaagacctatcttcccagcctccccatcaaaaacatatctttgcatagatgcagctggtccagagaggaatgttttctcacttgctaaatcaaggacattaaataattcctgggaagatatcggaaacttagaaggtctagcttggacaatgtcctggagaagaaaatatgaatgtcacaaacctgataaaaaatatgcagtctttaaaaagaacatgggggaggctgaagaacataactgaagaacgtaaaatcctcttaccaaaagctcagcaccagctttcaaatagggatgtggtggagaagaaaacactgatttccgaacatgagatgataatgcttttatgattgatgagcctggaacttcctagaaagcattgttaattaggaactgtcatcaaaattagttacacaaacaaaacaaatgataactcaagtttttcgacaaaaaaaagtaaatacataaaagaaaaacccaagcaaagcaagtcaaggtatctccaactgattatgaaacaactaccaggggcaaaatgcctccttttgcatccaaggttaaacaaattattaaacattacaatacaatatcaatctaggtaccatccacacttaaccaaccaaatgcacaataagtagatggataaataagagcaattattatgcgctgatcatggaggctttggtataaggtatattaatcagcgtgattaaaacagcataaacagggttaaaaaccaagtagaaaggaccagggggctaacctcttcattcttgaatgatacaacctcctttgcatcttccaaaggaagctacaagtagaatgaaatgttagtgcaatataaaagacaattactcaaaaaaaaaaaaaaa

SEQ ID NO: 36333 - DNA, 3858 bp, Cannabis sativa
ctggctctaatggtggtcatggcagtgatgaatttggttctgcaggtgaaaatggcgaaaacaccagcccattgattcagatttcagatgctggaaatgctttccaagcccaaaatcatgtttctcagtcaggttctgctgattttgaggaattgatgtcaaagagagctctagagtcgtggctggatgagcagcctggtttgtcaaatgtgaatacttatgaaccaagttcaagaaatggatcttcagcaagaatctccattggggatattagaggcaaaataaaacgtaaaagctatgtgctcttggatcctgtaaatggaaatggactgagggtggattattccttttcatctgagatttcaagcatctcaactatacttgtttgtatagaggttgtcctcaagaactgttcaacagagcctatgtcaaatataactttagttgatgaagaatctggccatgccttggatagtgcagatcaaactttgactccatctgacaggttaccaactcaaattgcttaaggaatgataatttcactataaatgaaaatgctgaatcatatttatctaacacagttacttctctaaatttttgcttagtgggagttcttgatttttttggcctatagctcaatcaaaagtggcaatcttgatggcctagtaatctttagacatgtaataagacggttataagttttcaacattcatgcatgctttgagctaagagtcatatctccctttaccaatattaaaggttgaaactagtcaaccaaacttctaaatatttttgtgttgatgcttagcagtctcatatgaatagttttcatagctgtatctgagtcaactaggcaatctcatatgcatagttttcatagctgtatctgagtcaactaggcaaatttctattgttttccgtatctgtatcttcctatagcaatgatcttgcattgtttttgcaagtctgaaagtgatagtttaagttattgaattaaattagattgcatttctcttaaattaactgctacttttttgtaatcttggtagtttttctagaaatcatcagtcatactagggtccatggaagtctaggttcacctattcatcaaattcagcataaatgtttgaatcaatggtcataatttttttggtatctagtaatcaaggctttagtaaattctgatttgcatcccacttggtataacagctccacaccatctcaagatgatgtgccaactttagcatctgtggaggagatcacctctctggagcctgatcagataatgcaaagaatcatccacgttcacttccatcaccatctcttacctctaaagctagctttatattgtaatggaataaggcatcctgttaaattatggcctgatattggatactttataaaagctgttcccatggatgtggatgccttcatcaatgaggagtctcatcttaaaggaatgtttgaatacacgagaaggtaatttactcatctttccttatttcatatgtaactcaccatcacattcctatgaacatggacccggatgcacaaaaagcgtgcagaaataatgtgcaaatacatatgtattggtgaagtcacatgtataacttgcctaggaaataattttttgtgcattttttgacacagtcaatcaaattcatctagggtagaacttttcaggatgcttcataaagattgtcactgcaaaatttgaacaaactcatatttttatttcttcattcgatttgtgtaaaactgctgaacgccatagcaatatagtagaccccaatcaagtgcataaggaactcaaactttaccatatacttttttccttatgatgaacagttttttagagggattgtttgcattctcttgtgtattcttttatcatgtgctgtctactgtctggcgcaattatcattatttgagtggtgtagatagtgattgggatggttagtggtctgaaaaaatgaagggggatgtagtaagcggggttaatcaagctatggctccaatttagcttcctttgaataaacgggaaacttttcagtttgaatgttgaagctgtttgacaagtacatctggattagtttgattgtatcatgtcataccaataataccatattgacatattctctgaatttggcttcagattatagaagaaagaaataatttttttctgctgatattccccttatgttttacttttgttggttttcgaaaattgttaatcgtcaattatattcaacagttgcactttcagcgatcacattggagggttaaataacgacaaaggtgactgctcggtagcgacagacaaattccttgaaatatgcagaagtctggcatcaaagatgctaagcaatgcgaacatttatcttgtatctgtggatatgccgattgctgcaaaccttgatgatgcatcagggttgtgcttacggttcagcagtgaggtcttaagcacattgaaaccatgcttaattacaattactgtcgatggtaaatgcacggaaccactgaacatttccattaaagtgaattgtgaagaaactgtatttggcttgaatttgttgaaccgggtcgtcaatttcttggttgagccatctcataccaacttgttgtaaagcttgtaatttgtaattgcaataattgattatggaaaagaaagaggaagaacgtgtgccttagttgacccaaatgtgattgtattctctttattccaaacaattatcctgaattcttgatttctgaatttccagttgttttttgtccctgtattgtacagaagaaagagtaatgtttgaactgacatgtttgttttttgcctgagttcaatgattgactcaactcttctatcagccaattcgtatactatcagtttgtattttttttttcttgagtttatcttttagattttgagcttcgcttacaccttcctgaaaccagtggtgttctgattaatggaaaattttcatgcaaatataattaaaaaatattaagtgatttcttgttggaggatatttgtgtctgtttggacttaattgcttaaaagtaatgatgtgctactaaaaacattgaaggagaaaaaaaaaacaaagcaacaatgaaattcttcgtccctattttcctttcatcctctggaaccttgctttactaattttgtaggatttatttgaactcaaagtgtacaccaattttagcacataagtgttggttttcttgcaatttcttgaaaattttatgaagttagtgtatagcaactttaatttaaatcatttgggataaaactttacgcacagaactctttgaattgtttggagaaatctgaaaaagttctatatgcagagacgaaaatccaaaatagtattctatttgacattgtaaggtgccgagcgtggcagtccacactccacattagctatatttgttggaactttgtgaaatgtttaaaaaaatgatgtgtgtgagtaggagtcccacatgggatagaaacgcttcatttgaagtgtataactagtttctgccatgactgccgatgagaattctggtgttattgatataaacaaactttttcgttttgagggaaacctttttaaaagatggaaacagaaaatgttatttttcctcactacgaaaaaggttgcttatgttctgacgactgataaacctattgtttctgatactgcaaatgatgatgaaaagcagaagcaaactgctgatttaacaagctggaccgagaatgattttctgtacaaaaattatattctcaatggtttatctgacgatttatatgattactataattctgacaaaactgccaaggaaatctgggacgcacttcaaaagaaatacgac

SEQ ID NO: 36334 - DNA, 5721 bp, Cannabis sativa
cagagattagctatagcttagaattagagaattggtgggatgttaaaaccatttttattttggtcttagttttgtggcttaatatggagaatctttgctacctttttgtcacttgatattgtttataccttttttgttttcttatgaataatggatatttcatttctgtatcatagggaaaatatgaagaaacaatcaaagaatgcacaaaagcattggaattaaatccatcatatataaaagctctgttaagaagaggagaggctcatgagaagcttgaacattttgaggaggctatggctggtgagtacggatttgattctctgttgttaaactgtgcatggatgttctcaattctatttcactgttaaattatatacaattcttttatatgatgaaaagatattaaagttgtatgaatagtcttgtgctctgctaattttgcattctttcattcccgttttctcctagatatgaaaaaaatcttggagctggatcctacaaatgaccaagttaggaaagcaattcgtcgtttggagccactagctgaagccaaacgagaaaaaatgaaagaagagatgattggtaaaataagtgaaatacctattagttcatcctatttttttattttcctctaatgggttagaatattttacgagttatttagatgaaggggtagaatagtttacaagttctttagatgaagttaacacgccttcatctaaagaaggcgtaaaatattctaaaagcatattttataaacatataaaatttaggatagtgttcacaacttgaaaagatttaaacatctaggaattaaaattattttgttgggtttgatattgggaatcagacattttacttctgaaatagaaaagtagaatagtgagacggtaattttaacttaagtttcaatttagtttcggaatggcggttcccaatgagtaatgggattgttattccattttttgatgacaaaccaaaccatggaatgaccaaacactcactaacttactataactcatcgagctcgtaagctcttactgccactgcctgttcacgaaatgaatgaaggaaatttgctttcatacataaaatttactatatgtttatttacacttttctcaaattcttattttgtgactaaatcaagacataaattgctccttctgaacagggaagctaaaagaaatgggaaactctttgttgggtcgctttggaatgagcatcgacaacttcaaaaccgtcaaagatccaaacactggctcgtattctgtttcgttccaaccttagttatgttgcgggtccatttttatgtgcaggtaaaaaagaagctaaggacttgataggaattcaaaatttatggaaactgtttcggtcatatcagtgtgaacactataaaatcgtcatgtaattttgttagttccatgagattttaaattaatgattgaaacattttgcttctgaatgagagtttgatactgtgactttgaattatttatcagttttatattatggtggcgtttggtgtaatggaatggtaatagtaacggcgatcgtcataaactgtaataataatattaatgggaataatgttatgatgtttgatttatttttagaatggtaataagaataagttatgtattgacaaaaatatttttacttcaataaggttaattttattttacataagtggatagagctttaatccttgtttatgtaaatggtgtatttcaattaagatagaaattgaaaatgactagttgattaacttgatttattgtgaaatcactagaattttttttgtgaaatcactatattaatcgttaattattaataaaatttttgtattttttaaacttgtctcattactaaaagaaaaatccacttatctctctcctatactttctttaacattaaatatataatccactaagaatatcttaatgactcacaaaagataattattgaacacttatacgatgttagtgttagattaccattaagtttggaaacgttgtcgtttcatagtttgaaagaggtggtggtactcatgatgataagtcatagttggtaattgtctccttatgtggcttataatttgaatcaaataattaagagatttataaacatacccttattgaaattaatggccaaaaaaagtaaaatatgaaaataaataaattatttgaaaaatatgagaatttatatttttttttttaattttttttcttccctattttaaggggaataatcatacggattactaactttttacttttaaacagaatacttaactccactgtaaacaaaaatttcatcaatatatttatgccattattacaatataaatcattattactctatattccattttataaaatataaataaaaaatttctaatgccattttttaacaaatcttaaaaaatcaaattatagttaccaaagtttaacctttacttacctttatgtcgttttccaatacttccgtcgttttcaacttctttttttaatagtcgtttctgacggtgacccttaggaaatcccgacccgacccgacccgacccgacccgaatacagatgaataacatgtgcgggtgagaatgagataggttggaaattgggtccaccataagtagtgtgcaccgaataacagtgtattgataatctctgaaatcgtcgtcttcctcagtctagacgaagaagagagagaaagagaagaagaaaaagagatgggaggagctcaagcgatgaagtatattcctcgaatcaaatttcctcaaagacatccaaaaccatctggtgaactatttcatttcaacttcttagctcaattaatcaattttctttgtatctttttgttgactttgatcgactttcttctcttgttttgacctaaattgttcttttttatgtttattcgaattagcatagcttttgagaatgaaaattagtaaaaatcaggtcttttaacgaacccaaatctttaatagtctcaaagagttgtgaaagtatttcttttgcattgagaatgtaaggtgagatttgaagtcttaagaattttctgtttgtaaaaaggggttagtgccaaaaatctcagatttttcagttcattttcgaaaggctgaaattcccaactcataatttttaggtttaattcagatctcacccaacttttaagagttttctgcttctcataaattttgacattagcaaaatgataagaataaaatcatttagataattcataagctaagaacaataagatttaagtgtaaaattacttgatagtatggccatgaattacactaatattatttttgtattgttctcatatttttcttttttgttgttgtgtcatcaaatctttagactcgaagaatcatagtattgagattctgcaactgctaaggaatcatattttgtttctatgaactgtttaggatacaaaatctatatcatggtgccttgtttaactgatctagtttggtgtttgatttattgatttagattttatgtttcttggcttccatatcaacatttggatctgtttttttcttacataagagagattgttaagtaccaacacacatgtcatccaaccattgaggattaattttcaggttctgtatctgagactcaagcaccaactaaaactgctgctttcactttcttctcaagttcaaaggcttcaacaagtttgggagggaaagcttcacttcagcccaaacggacaccagtgtccaatgatgagattgaggctgttctggtatgtgaaacttgcttggatattttcataaatttccattttctattaaaattgatcggtgatgctgataccaattatttcttgttgatgaaatgtttagtatagttaagcttactcttccaccaataaagtagttaaacaaatgtatcccttgttttttgaggtagatgaataggttgaatatcaattgggatcagaagattataaattacttttcctcttatctaatatattcaccagatacttttttttttcttgggtttgattttgcatccggcttcataaaattgatgtgagcttaaacttggaaacgaaatcaatcgttttgtgtttgttattgtcttctttactatctgcaattcatttactcatttttataattttcttttggcagttgggtggatgcatctgatctgatgtcatgatatgatggagcttcaaggttgcaatgtattctattgagtattaataaccattttacagtatatcaaagttgatcttttgtaacaattcataattgaaatttatgacaaaagatgtgattttgcattctattctcaaaaccatgatatactcttatgtatctgtctattgattgatataactataattgagagtttgcttgcactggtttatttattttattttgataaatatgaaactgcacattcagtacaaaaatttacataacatttgattgattgttaaacttaaacaagaatcactctgaatccttttggagcagaggttcaaggatagcagacttgggatttttccccggaggtcccttgtctctgcgctgtaactcctccaggcgaaaagtaatcaaccgatcccagtttcctccctcgaaaagaactccagcttttccatcagtgatcctctgaacaataccacagtacatgtagtaaggactattttggttactcacaatggcaatcattccagggagtaacatcggcatatcaggtgctttcgatttctttaagcttatagcttgtgttttattttcaaccgaaagcttttttggaggcgggtttttctctatgaaactctttaaacccttttcaccaccaggaaaccctccagtgagtcccatcaactccttatcgaaaccttcttctggtaccgaagaaatcacagggctctcttgtttttcttcttccttgttgtcatctgtttgagttgctatgtcttcaacattctttctcagctcttgttgcagaccctcttcgccattgcagagtcctcttcctccaagaatttcggagaggttgaatttggcacatggtcttagtagttgttgttgttggggtttgtaaggaatgaaaccaagcttattgggacgattagataggaagtttccaccatggaaatagtaagacttaaaagttgggagagagatgttagaagaggaagccatattggtttaacagtagccacaattttgatggtggtgatgatgatgatgatgggagtttaggaaagagaaagagaaaaaaagaaggaagccattgttgtttgtcactttcttttatagctatattaaattttagccacgcaaattaattgtttggttggattggatgagactcttatctgtgtgaaccaattgttttctttcatttcatgatcaattttgatcataatgaatgatgatacaaactgtttttgtccttttcatttccactactttatgttgtcaaagttatttttttttttaaggaaaaggaagctcttttttttttcttctatccttacctttttttaaatattttcctccaaaataaataattgaatttttggttcaaaattaccataaatttttaattaaaaaaacaactttaggattttttattatttcaaaagaaatataatacttttccacaccctctttaacaaataaaaatatataaaaaaattagctagcaaataaataaataactttag

SEQ ID NO: 36335 - DNA, 8909 bp, Cannabis sativa
  modified_base (7930)..(7931): a, c, t, g, unknown or other
tgcttttcttactgagtctgtcgactcacagatattgtttatatgtgtaggtaaggacaaaggtaaagctgaacaacaatgagcacgagcggatgaaggttgtacatatcgggcgggtagacctgagtattcaatctttgagaaagtaggttttattttggtagtcactagatgataactttagtagttaaatattttgtaatacagatgtaaattttgaaaacgggatcctagattatgtaaagctttttttatttaattttaaaggttaatcaagaaaattttaattattaacctttttccataaaccctttgattagcaaaggaatgcacaacattaagaaatcacaataacacgtctaatctagtagcgtgttacattgagtttcctggtcggcatggtaggatcaagatatttgaggaatctccattatcaaccatttttcgagctaccattttatttgcaatttgcacttcaacgaccaaagggtcgctgtatggataaatgacgtggttagagtctgcttcgttgaaagttatggctggttatccaacacatagttgcttaggcttcctctcttctacgataagaactgcatcaatttattcatattgtaaggctcgagcatacttttctctaaatttgcggaagtctccagtaaggtggggccttaaatgataacctgaagatgtctgttcactagtagaggcattaactggttttgagtgtaatctgtttaggcgtccctttattctttatcaatcttgacgtatttctgcaagttcttattttttctaatgaggaattatatttcttgcttcaagttattgtattcatttgcgtcgtgcccgtaatttgtatgaaaacaataaaacttattagtatcccttttactcacgtctttcttcatgggaggaggttttttgtatgacaccatagactgggtggttgcaaagattgtctctatgtcttctgttatgatagtaaatgtagtgaactttgaggcattctcctgacttgtgtcacattgagatctttttgaactggatcggggacataattatttgtattatttggctggacggtaggaggaacatcttttctgtccaatcctctttcgtgattcagattgtttttaaggtcgtgcatggtacctaatcgatcaaacactgatgtgccaagaggtttttgtgtttgaccagtttgagcgaggggttggcctgatatctctgtctgagtatgagtgttaagctgactatttcctcccaagggacagtctggtaaaatctgcccgtctaccacttagcccacagtttgaatctgtggccttggattggacggtccaccgacatgagtttggggggtatgattagctaaatattctcctgactcatctgtgaccttatgagaatactagtatcagtcgatggttgttggccggtgatttgataagctttttggatcagttttgtggcctgcctggaataattataaatagctgcgtactgggctctcaagatctccatctcacgatccctccactcttcgaactgacatctttgctcattaaaagcaagatttgtagctactcggatatcttgccggtcgtggtgaaaagtgttattgtggcctttcattagccctaatacatctatcaaattctattttttagtgtcatccctgaccggtccttaagtatataaagtggatgggattccaattccaggagtagtgtgcccagctgttgtactggtgtttccagtttcttgaatgcctggagtaaaccctgccaaagaggtagtcactccgtggccgacagtttgtgatcctgtaggtggctgagaattaacctacctagggctgtcctaggtggatctcttgggtttccaagtgtctgcacgctcagatctgtcatgattggatcaactgtatcagtctgattccccctttgagtttgcacaaccattatgtgtcttgtaaaagacttaagataaaaaaacttgggtgtctttgctctcaatgaaagtactaaaatattggccttgcttatagccaacgacagtgaatcttaattaaaacgataagaataattaaataacaatgacaataaagtaaagaaaataccagatttatagagattcagccccttatagttggtaatagcctactctctttttgttgtattgacttgtgagaaaagtgagcacgaacgctctaatctttcttcaaagctcttacaatgatctctcagtagttcactcttagatcgaggtttcactcttgagtgttttctctctaaattaattcggtgttcctgaatagtgagattaaaccactatttatagagattaattacatgaagaatgattttccttaacctataagaaataaaatgagaaactagtttatttccataattacaataaaaaagattaggaaatctaagctacttgcctttatttttttgagatacgaattaatcccacaaatgtagggattgtttccgtgacatgcatgcttggaaataacgatgtccatctctaaaattactaactcgcacccctggccggtgcatgcaagttactcatgtgattaagctggtcggatgtccactagtgaccttgctcggacatcctaccattcatgtatgactttgggtttcatattaatcttcacagcctgctagaatagaatcatttgcccaaattataaaatgtgatacatgtgtcacctagtcagatgtcacatcatagtacaaaaattagaataacataaccatgtttcaaaaataatatcaactaaccactttttaaaataaatattattttataaataatatatacattatatattttgaaaaaaaataaaatatccatatattcataattttgaaaataatatataaaaaactattttttatagtactgattggattttaaaaaattgaagacggatctacaacttgaatcttttagttcatttttttttattttcttttttttttgtcatattttcttttgtatttgaattttgaactcatgaattatttttattgtttggtattttgccttgagatgaactaaattacttttctagggatttaatggaattgtatatgcttatagataagaattaattgtttactcattacttgtattgatttatgcttaatactttccaaagattaattaattttaaaattaaattaataatttaggtggaaatcttgaaaacgaaaatttaaattagatctaatcaatataattttcttgttaatttttgtttagaatagaaatatacttaatcgcacttggttattaaattagaaggctaagcttaatcttatttgtagatttgaatttttgataagaatatgagaattatcggatttgtttcctctatttgtgttgcaactgaagtcattgatgggattccaaatatgattttttaagtccaaaatgaaactttgctttgttacaaatgatgaggtaaaaaatgttttgttttaaatgcatcctgacaagtccccgtgtcttaatgggatgacttcaagattttatcaaaagtattggcatattgtgggggccgatgtggtgaagcaagtcaggtctttctttctttttagaattcttcctgctgatttgaataatactcatattgtcctaatttcaaaaaagaagaacccgataactatgggcgatttgaggcttattactccttgtaatgtcatttataaagtttgttctaaagtgttagctaatcgtttgaaagaagttctctctttggtcttttttaaaaatcaaagtgctttcattccagatcatttgattttagataatatcatgatttcttttgaaattatgaactacttgaaaaggaagcatgttggtaaggaaggttacatgactttgaagctgaatatgagtaaagcctataatagagttgattggaagtatcttcaggctattttacttaaaataagttttcatagtcgtttagtgaatttgattttccactatattttcgcgattagttttatggtcactcatgggggacgtgatttggatccttttgttcctggtcgtggtattagacaaggtgacccactctctccctatttatttctaatctgtgtggaaggtctttcctctcttattaagaaatatgaatcttaggatgatcttcatgggtgtcgagtgtgtaatggtgctcctgttatttctcacatgtttttttgtggatgatagctatatttattgcaaagctacagaacatgaagcaaggaatgttattcggttgttacaagtgtttgaggctgcttttggtcagtgtattaatgcttctaaatcaaccattttatttagtttgaacacctctcaggccactaaagattcactgtaagggagacattctctattttaatttaaattattttgaaatatttttaatttaaattttagcaatttagcccctaacttttactcctggttactcccctggtgataaagttgattgcatcgacataaggaacgtcagttcacaaattgaagctaatttcaatagcttcagctataaactgttgcataatctattttttctagtaggggcaacatattttaatggaaaaacactttttgtaaatccatatatgggtcgtgaccaattcttacttattgtcgtattgatagggttgaaaatttgtgttatcgtgtcgtatttgtgtcagcagattataacacgatatgattaaaataaacacgaacacaacatgattattaagcatgttaaaaattcaaacacgaacgcggtacaattataattatgaagacaaagacgaaatgtaaaaaaaaaaaaaaataatatgaaacctatagcaattaattcgtattattgtgttgacacgattatgacacgacacaattataaaatgtgtaaaaaactcaaactcaaatacgaacaaaacacgattattaaacatgtcatcaaaacttgtttatttcgtatcattttttgagtcgttacccattattgtcttaactctatggttattttattttattccgcttagttgcccttttgtggtcatttctaattttttactttaagatttgagcagctttgttttttattatttttttaagattgccagcctgtagaactgaattgttgtccatttacttaaaaaaataataataataataaatattcaggctaccaatatataaacttttatattaaataattcatctaaatctaaaagttttatcattgtggttttcactttcattggatatataatacgacttttaatttttttaaaaaaaaagtggaaaaaattgacacatatttgaagttttttaagtgtcatagaatttggattactaaatggaaataaaatatttaagatacacagtctaatcattttaccccaatataaatctatgatggaaaaataaacaaaaacagatgttgtcattgggactaatatatagcttagttccaaaattcctaccaatttgtaatcatttatatccattttgttttaagcaactaactaagatatcattatacaaaatttgagatcattgataaaaaagaagaaagcattaatggtaataatacaatagtatttagtaatattgctatttgtgtaaaatagatgaaaaatcaagatgaaggttgttgaagatcaagaaggtgatggatccattggtgtaagactgaaggagaaccataccaaggtctggaatcattatctgaacccacaggagagtggtaaaccccttccaaactcacattaagagctccttctaaatgtgctgattcttctggtaccactccatctccccacacatctgcctttccacaaaccttacttacacaaccacaacaaccactagtcaaaataagattcaacacagcacatagccatagtgataagtaaagactcgtccatagccataggatactataatgtgtttgagaaagtagaatatagaatacacacattcatgttcttataaaatattggttgaacccaccaaaaaaaaaggctgctctatattaattacctgcttgtacccctgtccaaccaaccgagacctgaagctaacctttccaccattcatggagttgccaaagaaaggagcaccttcaatatacctaataataaaaatatatacagtatgcttacttactaaggtttcattaagagagattaataaatactaaagtatatgtatgtattgtttgtaatttgattatgttcttacctgccagcaatacatacgtatttcaattgtggagtgtaaacagcttttgagcaatgttgctccacgtaattgaggagtcctctagtttgatctataacaccttttggaggtggactgatgaataacaataatgatgaataatgtacaaaatgaaaaaaaaatgtaaagtaattaattaagcaagaaattggggaagttacttaattacaggtgaggagttccaagtgtcaagagcaatgaaatatgggatacaccatagttttccatatacacacgagcaagccatcctcctgctgagtgcccaatcaatgataaactctcccctattacatttataaccataaacaatttacatattaatatgaaatagttataaattataatacataccacaacatatatatatatattctttcataattaattataccttgtgactgttccttagcctcttgtatagcttggtcgatcctattcaggtacctgcagtgtataatgagaaaaaaatactagcacttgattctatttctagttgtttgtgtataatgacaataatatagaaagttttttcttcaacatctgtctccccttagggattgtaatatcaatggtaacaatatctctgtttatattgaattttttcaaatcaaatggtggaatgaagatcataattaagagtatttattaattattaccaatcgagaacaggtcgagggcgaagagttccttgccagtaattagggtcgaccaaaccagctgcattgcggaaccaatcgagcctggagaccttagccaccacactgggtattccatgctgtttcagactcacctgtaacttgtggtaatcacccgaattgttccccaatccctgaaataactcaattttcaattaattaatgtcaaaccaaatgaggcaataacacacaattctatgagctaaaaaaagagtaatagtaattaactggaagaataacggcagggcggtggttggaggaggattcaaattcaccacgaatggtattataggaagtagtggagaataaggagtaggtacaggaggatgaagaaaccataatagccattgctagctgccacttattggtttacggtttctctgtaatgaaataagagaagagataagaagagaaacaaagaagtgtctttttacctcatttctcaatacaactctcaatttggaccaaccactcactcactcactctcaccaacatacatatatatgatatatgatccacatccaactactcccacgatattcatttatgattttttttttcaaaaatttacaataatatacatatgttgtacttgtaggggtgttcgcggtggtgcggtttttaaccattttttttttaaactaactcacgcatgcagtttttctaatttctcaaactgtactagtaccgcgaaactaaaaaactacagaaatcgcatcgcgaaaaatggtgcggtgccgtgcagtttttgcggtttggactatcactaaataattaaactatcacaaatataataaagcttgagcaacacttatcaaaaataccataagacttgaaaataaatataaaaaaaaattaagttttaacaatacaataattagaggactttaggctggactttcacatattggacctaaataannataaaaattagtatttttataatacgcggttcggtgcgatttgaaccgcatattaacaatttaaaaccgcaaagcataccgcaccacgcggtttaggaaaaattcaaaccgtcatcgcattgcaaagaatttcaaactacagttttttttttgcggtgcaggcagtttgagcggcttgataaacaaccttatgttgtagtagaatttacacgaatttttaaaagtttgttacctaaatatggtatatttaaatttggccactttttatggcaattttaaatttctaggcttacatatggaattagatatgccataattacgcaaaatatgaaattgcactcttaataattatggaattatatttactaagtttaactgcagtgtccattgatataatcaatttcagtgattagccctccatgtgttggttcgtaattaattttggacaaaataccatttacctttctaattacttctttatcctttagttccattaattcactagtagaattttaattcaagatctcatttgaatttgtgcacaatatttcacttccaaaattaacacttaaaaagggaaccaacattcgatctgttaggaaagtcaggattctataattgtacatcatgttcccaaccatccatattattagatttccaaaacagaagttgtaataatcatcttctttgagaaactttaataagtgaatcaaaaaacctaataacatgaacaagagttcatgataactcaggatttatgttgattaactattgatcatcgttatgatatgaattaggtctttatgataaacaacatgttaataaagactaggggtgttcataaactatccgatccaatccaatccacaagttccatatccgctttttgcgaattggattggattgaaaaatttaaaattcgtacttgtgcagattggatgttgtttgaccctaaaaagtaaccgatcaaattcaatc

SEQ ID NO: 36336 - DNA, 8075 bp, Cannabis sativa
aatccaatccagtcctgcgtaccaaacgggcccttagaaaaaaaaacaattggtataaaagtgtatgaaatcgaaaatatgtatttatattgtaaatactcctatatttgaatatgttttaacacatgatagtgacagaagtaacaaaaatataattttaagtatttaattcatcgattgaaaaaatataaattatataagtgtatgaaattaaaaatataaagcatttatgctgtaattttttttatttttttatttttgtatttaaaatgcatttatattattaatttatttaattgttgaatataaaataagccaacatattagaaatttggagatggataattattatttttaaaagactgaaaaaatagtactaaatggtacaatataaaagtgtattgtgagttatctaactaattattaatgagtttactattttttttttttggcaataatgattttactaattaattaatgagttcattaaagtttataaggacaattagttatgaaatgtcatgtgaagtccatatatacataaatgggagaaatgaaaaggaaaagaaaagatcaattgtataattaatgaaattatattatttgactaaataatacttaatgaattttttttatatatattaccaagaaaaaaacatacagcatagaaagactattttaatttgcatttagctgattatctttttttattttttttttgttggaagtgcattttactgtttagaactgaattattttacttaacgcaatgatgatgctataaaatttttgtgcatattagacactaattatacttaatttttatacatattactttataatcagttacgttcaaaattactatattaaattatatgaagtttgatacttaattacattaataataatttttcatatctctttttaacattttacaattttttaaacatcttataatctaacaaaaagtttgttatgaaaattattatacatgcaaaatctgttttttttaaacgagcaagtaatttttcttgttgaacaatagaatctattaattattataatcttggaattaatgaaaaaaaaatttttaaaaaaaaactaatattttctaacaaagaaatgctaaaaaatattattattattggtattccatataataaataaatatcataatataatgtaataacttttaaatattgctaaacatcctatgtacaactgtagaaggtgcaattgtaaagaatataaaagaaaaagatgaaatgagttgataaaagtcaaaacacatcctgcattagctttttggtggagccaagattttactcacttttacaatcattggcttaatttaaaattacaaagtacagcggagtcttataatcaattgaaattacactaataccactgctcatgcccaatcagcgacaaagaaggtgcccggtccctccaggcgcacgttagtaattatgcccgagtacccgacacgtgtgagccaatcagggccatgtcattttgaccaacctccgctgccgatcccaggaaactgcagcttcatttttccatcactagcgtcagttatctgcatccgactccatattaagaccgtaggctcgcgcagattcttgaaatcattcggtgaaaaatcggcgactcacgtgagtgaggtgaacaccgatgtacggaatcggtctaactgagtgggagggatgaaagtggaaaaagtaatgaagaagtggggccaatgaaattataaaaaatatagaaaattagatccttagcgatgatgacgacgatgatgggctagtcaacgacggagccagctcaaaaattaacaaacagatcctttctcctaagtccaaactccaaagtcctatctcttctcctttacttcttcttcttcttctctctccattaacgacaccctgagatttttcagagggaactcattttgcttttggagtttctaacgaggggaagaaaaaaaaaaagaaaaactgaactttcttttcacgtgaaaaagcagagttgaaagttttgacttttggagagtgaattaacggaaggaagaggttgtttagttcagatactcgtcggagaggccattttcagtaaggtgagcgccataataatcccataactattttgttcttattttttaaacgcggaaagagattacagggcgtttgggaggacataaacttgtttggattcgtgggaaagtaacggaattgtggaaggtggggctggtaaggaatgaagtgatttttttctctctttttttcttttttcttgttgtaaatgataaaaaagaaacggagagagagagagagagagagagagtaggtattggtggtgaattaaatggggggagttgtagagtgtagcagtagagatagagatagaaagagagagaggaagaaagagaaggaggagatggggttagttaatgaatgctatttattaattaattgaaaggagccgtttgttgctctcactcaactctttctctctctcgcccagaatttattgcggagagagtcgtggaaagcggtgtgcccaacccagtttacttttatttcattcttaatataatatatttatttatgttatatttgttactctcttgttttcttcttcgttctttcactatttggtcctctctagaactttttatcattttctccgttctctggctgtctacggtttatggtttcagcaaactcacatctatatttgctcctggggtagaagaagattccttagtattatttttgctctaatctcaacagattgatataagttaaaagggttttcttatattagtgttgcagtgcttcttaaggtaagagaatacatagttcttctcttctagtattctcttcgtcatatttgattcaggaaaaataaaaataaaaaatattaaaggtactcacttttttgttcttatatctcacaattttttttgggtttcttccccgctcttctttctctctctcacttgggtgggggttggatctgatattagatctttcttattctttcattttggtttttactggttcttccgcctgtaaactaataagactcacctgggttttttttattataaaaatgttttttttttttacaactaagattttttttacccagttggatctgataattgctagctacatgacaaaagaaagaaatattgcgtaagaagacaaccttagttttagaaatttccttgtgatttacattttcagtcatagttttgttgttgaagcgtaagcttttcaaaagctccaaactctctcctgtcttgttgtaaattaagaactgacttttaagattccccactgttaactcaaagctttattcatagtctaatgtatgaaatcttatattaattttcatttattttcttcttcttcttcttcatcttcattttttttttttggttgaggggtctttttgaaagtggacatggacatgtttatttattttcactttaaaagtaaaagttttttttttttcgttatgaataatttttatttattatgatttttagtttgtaatggaaactgtggttggaacttatattttgtctgggttttctttatttattatttttagttggtctgattgctgcgtagttgtaatccacaattgttttataaaaaaaaatcaggtaagctgttctttgagtcggccataaattagtttcttatatatatagtagttatagtttggcggcccttttttctcgctcaaattaaatattgggtgaaattaataatttcagacagttttgataacttttatggtcatatgtctgctgaatttagtgattagcatcacttctgcatctgagattgctttcaagtttgataatttagtgaagtatattctctttatgtttgtgctcaagtaaatttcgtattcctgtctttatttctctttcaattccttttatcattttttttcagtgtgccatatctgaaggttttttaacatgtgttttcgtgtattttctctggcaggattcatgcttgagaatttcccttcctgtagctctgaagattctattgtcagtgcacatccataacccatgaaacttggtaattaacatttgactattttagtttgttctatttgaacacttctcactctggcttctttgatatctgtaatcaaatccttttaacagtgagctaggaatatatttaatagtttattgactattattctttaatgtattttcaaagaagaaagctatatatatttatgtatcttcaagataaagtctcgttcatttgagtactcatggttttcaactgaaaaaggttctaacttgaatcaattgggatttttgatgcatatgcagaaagggaatctgtgtttggccatatatctccgggacacaagcctgatagcaagttgttcgattacaataacatctctttggaatccaccgggttgaagtcgcaaagcatcacaaaagatggtcaaaatcggccgttgtgtgattttaaggacaacgagaaagatgctgctcagttaatttacttgatgaatgatgaaggtagtttggctgcatcaaaagttgattgttttaataaggtggatgatataaacaatcaggacgaatatgagattgaagaatttgcggctccattcaccaaatcttctttagaaataaaaaacggatcaaattattatacagacaaaagtgttatggaatgtgaactgccggaacttcaagtttgctacaaagagagtggtttcagttctgtcaaggacatctgcatcgatgaaggagtgccgtcccaggacaagttcttatttggaaatggtgaaaacaagaaagatctttgtacgtttgtttttcctgatgcagatgaaaatgaacaacacagtaaagaacacatggatattggcatcccaagttcaatcgctttaaaatcttctgtcaaaaatcagtcagaaaaagaatttgtcgtggattgtgaatccaaggatttgatgccgagaggcgaggtgaaatgtgatgcacccagtgataaaatttttcctgaagatttagttatgatgagggagttatgcatagagaatcttcactccaagtcttctagttgtgatggcattgcatctgtgcaagttcaggtatccctttttttaatcaataggctctatgtaatcatgtatggctatgcactttgccaatgttgtgaattaagtctcttgttgtttggggactacctgtttggagtttacacgtaacatgttagtagtttaggatctaaacatagtttgttactcagcaacctattaaaaatattgttcctcgttgaaatttcagttctaattggagctatttttaagctgacagtttggagtatacattgtcagattaaactcgaagctttttgatgtgttagattgtgatgtatgcaattaatttcaatgcagacatcaagtgacaatgcaagtgaaacaacacagatggatagcatgggctctgctatggcagctgagaagctagataataacatcgaggaagaatcggaaataccatcttctctatctgcagccgaagaatcatcaagtagcagcagccttgacaaccagttatccaacaatagtaagaaggagaagggaagtagtactggtgattttgattccttagtttctgcaggcactacaaaagaggagtgctctcacaatggcataagtgaatgtcttgaaattgaagatgcgtctcccgttgatgacaggatggttgttccagaccaagttcaacacaatcgttcttctgttaatgtaactagagaggaggatctgcaacatggtgtctgtggaggcgacaaaactccgaacacaatggttgaggttgagagtgagacttctgcaatgagctctcagcaagaattggccacagaggagtgctctcaccatggtgttagtggacgtaatgaaactacaaatacttcctcggttgatgaaaggaattccgagacacagaatgtttcaagcccagtcgaacatgtcatggataaagagtctccccgaaatagtgacgctcaccaaagtcgagacatgcccatgtttgaagatgggacattcggtgcacatactgtttcgggtcaatttcattatagccatggagagtccagtttctctgccgctggtccaatgtcaggtcggataaattattcagggcctataccatattcaggcagtgtctctcttcgatcagatagcagtacaacaagcacacgttcttttgcctttcccgtgtaaataatataaactcatattgctcttcatactagtctattgttcatagatcaaatgaattactaacaatgcaaatttgttgaaattgttgtgcagattacagtctgaatggaatagcagtccagttagaatggccaaggctgatcggcgacgttttcgaaaagataagggttggaggcagggccttctttgctgtagattctgattgcttcagttcttccaatagatttaattaagttcaaatatatataaatacataatataatatacatgatccaaagttttctttatgttacttgatcattaatataagtcaccccacctttctctgtggtattggtttgtatgtgcagtatttttgcagtgtcatacttttgttatccatgaaagttgagatgtaagcaaatctttatatgtcatttggaaattgatttctgcatcacccttatattttaactgactttataggttgtctgtatttcatgaatatttctagcgagtgtaccaatttaagtgagtcaccaaattttgcaggcttatcatgtaacagacatggtctttgttagtggtacgtacgtgtatgataaagtttcacatatactcgtgtagtatgaataaattttgatagaacatgctaccaaatctacaaaagtactgccttcttatcaatggtatctctttgcaccattcaaaatacttctgcaactcaattattgtcactaaaacataattaaagaaataagtgcttagtactaacgtgggttgtgaatttcaaactcttaattttaattgctctactaaatacaatgagtcaaactaacagagtttgaacacaattcacttgtgaaaaagtgggatgctgatcaaaatatttgcctcaaatacccaaccccaccttttagtttgctttccatataaatcatatcccagttaatttccttgcacacaaaataccgtttaggagtgtttatcaaaccacaccacaattgcgtattaaagatatggttcagaactttttgcagtgcaattgcggattttgaatcatttgtgcaaataaagtacggtgcaaagacaacttgccatttcataaacagttgactctttttctatttatttgcaatttgtttgactttgcaatctactttagtatatctactctatctatattatctataagggacatgattttgtcctcttatgccaaataagagaatacaatccttgattgtactgtagccgttagattatattggggcatgatctgagggctggggttaaagtagtagttagggtataaaaaatggtaacgggttggtattttattttaaaatatttatttttaaaaaattgatagtgattgatgtagtgacagttaccatttttcaaaatacatttgtctttccttcttcttcgtgggtttgtgggttcgtttcttttagggcagagttttcttcttcttcttcacattttcttcttcttattcacattttcttttagggaataaaattattttaaaatttgggggaggaaactgtagtacttttggacttagtgtacttcgttttttgtgtctccggctccgtctccgaccgcggtgggtttgtacaagtaagtgtctccgaatgtacaatttttcttcttcttttgcatcttgttcattctttagtttgggtatgtgaaaatttgtttaacattgttaaagaaagattaaaactttggtaaagagaagtgttgttcttcaatccgtgtatgtgcatttcattttgtttttctgttccatttttggttta

SEQ ID NO: 36337 - DNA, 3088 bp, Cannabis sativa
ccacccaacaatcattgataacttttaattattgtgattcaggtaatctactttgaatattgctttgctttagttggtaatatgaatctgggatatgtatttatatatatatatggtaaaataaatctaagttcataatttcaattggtggattctgccacatcatatactcagaagtgtgatagatacaagtctccaattggtagtaggaatagtgattgcagttactattattttgttagtcaactatgaaaaagccattgaatatattaccattttcatgcatcaatcattaattaaattcttatataaaaaaaagcaatgaacagttacatttatagattgttatccaagtccagactcagctccttttctatcactattattattattaagaataatgatatatgcacccaaaaaattaagagatcagtcaaaacagaaagttgatgtaggtaaaaaaaagaatggtatcattcttcttttttcttaatgttattgtaaattgatttcatgattctattgcttttttttaaaaaaaaaaaaaaatcgcgatgtcccatttaaataaatgtgattggttattaaaaaaattgtcacattaacatgtgtaataatttcttagtagatattttgaatgcacctacatatactgttactttattgtttgattttttttttaattgatgattataattacatgctttttcattcaggaggttgtgttacttcaggaagaagttacagaaagcttggtagtcatctggaagctttgttagtaaaattatggccaatttggatgggtcttcgtgcaacttgtcttccgtaattgtagtgtctttcagatagctaattgtcagtcaaggatgttcatctgggaaaagcacttgtaggtatctgaatagcttttccgtattaaagtttctagattgtttgtactaaaagtgcattctcaagatgacgtgcattactattgctagtgttgagttgaagcatttaatacgatgtaaatataccacatagtttcagagctaatttaggtaacaacacaaatctataaatagctatcaatatatttttgtaatttgtaagagtaaaaatcacgatagtgtaaggttgagagagagtctaaactagagagagaaacctttctcgtaatctctcagagtttgtgaggattctcccttgttaacagtgatatcaataaagatatggctattgccgttccaaccgagatgtagagcatttcatagagctcaaattccttaaatttggtgctattcttttctgtatactgctttaattcattatttgattcttaagatctcttagtatattatttcttgattgtgttgcgtgtttgttggttcggtatactaaatctaagtcattgattattttcttttcgcacaacaaactggtattagagcaatgtttataatcatgattgccgctaaatacgatgtagaaaagtttactagtacggatgactttagaatatggaggatgaagatttgttcgttaccaagagttgtatgaggctctgtttggagagaagtctcttcctgatctgatatctaaaaaagacaagaaagaaactcttccaaaggctcatagtgtgtgatcattttgaattttggagataaggttctgagaaaggttccaaaaaaagatacagccacgggtatttgactgaaacttgaaagtttttgtatgactaaatcattggtgatcaataggttatatctcaaacaagctacgtattcattcaagatgatggaggataagtctgttagagaacacattgatgagattaagaaattgattctcaatcttaagaaactacaacaattttatcaatttgcagcggaccaaattcgccgctaataatagaagtataagcggtagaccccactagccgcctctaatagtgttttttattttatttttttgaaaaattattagtagcgggtggtccactgctattgcctgccgctaatagtattagcggcggggtccgctgctaatacccgtcgctaatgagtgggcaagaaaatactcgcccttacagttctgaataatattagtggcagaacccgccactaataataatgaaaaaacataaaataactgatcgtctttctccatttttcccatttttattctcttaacagttttttcccatttccctctcagccattttccctaccaccaccaccacccatcaccaccacgacgcaccactacaaccacgacgcactaccaccatcacgcaccaccaccaccaccaaatattggccaccaaaacccatttcatgtatgtattttttttttattttatatttcaaattttatattatttgaaaaaatttagggatatatattatttttaagttttaaatatatattgtgtattatatatagatctatatattttagttttgtgtatacatgtttaagtttgtgtatatatatacattatatacatatgtatagaatgtatattttttttttatctatgtatatatgtatatatttgttctgtgtatatatacaatatatataatgtacatagtttatatatatatattttgttataatatttttcttatatttttattttatttctattattaaaaatattttatttttgttatcttcagattaggcaaaaggaattttagtaggttggagaaggtgtacacaaaatttcttttgtgaaatgtatgtttttattcatgtatattttatttgttttattttagattgtatttgatttaagtatttttttttttttgaatatgttaaaatgtaatattatgcttgtaaaattttatcatcaataaaatttaaaaaatttgaaataatgaaaaaatatatataatttattataaatttttttaaggaaattattccatatattatttttttaacttttttttttaaatttacggtttgggttactaaagtgatttctccgatggtttctatgtggattgcaatacggattttgattgcaatttaagttgctctcttagttgaaatagaagtttctatgtaaaattcagtaaaaatacaaaaaaaaaaa

SEQ ID NO: 36338 - DNA, 9067 bp, Cannabis sativa
ctctctctctctctctctcgtatggtattgagaattagttggcactgatacttgaatatgttcttttgttagcttctaagtgaagaggtgtttgatttctcaaggggagagatgactcaaagtaagataaaggagcttaaacaatcattgaacaggtaaatagtttatgtatttatttcattttgtgttgcagttcatgtcttttgctgtaatgttcttgtttcatgattgctcatttttttacagtggacatatttgcgtatttatatatttctaaaaaaaaaagaacagttcttttagttgtggttcgatgagaagttattatgcaatttttgactttttcagttatttttaatcactactatacacattttggcacaatgtccgactgttggactactgatataagtataactgtactgccaagttcatagtcatcttatgcttgggttttattttctaattggcatgtcacatgctacgttagtgatatgtttatgtatttttccaatctctcatacaatgtgactggttgttgcagtgaatttcagctcattcatgagctatgcttatatgtactgtcagcttctcaaagaactgagcttatacgtgcaacactgtccacattgcatgcatttctctcatggattcccctgggatatatatttgagtctccattggtatgtgctctgtttgatacatggctgttttgctgcttttgaatttaatacttaacatccttacaagagtaagtacaattgagcaaaattctgactgtgtttgtttacataacagctagaaacactgctgaattttttccccatgacatcgtatcggaatctcactcttcagtgtttgacagaggtttgtttgtattctgattcatttaagacttgcttcaaaattgtgcctggttctcacagttcactgtactggtgtttaggttgcagcacttaattttggagatttctacaatgcccagtacgttaagatgtacactatattcatgaaactgttacaggttggtccaaaataaaatgcttattgtagtactctatttggctggcttattactcattacaccattctacaattttttcttttatttaattgtatgtcttcgcttgtgtttctattaatattttttttcctcctctggcttagaacattattcctcttaatacaaacattcctgaggcttatgcaattggttccagtgaagaacaggtaagtttttttttttttgaggcttcaaaactcaattttttaattttcatgtgtttgtacagtaattgttacttattggcaatttttttaactgttactattcttcaacaggcttttattcagaatttggctttgtttttcacttcattttttaaggcaagtttctctttcccttttatactttcctggtcttaatagttaagacgttttaggcttactttaaacagcttaatgtgtcattaggacaattcttaatggatttaattagatagcacgcattcacattaattcttttcaaacctcaaagatctgaagttactgctcaaatagattgctatattcacttcattatatccttgtgtgcagtctcacatccgtgtgctggaaactcctggagagaacatagctgctttgctcatgggtgttgaataccttaccaaaatttcatatgtggatgacacagaagttttcaaggtaccaatatagtctaaactcaaacatacagtgaaatttgccaaaatttattttaatcatcttatgattgaaacaggtttgcttagacttttggaattcatttgtgttggaactatttgaggcacaccacaatttggataatcctgccgtgacagcaaacatgatggggttgcaggtactgtgaatgtcacattcagattacatttgatagtttttggtgtgaatttctttttcttcatatgtccgcacagattatctttctattcttgcagtttactgtttttctttggtatgttggattcaaatttatttgatttttttatttctttgtgttttccacgatacaatttccttttcaatctgtgttttccatgaaaattgtgtttcgaacctttttggagcagtaggctttttttttgtgtgtgtttgccttagctgtatttttctcttcttttgtagactaaatggttggagatagtaatatataaactctttagttatatgaccaccaattattttgtgatctgatctatgttaattattctagtttatgattattatactatgtcaaacctttggttactaggacaataactttcaatctcctctttgtttgcatgattctttttcattaatatggcatatctttttttagaagatttgtattggagcacgcttgttttaccttattttaaattgaataagcagatgcctttgctacctggcatggttgatggccttggatcacaactgatgcagcgacggcaattatatgctgagccaatgtcaaagttaagattgcttatgatttctcgtatggctaagccagaagaagttctcatagtagaagacgaaaatggcaatattgttcgtgaaaccatgaaggacaatgatgttcttgtgcagtacaaggtcagtaatctatgctttgatagtaattttcattagaagcaagccttacataacttgttgcaagtcatggttcatctaagaaaaatttcctggtatttgaattcatattttttttttactttcttgatttttatgttttatttctgtatttatttttctgccacttttgcatattttaatgtgtttttggcatctagcttctaattattatggcaactatctgtcacagtgttctgactttggttaattattgttgcagatcatgagggagactttgatatatttgtcacatcttgatcatgaggacactgagaagctggtatggatttattattccatatgttctaaaccccctgcactagcacacacacattctctgaagaaatgcaacctatttttagtggattttttctattcatgtggctggaacatgggtgtcaatgatagtgaatagtttgtgggacaatatgagtgagggatgtctttatagtcggttcaatttaaaattatattttgcatgtataattttaacagagtatgtagttttcgtattgtcagacacttccagagaaacagtgtcatttgcttttgttaaatattatgctcataaactctatcttacgctgtctatccttttttgtatgatgcagatgctaaagaagctaagcaaacaattaactggagaggattggaattggaacaacttaaacacattgtgttgggcaatagggtctatctctggttcgatgatggaggaacaggtacttttccttaacttgccttatacatgttatttctattcattttctatttgtgatcactgtttataacttctgattcaactagaaactcaaatgccacaaaaggaagaaagagaataaggaaaaagctagaaaatcatcattcacttctctagatattgtctataccctaccttatttgtggtaatagtttatattttaattccgatcaaagatagttggctaagcttgtacttcatttccctgtgaatgatagttacattacatatctttatagatctttgagggcgcatgtgcatgattctgtccttttctcttttttctgttgagaaggtgcatgtttgtcttgtgatcatggggtcttgatgtagagcatcaagaactgagatatcacttttacgcgttttccgtgtaggaaaatatgcgggtttgaataggagtttatataattatttttaaaatgctataattgcccttgcctgttccttgattatgtatttgccagaggtccaggtatgtccttcatatttttatgttggtttactttttgcaggagaacaggtttttggttatggtcattcgtgatttgctgaatttatgtgaaatcacaaaagggaaggataacaaagctgttattgcaagtaacattatgtaagtgttcaagagtgaatgttcgagtatctgtcttgaagtggaatgcatttagtttgtcaggccttaccacatcattccatcatcctgcttctttagtcatttgtaaaaactatgaactttaacgtcacaatgttaattgatttacttggaataccatgagaaactttgtgccagatgtacggccagtagttttttctgaaatcatgtacataatctttcttacctctttctgcaggtatgttgttggacagtacccaaggtttctaagagctcactggaagttcctaaaaactgttgtcaacaaattatttgagttcatgcatgagacacatcctggtgttcaggtacatgttctgctcttattttcttggtcagcttttataagtaaaagctagtaggaagttttgcctattaaaattggattgcttggctatggaagtgttgctaaaactttgtgttcccacatttcaggatatggcctgcgacacattcttaaagattgttcagaaatgcaagcgtaaatttgttattgttcaggtaacatttactttgagatactgatttttttatttttattcagctgtgggcagttttcggtcttttatgttgggttcagttatatatacagaactaagctaaaatgtaatatgaacaaaagctaaaagggaaactagagtggattgttttgttaactcttatttgctctttttatttccaggttggagaaaatgaaccatttataagtgaactgttgactgtccttccaaccactgttgcagatcttgagcctcatcagattcattcattctatgaatcggtaagatttttcagtcgagctattttctttattttacataaaacagtcagacacatattctaagtttactgtggtttgtttcaggttggtcatatgattcatgctgaatctgatcctcagaaaagggacgagtatctacagagattgatggagctccctaatcaggtaatttaaattttattgatttctcttgacttatttacttgaattacttccatttgtgtttttgttagatacttaatttttgatgctattactttgttattcagaaatgggctgaaattatagggcaggcacgcttaagcgttgatttcctgaaggatcaagatgtgataaggacggtgttgaatatattgcaggtatggttttcctccaatcttcttttctccatatatttaattcaatgttgctctttgtataattttcagggagcatcattttttgttccctctcttttgaagtgaatagcagaattttttattgtagtacgtcaaatgtttctgctggatgctgtgtttgttcacagagcaactgctatgactattagagaagtagtttgttgttaatttgtgtgtatcttgaaattagaacaaccattggcctttcttggttcaatgaatttgcacatttttaaataagggatacctagttgcaatgattagtatttaatgactactcgaaaatgttgaaatttgcagacaaatacaagtgtggctagctctcttggaacatatttcttatctcaaattaccttgatctttttggacatgcttaatgtctacaggtatatcttcataaatagaatttcctaatattaattattaactagcaacagattgtttcttttctaaaacgtaactacttttcccgactcaacaggatgtacagtgagctcatatctaacagcattgcagaagggggcccctatgcttctaaaacttcctatgtgaaacttttaaggtcttattaatttctagttttttcttttttcttttagttataagtttctacgttagcttgttaatcattcttttactgtaagcaggtctgtgaagagggagactcttaagttaattgaaactttcttggacaaagcagaagatcaacctcaaataggaaaacaatttgtgcctccgatgatggatcctgttcttggtgattatgccagaaatctgcctgatgctagggaatctgaagtgttgtccctgtttgctacaataataaacaagtatgctaccttcccccatttctttctttgtctatctaaaattacaaacttactactcatcctgcacatgataggctgttttcactcaaaaaagatgtaatatattgttcttcttatgtgtttaagtttgattttattgcacttaaggatccttttttatgtttgtcttgttctctagatacaaaagcgcaatgacagaagatgtgcctcgcatttttgaagctgttttccagtgcactttggaggtaaggattggctgttttgactgactgctaataatttgcagcaaaaattatttgctaattggctgactgctaacatgcctgagatgttgctccctgcagatgattactaaaaatttcgaagattatcctgagcatcgtcttaagttcttctcattacttcgtgcaattgcaacacattgttttgcagcattgattcatttgtctagccaggtctgcacacaaacttttttggccagattatagtagaaaattttgattttgttttttaatcatttgatctgacccagtgattttttttttcttcttttgggttggtgttttttatggtgcaattttcagcaactaaagcttgtcatggattcaattatatgggcatttagacacacagaaaggaatattgcagaaactgggctaaaccttttactagagatgctaaagaactttcaggtgcattttctttaaattgatttattgcttttcttcatgattttgtcgcataaggaatcttaagtgcaattttttcggggggacatatttacaggtttcggagttctgcaatcaattcttccggacatacttcttgaccatcgagcaagaaatatttgcagtcttgacagacacatttcacaagcctggtttcaagttgcatgttttggtgcttcagcagttgttttgcctggtactaatactacatctttatatgccctgttttttttcgtcaagtgcaggagtttttattacaaattcaacttacactgaaacttcatatcctttcaggtggaaactggcttgttaagcgagcctttgtgggatgttgctaccgcatcctttgcatatcctaataatggattcttcattcgtgaatacaccatcaaactcttgagtacttcattccccaacatgactacagctgaggtatgattccccactcccaactcgaattgaaaaaaacaaatgagttgcttatgactgggtttgttttttttttttattgcaggtcacacaatttgtgaatgaattgtttgaatctagaaatgatatctccaaatttaaggaccatattcgagactttctcgtacaatctaaagagttttctgcccaggtaaactaaattacagagtacagtaaagtgtgccgtgtgccattgctacaaatctgattgtgcttaaccttcttaacaggacaacaaagatctttacgccgaggaggcagccgctcagagagaaagagagcggcaaagaatgctctctattccaggccttatcgcccccaacgagatccaagacgagatgttggactcatagttggtcggtagcctagctagtttttaatggaggagcctaatttgtgtaatgaggcagagttgttgctgtggtaaggtggtggtgagccttagattcatatttcattctcccaaaaatcttttggatatgaagaaccaacaaatggcgattttttttctcccttgttagtttccggtggtggttagaacttagttcttcttccggaatttttttttctctagtgaaaaagcggggacaccccccttgacgcaccatggctgaatcggaattggaattggaattggatgatggtgtgttgggtgtagagtatttagttgctgattttaggaaacaaaaatatatatggagagagtgagaaagagagagagagagagagaaagtcattgtaaggttttaaatgatataggatgggacaagtacaagtacgatgcagactgttagtattttgattcgtctttagggggtagtagtagtagtagtagtaagtaatatgtatactaactttggcctagtttgtgcagatttttttacctttttttttccttgttatttattattcatagggtggtggtggtggtggtgtggtggttggtgggttgtgtgtttttctttctatatttttgtctcttaaggaattttaatttttttgtttacttatcaacgattttagttaaatatatataattttttctctctttggttaacatggtttggtgtttggatactgaattttgggttcttggtggaaatttttggtcgaatgattggccaaaaattgatcaggcttttgggatcctttaaagaacagaaagatctaaatcaaagcaagtgcaattagtaagatcatgtttctatttgcacccaaaaattgagccaatgtgctgcatattaattttcattctaaaactatataaacattactaaataatttaatgaatagtgaaaagttataaattagtttaagtcttgacaataatgtaatttgaaaaagtgatatttgttacttattgcaaaatgtatgtttagtgcttgtgaatgcattaaatagctttaccctataacaagccaaattttggtactttgcttagattagtgacatttataggagtagatgttgtaataaaacaaaagcaagtagttctaagatatcaatgcatgaaagcatgtagacattattattatgctagataaatatatggttgtttatagtggagcaactccttgaagttctttgtactgtatgccaacaacttttgttgcaacctctcttagtacttgtacattctctatcattttcttgacgtaagaccacatccaaacaactttccattccttgttttgtgaatattccatcctcaattttgatctcgaattcccacacatcctctatcatccatccattaatcatatggtcaccaaacaatggcctacaaaccataggctat

SEQ ID NO: 36339 - DNA, 3244 bp, Cannabis sativa
acttaatgtttaattataacaattatgtgagcaataacttttctcgattttaatttactaaaatttactttagtagtttgtgtaagaaaaatgtaaagggtaacaatagtgtcaagcatcttcctatgtgtcaatatcgctattggtccaactaaatatcgggttccatataatttatataatagtttttagggagtatcgctaatcaatcgtaacgcaacatgttgagaaagtgttaagcaccacgggtgcttaataggtatgctcctttagtagtttgtgtaagaaaaatgtaaagggtaacaatagtgccaagcatcctcctatgtgttaatatcgctattggtccaactaaatatcgggttccatataatttatataatagtttttagggagtatcgctaatcaatcgtaacgcgacatgttgagaaagtgttaagtaccactggtacttaatagcaatgctccttgagtaaacaagcaccgagtgggtcaaatgatgaacagagaggcatagaatagcgcatgcgcattaaaggtgatatatatacagtttcctttgttgactgagtgattgtcaatgtttcgtccccacacgttgatcttatgtgtgtttgtgtttgtgattaaagcacaaaactacccttactcattgctgttgccggctttgtgtgctataaaacaatcaacccaccaaccaaccccgctacgatcacgtttcccattattcaacctcatacgtactcatgctactcactcaatccatcaccatctctaataatccattttggctttttcattcttataaaaacccaaaacaaaaactatttaaaatgtacacaagtaattattctttttaattaaataattatactaaaatttatcaatatttataataataataaaaataagatgacttgttgtagctgctcaatatcacttgtttccttatctcttttcctctctttcccaacccccactccaaaagcctaaaagaaaagaaaattaacacaaacagaatggaaggctcagctgaaaatagaggtccacgagtagttaccaaaggtggagaagtaggggatcggacggttgagtgcgctgttctagatgtatccaagcaaactcaagttgagaattgtgccgctactcccaaacttcctaaccactgtaatggtcttcaccaggtaccttacttaaattcaccatttctgtcacctggctcaacctctatagctccataattaatgttttcattcattagggtgatagagtctagagagagagacacgtgacagtatattgtagtcaaatgattaatccagaacccagaccataaaactctagggctgagatttgttcaactacatccttctccacgctaattaaggtgtgcctcatctaatgtccataataatatatttacaaaattaaactaaactaaactctttaagagaattacttacttagagttaatggtaatgaatgatgtggtctgcactttgcaagtgtgtgtaatcacattaaacaaaacttgtgtttaatgttgggacttgggatattcaatgcagaattaatgggcatcttactcagtgagtgtagataagttaaagcaactccattattttcatattaaatgtcctgatgagactcacttgccatccaatccaatcccttcatcactcatcatttaaatactattttcttttatacgagtcaccactcaaattttattttattatgtaattaccttttcttttattcgatccttccactgtttgaactatttgaattcgtttttctttcataatataaatataaaatatacctaattagcatatatttcaactatttttactgataattcccttattattttattttatttttctcaataaaatgttcttttgtctttatatatcaaactttctcaaatcttgttcattctttttgctctctctttttgacaaacaactctgtccctcatcataaacaaaagttagcatgtcataaggagctgaatagtcatacttgtaccactattttctttttttaaacttacttaaagattactctaccttactaaaagaaaaaaccaaaaatattgtatatgcgcagtgcactcaaaatatgtcatgacattatacttttagtataaagaaaagatatttgaaagatgaaaaaaagtcggtgagggagaaaattaaatagattgataagaaatagaaaatgcagatatcttcattcttattccttacaaatctaaataaataaaattcttatcttgtttgatatcaaaaaaaggaaaattcattcaaaaaaaaagggaaaataataatgtaaaatagaataaattcatttaaatttaaagtaattaaagataaataagtaatttggtttaaatatatatcataagaaaaattctctcctgccaatttccagcttgtaagttagcatataatttagttatttaagatttctttttttctaaggaaatatatattatttaatcctacagatttcaagcttgtaagctgtaagatagactatgttagatcacaagtgcaaagcacgtgatcactgtttatgtgtaattttaaaatcctccaataaaacattacttttttttttttttgcaagactaaaatataaataggggcataaaatatcttcttcgggggctagcaggttatgacaaaatttttacagatgttttttaaattagcacgtgagaatatataagctagatcaaaaagctttcaaagtttcacccgaaaaaaaaaaaaaaagaagaaagaaagaaatgaccgttatttgaggaatatatgtaatgcgcctttgacgagtctgaaacagcctctggtaatattttgagctttccttggtcctccaatggcggagattatttaaccaacaccaataatcgctgtctttccgtggtttgtcctttatctttcagtctcctttataccgttctcattccagactcgtttggattttttttcctttgatattcatttctttcctgagtgattactttgcttgctatttcgttttgaagtattagttcaaatataatttattgctgggtttttcattgtcttttttaatttcccaattgatcttgttttatgtttaacttgagttcaattttgagatttaggtttaatgttgtggatcatgatcatgattccttctttccttacattaaactctttgagctttgatttgagccaacgaaccaccc

SEQ ID NO: 36340 - DNA, 3322 bp, Cannabis sativa
cagttttatagaacatattttttaaaaatatttttacttttttaattttaaaaacaaaaaactgattaaaaatatattaacaaacgctacctaattttctttttttttaaaaaaaaaattttttaccttacattaatgaaaaataaagggaatttcatcacaagtatgttaaaagtataaaaatagaaatgaggctaaacgtatatatcacgagacgtatcgctcctcttggcgattattcactacaatacatctgtttcacttttatgcatgtggctaataatatgagcaattaaatcgtatagtcaattcaatcgatttaattgttcacctttattattattttctttatagtaaatgactagagagcacaaataattattcattgacaaattatgaagctcatattggaaaacattaaggctacctaagttaaaaagaaaaaaaaaacgcgttcatcaatatttgcattaattgaatcgtggaaatgagcatttataatatgagctagagctcataaattaacttgtatgttacatatatagtagcattaattatttcaaggaaatgacttgaccaataaattattttgtataattaagacagatgaagagggatgatatatgaatatgatgtggtagtcgtaggtaggggacgttttcatgatttttcacataatagtattagtttttataaatagttcaacacctatctgaataatgttatcctaccctctcttctgctacgtcactatgactcaattaatccaattcatagacgtgaccatgcagcggtgaatgctgaattttgcagacccaatctactacacaccacacccactatctccatcattctctctacgtgtgattaaccctgcacatctatagtagtctttcttattacatttttttttttgtcagaatacagctttctctatacctacaccgttttgttgcgtgatatagtttcacggaatgtattctacattccgtagtatattagatggtctcaggatacactagatggatctcaaaatatgttattattttttaaccttaattacccctagatcaatctcagctctcagatcaaataactcctcatttaacggctgttgtacatcacgaaatatattccgtaaaagtacatcaagagacaaaattgtgtcccatcaaatatattgtatatatatttatatgataattctgtattggtgtgagagtgagacggactggaaatacaacagatgtttataaaataaataaataattaatttagagtgagagttcaacaataatgtacattattcgtttttttaaaaaaaaaatgtacaatacttcagattatatggagcttacttccgtacatgtaaatagaattgtaaataaaaatttatgtgtggaaggcacatatagagttacgtacttatatgtgtaacagtaacaaagatatgaatctatatatatatatatataagaacagtgcgtagtgatataattgagggtgtgagtacgaaactgtggttttgtttacttgctgtttcgtcaaaatatgtatacatataaatatttatttattatgacgttaagctactattttcatcccttaaattaggggaatgggtttgatgtgtacttattttacactcgtacatgcctttacagatgatattttattcattttcattatagccaagaaaataagttaagggcgatgcaaggaaattattacatgtgacaactttttaattttgtggccgaataagattgccgtaaataccactttctttgtcaaacactgcttttttatttcgtagaacatacaataataataataaaaaagcattgtaattacatgcatttatgtatgtatatatacgtgttatattatttatgcataggatcagtcttttagaaattaattatttaactttatatcagaaattgctttactctcctccatacatctttttattacccttgtaataaagaaagcaaaatatttattttatacataaacattgttttaaaaagaatgaaactccaaaaataacacaaacaaatcaaagcatatttttaatactccttcatcttcttgtaaaaaaataaagtaattaaattgtatgtccgaattgtgagactagtttattatataataaacgtttatacacaaataaaaatatagtcgggatatataaaagtgtttcataaaatcaaagcctacaaaaaggtggtgtagccagggacagagtttcccgcaaagggggtctaaaacaacagtggctcagttccttagtcggccattaataaggagtggggccaatcgttacctaacaatgaaaactagaaaaaaaaaaaaaaaaaaaaaaggatgacataacatacatataataagtccatttttcttctctttcttatcttcccaaaaaaattaatttcttgctccatcaccatctcaacctttacttgccatttcacagagataactctctcttccttttttttgccttttctttttattttccctctgtcaatttgctttttttttttttctttttattttatttatttttgaataatcatcatcactccaacccagcataagaccgattcaaaaaagttaatttcatttatttctttgtttttctattttccttcaaagcttttcaacttttttgcttccaagctctttacttgtagaagcatctgaatttctgtcaagttctctctttctttctttctttctctctctagcacaattattttctctctccaaagacaaaccaatagcttaaaataaaaatttaatgagctgcctatgaattcttgtttcacttgcctattcctgacctcccccatcaataaacttcaatcaaaacttcattactagctatagctagatcccatctctcatttatttatacacacatacatatgtatatataattcccaacttatataggtttcattgatcatctctcaatccatagatttattattggaaggaaaaaaagaatgagttcctcatcgtcatataatggtagcagtactcgaagacaaagaattctactactttggctattcatcttcactgtggttctattcatatttggtcaatgcgatgggtcaagaaatccgcaagtgtttaaattcaagcccaagtcttctcagctttcaggtcactttatgaacttcttgccaaaaaggtttccaataccaaagtctggtccttcaaggaagcataacgatattggcttacaaagttggagatcggcaccatgacttcatcatcaacaagttcatactattactatacttggaga

SEQ ID NO: 36341 - DNA, 6121 bp, Cannabis sativa
ctttgtaggtggttggagtgtactcgcatttgtgtattttctgattgtttgtgtctggttaattcagtctctaataagatataagtttgcaataagtatggtattgttattaatgatatttttttatgtttggaagtctttctctcttatttttacctctcattgtaagcgaactaataatgctcttgcacattctttagttaaattggctctaactttagatgattctcgaatatgactgccttacttactttaatttctcatgcttgtaatgattgccagatccctttagctttatgccttttttaatggaattattcatctttctcaacaaaaaaaaaatgatagtattatcttcacttgcacatatttgagttgatttagcacatatttttaatttcataaactcttggattttatttatttttcaataatatatttttttattactttagaaatggtaagttaaattaatgtggggatttgggtgtttaccggttggaatctaataattttagtcataattagagaagcaaataactcaattagtaattaaattatccaataatttgtcataattaaagaagaaaaaaaatgatccattgagtaattaaaatgttacttgaaaaaacacaatttaaaccaatccaaatcaaatacattctttaacctgtgtacaatacaagtcatatttacattattttgcacagccccaactaagagttttggaaacttgaagatatcattgaaaagcgccctgtaaagaaaaaaaaaatgttttataaattttaacgtagtttgtcaagaatatctaacaaaagacgaaaaggaagtttaatagacgcgtgagtccttctattgacttaataaaaattacattcataaaaaatcggcgtaaaatcatgaaatatatataaatataggttacaatgtagtttttacaagaaaaaaaatgagctcacttctacagtttttatatatgtatgggtatgaagggggatattatatagcatgttgaggcttcgaggaaattgtcatctgcaatttttcagcagataagaagaggggctcgagaagttggcaataccagtcgaggacttcccaggatctgctttcttcccaggagttccacattcactaaagtcgagaacacgacactcggcctacaaaaacacgaaagaaagaaagaaataaaaattagtttgaatataaaagctagcagcaccttcaatgattattatgttctaaccaaaaagaatagctacaaactttgaacttttcaagtacaatgtatgtgtatgtttgactaatcaatcttaccaaaatattttgtggcaatgtggaacgaattcctagttgactgctctttccccaagtgtcacggttgagttttcctttcatcaatgattcaggagtgtcatttcctaaaacctcctgagcattggcgtaagcagttgcggtatgctcacttacttgtttcatcaatccaatcgcatcatagctcctctctacagggctcacgaaataccccatatcctgtagaagaagtttccacagaattagcgaaaaaattatttcccatcaaagccagaaagtttaggtgattaattaccaagaaattttctgataataatacctcgatagagatgtcagtatcaactctgggcccagctataaaagaatttataaaccagggcgacttccatgccgaaggggattcgatacttcttttaaatggggtatcaccaaatctgaaaaaaaaaataaaagataaatcatatgaacccattcaacaaccaaagaaatctcatcttaatcacaaaattagggcctgaatcttacatgctgaaagtttcaactgtgacattgctcccagcagtagaaacattcatctcagggagggttgacgaagaatcatgttgcccacatgtccctgctatagcctgaattttgagtttcttcccacttaatgaaggagagcaaaacggtgcagaaacaattccagaagatatcgaactaagacctcgatttggtgaaggatcaaagcttttgagatgctgatttctaggtgttcgagctttgaaatcaacttgtttaggagaaaataacaacagatcattcatattatgttcagtaaggaccccagagggcaattgggaagaggaatcagcatcaatcttggtcttatcttcaatttccgatgcttcttggtctgtatttttatgtagttcactatcacagaaaacgtttcctgtgtttctgtcgtgtgaaaacgccatattgttacccactttctcagaatcctgtcctgaggtacgagccagactttcagtatattcacttggctctttgacgttctcattctggttaggcgacggggattgcaaagatgctttattacccctattatcatggacagcaatatctaaacgggaataatttttggtcaaactagaggtcatatcattctccagctttttgtcctttttcctatcggacaatggtgacataaactcccggtgtcgtttcttaaaaatagatggtgtacccgtgaatgttttagcagcactcttaagcaccgcatcaggactaccatcacgtgttggtgaatcccataatctaaatggagtaaggcagttggaaggcatcatcagctggcgaataccaagaggactatattcttgctgcatctcactgccggactgtataagatcacaactaaaaaatggaccatcaaaatttggaaagcgaggaggttcgtaacatagtactcctgcatcctgttcacccttgtccacttttggtcttgaaaccgtgggacaagtttgagtatccgattttgagccaaaactattgacaggaaccaattttgaaggatccttcgatgtattcagttgctcttgcattctcgacatatccatattatcattgcaaggagaattggcagaatcattggtatagataaatccatcacgtgaacaggtggcatactcttgttctggaactataagcaaactatttgaatcactgccaaatacaagtcgaccatcatcaacagacactggatcagaaaagaagttttgagagcatgaaattcctgttacatcagcgcttgaatgacctggtacttgtgaaggcacacttccaccagcatcagacatctgaattttagatgattggtgtagtactgaaccagagcctccaccttcaagatttcttgaggaaaagcattcatcattcattgcttctgaaaatagaaccctacaacactcatcatcagatatcagcatgtgctctggtttttcagaacctgtgtgcatgttccccatggaagcagaaacgattaacccaccagaaatttctaatgaaacattagctacttcattgctctcactggcacctaaacaataagtttgcatctctgatgattcccgttccaaatgtcttgaagaaatattagacatgtcatgcaaatcgaaatggtaatccccacccattgaaacttcagcatcatttgaaaaattttgccggagatattttgcaccacaatctatgtcatgagatatctctgctctggaaaaagcagaatcctccagagatggataatagggttctgaacaagatgctgggctggagatgggcaagttgcctgaaccagttacttcagtagtctgaagttcctctcttgtatttaataccacattggccatttctccagcagtctgaaagcgaccggcgacagttgaatcttgactgcattctgaaacctcctctgcttctgtccctctacaactactatcatctccgctaatcttcaaagaagatgaacctatgggttggctttgttgtccaacttgaggtaagccctggaattgtgtaagcaagcctgattttaagtaagaatccagtttcttttttacagaactgttccaatgattttttatagaattgtctgtcctgtaaacatataaaaacagatatatatatatatattcagactcgcaatagtaaatagtggatttaaaacaacggttaatgaaattaagaactgaagtttaaagtaaagcaaaataagtaaaaaagtaaagctttggcataaataagaaaaatatcttctgtgtatcgagtaaccaatggacatacctccctggaaggaacttcgttagctctgcccatttgtttccatatacctgatgagcacgaattaaagccaactcctcttcttgtgtccatgcctctttatttatagcaggattaagatgattgtgccacctaaaattagtttcaccaatgtatgagtggaaggggcactctagaacacactttttttattattttaaaggtaatatagaccagaggtaaggccttagtcaccgaggtaaattgagctacaaatatatacagaaatcttgcagatactacataataacttggacacatacattgtaggtaggtaatacaatatagttaaatgaaaatataaatgcacttccttacatgcagtaatgctcaagaaacataacacataacaaataattatgaaaaaaattaaacattcagtcttcaccaaaaagaaactataaatatacaacaatattaaaaaagagaagatcatacctttcccgacattgcttaccaatacgtccaggtaaatgattagcaatggtagaccacttctttggcccatattgtttcaccaattcaactataacatcatcctcctgttacattttaaaaagagcaacaaataatgtatgtataatttttcatttaaaatatatatcatatgtatacatattcacattaagtcttctgatgttggtgacaatcctactatgcagatataaaaggcaataaacaagaaagggaaacactgcacctctttagaccatggacctttgacgagttctggattcaaaaccttctgccacctatgaaggcattgtacatcagtccgatccttgaaacattcagctacaaacagccaaaatatacaattacattgcaatagatataaggtcacaaaagtacaaaagtaaccccacttaaggggatgaaaattctgaataatgatgataaacccataaaataggatggggttctgagcttctcaaccacaaaaagatacacaacttcaaacaacttaaagatctcgcaagatactttttttaacagtgaaatgattctgaaaagatatatcttagttttgtcggctatgtcatctatttgacacccaacatttgagtttttccaaccatttctttcgtctaagcacatcaacatttctcttgaattagcatcatgtatacacatacatacctatgaccaattttatagagacaccaatgaaacaaaagtaagggtcacgatgaagtatttaaggataacatattttcttccaaatcataagacagaatatagattccttaccaattttcttccagttctttcctttgaaacgctgaactgctctccgcaaagtctcatcctggacgcatgtaaaattcatcagattcactttacaatttaaacttgacaatgctaattcaaagtttaaaacatgcatctataaagtgtagaacttaaaccaccaaatcgtgataaatggtgacaggagaacatttcagattcacatgcagatgactaaattgagacatcacctaagtatttgtttgaccatcaaaggcacaaatgacgtatttataattacacttcaaatttaaatgaaatgataggtatgccgacaagccatggcatcaataaaattcattattttctctcattttaagtgagagcaaagcatcatataacataatagtatggcttgaaaaaaaccctaaaattataacttgaagaataaagaagaaagggcgcaacttctgattcttattagatttgcaagtttgcaagcacaagtacacaattacctcttcaggggtccattgccctttagttgatcgccttgtaggcccactagtcctcctacataaagagttactaattgttaaatgacctccaaacttttaaagttgacaatgaattatcaaggagatataaacacggtgcaatttagaagagaaaaacagataggaaactgaagggaaaggtagagatcctaata

SEQ ID NO: 36342 - DNA, 7943 bp, Cannabis sativa
tatcaaagtctggggagcatgttttagtacataaacaattactgaaacaatttaacaatttcaatagttcaggggaaatttttaacggctaaaaaagtttaggggtatgatgatttgagatatgtcaaagttggagcgaaaaatggctaattagccttgaatcatctagtgttttaatttttagtggaaagaaaaataattattaaaaaaaaaagccagagaagtgcagtccacgtgtcctatgctcgtcatttcaattgactgtcttttccttgattccatatttcctttttgagcaaacaagatttgaccctccctccctttgttttctctccctttccatcttctttaaagaaaaatcataaataagtagtagcactagctctgagaagttgttttatttccatcaccgtctgtattggtgttttttttttttttttttctttttatttcttgataagagtctttattggtgttactcatacataaatatataatatattaaaaaaggaatactgtatttaaaatttaaaaattaaaaagatatttgatgaaggcagaagagggagaaatatatagaatgaacttcacatgaacccataagctgccaactggcacataaggcttccacgtagcccctttgctgtggggcgtttcacctttgacgtggcatgcactcaatccttacacctaaataaataccccattctcctctcaacctttgctctctcaaattcatttcattgctatccttaacaaaacatcactacttcacctaatactattacacttttttcttgctctttctctctttctttcttaaagtttccctgtcttttttctttttttaacggcagacagaaagagcaagatctttaataaatagcaataataataatgcctgcaccgtttggtggtggtgaaactgccaatggagactcatcggacggtgtagatcgttccaaagatatccctcgagattttcgtggcttcccatctttaatgtcttcttgctctcccattactctcaaggtacgtgacacacagtaccatataatatttaatctcctttttttttaattaaatgctttctattattattattattatttcgttccttccttttcatcattatcatcatcaggtgcttttattgctttatacgaagttaataataagtcagtagtatttgctgatgaataatcaaatgtttctgtatttcatcattattatagttcatagacgtgacttaccgtgtgaaaatcgacaacaaacaaaccagcagtatcggtcgacgaatgttcggcaacgaaccacgaccgtccgatcatgaaagatcaacaacgtcggcaacgaacgaacgaacgatcctgcatggagtcacaggaatggcattctcgggagaaatcatggccatacttggcccttccgggagcggaaaatcaacgcttctaaatgcaattgcagggaggctccaaggacacggctgcagcggaacagttctggccaacggtagaaaattcagtaaacccgtactaaaaagaaccggtttcgtatcacaagacgatgttctgtatccacacctaacggtccgggaaacattaatcttctgttccctctttcgtctaccgagaacactttcgcgaaaggacaaagtctcggtggccgagtcggttatatctgagttaggcttagagaaatgtcagaacacgatcatagggaacagcttcgttcgtggagtttcgggtggtgagaggaagagggtgagcatagcacacgagctactcataaacccgagcttgttggtactagacgagccgacttcgggtctggactcgaccgcggcgcacaggctgttgagcacgttgggtgcactggctcagaaggggaagactgtggtgacgtcgatacaccagccctcgagccgggtttaccagatgtttgactcggtgttggtgttgtctgaaggaaggtgcttgtactatgggaaagggaatgaggccatgaactacttcgactccctaggcttttcgccgtccttccccatgaaccctgcggatttcctgcttgatctcgctaacggtatgttaaccttttcctctatccctaatatatacactctactactatagtcgattattattattattttttttgggttattgatcatcataaaaatgaattcgatcgatcgcatgatgccacgtcaataatcaagttatattatttgtgtgtttctttaattatatatttagtaaattaattttcatacatggatggttataatatttgttgttttctcaaaaataatacgaagaatatataaattaaatttagtatagagagatatagatagagattagatatgtagccaggtggtccagatcagaatgcagcatatttgattgtccattatcattatcactattattattattattctattattatatatttatatatatatactgcgttaggacatgattataattcattcccactaacaattagtattacttctccatatttggtgtctgccattaacaattgtgtgtattgctcatagttattatatatagtacttattctcatgtttttgcctactagcttttatgggctgtgtgtgtttattgtctcttttaattgattctgaatcgatgcaacatggaaccaatatatatgtattattatttaacaatgtcttcacttcagtaacgatttaaagtatatattaaaaagattttaaagacataagttcttaaaattaaatagcgtagtaataatccagaatatcttgtaacgctcatttgacttaagaaaattaaaaataatattattcctatagaggctataatgatgaagtgtgtacgtagctgtattaattttgactgtgaataattaaggatggtgcgcgagctttgatgatgactgatgactgacatataccattgcccaataagccatttttcaatgacaaaatgtgtcaaaatttttactatactctcgctcggcctgtgtagcaattgactcttataatattatatattattgttttcttaattgtctgaagttttggtcattatgttcttgccttctccgtataaaaattggtatatctcattcagtgaaaagaaaaaaatagaagcctacatactctagtctagtgacttccacttgtcttctactctcaattattgttatttttccttgatttcatactaatttcatttttccttgatttcatactaatttccatctcaggcaaaaacaagattagataacattaatatatatctcttcggcctcagccctgtcaggaaaaactttatcaaaagccctatctttcctttcctctttttgtttttactttttcttttgtcattttttctataaatcacaaatcagagcacatgacacgtttccttcgtttctggaaactagggatccaaacttgaatatgtatttcgaaataacacacagatgtccttatattgacataaagacactcacacctagctatataaatagtgcgcaagaaaaacacagagagtagcgagaaaagatccactttattggaaagcaaaactagcaagctattagttgttgttgttgttgttgttatctttttgttgttggaaatccacatggcgatggattgatatttagtgccatgaagaaacattttccaatgcataacgtataattactcaggtcaaacaaacaaaatctcttttcctctgtgtacgaagatttagaaaatcaaaacgtcatggcattgagtatggagtccatatatatcatttatatatatattatatggtacccacatgatgataatatataatatatatatatatatgtccctttttcttaaggggattaatcagtgatatcttggatgtacatagatgatgaactttatggaccaatatcctatcctgatttttttgagggatgatgtcctcattgtgaccattcaatatacatgcataaatatagagactgatgatcagttgacccactttatcattgaggtatagtattgttgctttttagaaacaagatatccttatatctgggtaaactagctactatgtgtcctattagtgtggttggccctcaatattcttacctagtaattgtgtgatgacttctcatctctcttactaattggtgaatatgttgttaccaattaggcattatatatatatatttttagttaacataaaaaaaaattaaaaaaatatatattatatttacttatatgtgtgtgttaggtatacgtaggatatataagctctaaggtgtggttaataaatactaaaataaaattttactgatattattttcccactacacaattattatgaggtacttatagtatgagaaatgagtgtcataaataataaaaataaaagaaataatgtaccaatcaataaaatcttagacaaactagaaatattgttcattaatttgttctttaattttccctttagagcttgtttgggcagaacaaatgtgacaatagaacattttataataccatttaaaaaaaaaaagaacattttataatagacgcaactttaagagtttttgtctaattaagtaactttactaaatcatccacgatctactttctccacctcatatcgaggatgatttgactacattaggtgcttgagaaattaaaacatataattcttaagttttcttattatgagcgtttcaaaggtgtcctttattatatttttttatataattaaattaattagtagttagctatcacactagctacactcaatatatatattttctatataaatgtttcaaaaaaaaacagaaaaattaacttttttgtgcacatgttgcacccagcaaatatttgcaaatctaggaaagaaatatcctgtaaatataactaaaataataccaataattaatttgcgatttatgacggtagatgtagctagtttacttataatttctatgggacatagaattactgttattttaatcatgaaatacattatataatatagatattattatagagatagtactctttcctaaaattattagtgggtgttgttaatgggcaaccacgtaagtgctattaaaatgttttttttttctttttattaacggttgcaattgcttttacatggtttacttgtcgatcattatccctttggcaaaatcataaattaaactttgattatatttcaaattagtatcaaaaagtattgagaacatgatagcatgctcgatccatttgaattttttgatggggcagtaaagcattagatgattaatatataacagattttccaccgttttcatgtatatccatataatctatttttgaggttgtatcatatggctacagccttgaaagtgcctaattactttagatgaaattttgtgtgcttttttagcgaaaagaaaaaacataacagtaacacgtgttgggtttcaattacgtccaacgagcattttatcttacaaaatacttttctttctttttttctttacaaaactgatatatattaaaaaaaataaaaatattaaaagagaaaaagtgagagtacaggtttattattattagtagaaaaaaacccaatgtggcggcccatcctttattagtgatttaatatggcaggcagcaccaaattcagtggactcccaccttaatagcaccaacactggtcagcttttgcgaaagcttgttaaaatcagctatatggtctgttcttattattataaaaacaaatataatgtattctatttagtcgtgttagtgcatttcttacgtctctacctagtaaattattactttgtcaaagaaaattcaagtgtcatattatttaattagtggaccaataatgtcattccaccgcactaaatggtgttttgtttttgtcaaaataagttttgtctgcctactcgccatttttcataggcaaacacatcttatatattattatgtttatagttgcttttaagataatgcataacatgcatgggacactattttcttccactagaaaacaaataatacttctagagtacagaaaatgaaagtgcagaaagtgtgaagtacgtacagagatatatacatttcgttcccaatcttttgctatagcgtttaattaattaattatttaagttctactctcgacagtggtagcgagtttcacttttagttctattttattgtacgtgcctcttaattaagggttcttaaatgaaataataaaataataaagcagttacatagaatgacatgatcatgatactaatggttttaattaaaagcttcaattaatttaaccgctctcctaattaattgggtccttaattttattatatcaacgagatcactcacggttttttttttatggtaaaattgcaggtgctttccaactccaaggttctaatattaacgaaagagataaatcggcgagtgtgaagcaacacctagtgtcttcttacaacgctttgttagctccaaaggtcaaatctgcttgcctggaaaccccaaataataatgcttcgaccaaagaattaccaggcttcagcagtgagataattcttagccataataatcattccaccaataaagactcattatccagatcaagaagatcatcaatatcatgctgtgatataattatagggtttcccacatggctaagccatttcagcattttgctgcagagaagcctcaaagagagaaagcacgaatctttcaacgctctaagagttttccaagtaatcacagctgcattgttagccggcctaatgtggtggcactcggattatctcaacgtccaagaccgactcggccttctcttcttcataaccatattttggggtgttctgccctctttcaattcagtctttgcattccctcaagaacgtgccatcttgatgaaggaacaggcctccggtatgtacactctttcgtcttatttcatggcccgaatcgtgggagacttgcccatggagctcatcctccccactatcttccttgccatcgcttattggatggctggattgaagcctgagttcagtgcttttgttatgacactcttggttctcctagcctatgttctagtctctcaaggccttggccttgctctaggggccgctattatggatgctaaacaggcctccaccttagtaaccgtcactatgctggctttcgttttgactggaggattttatgtccacaaagtgccttattgtttggcttggataaaatacatttccacaactttttacacttacaggcttctcatcaatgtccagtacggccaaggggaggcgatttcggctttgttgggatgctctagacatggaagaagagacagtggtgatatccataatgcaagctgtagattcattgaagaggatattgaagggcagattagtcctttgattagtatatctgttatgttgtttatgtttgtgggctataggttattagcttatcttgctttgaggcgaatcaataaagccttatagctaggtaggtaggtactaccacaatatatagttaagtacgtacattaattattgctattattaatactacaaatgattatataggtttttattattctacgtgggcaagtactcacaacaattaattgtattattattatcattaataataataaattatgattaaaataaataggatttatccttgatgaattattacgtccattttgagggcataggtcatcccgaaagttttctcttaggacccgtttagtacgcaggactggattgaattagacatgctaatttgtccaatttagtgtttggtcatggcagaagtctcgataactaatccagctaatctcatctgtctggaattatttatcccatccagcagggtgggataaataatcccatgcagatgagattttttttat

SEQ ID NO: 36343 - DNA, 2484 bp, Cannabis sativa
cgattatgaaaaaaaaatggactaaaaaatcttcctaaatatcgaagcagacaagaaatttaccagaacaactcttttaagaggtgtactacagaaatttcataacattaattcctacaaataagcacatcctttttctttcttataatataataccacaaaaatgtacttaattgttaattgttatagtactaatgtttgatgagcttgttggttggttagacagatatttgaataataatatatttgcaaaaaaataaataaatgaatgcaatgcatcatcacctaaacttctcttttccaaggatgtttgctattggattaaatatattatgtaaaacaaaatagtaaaaaacaaggataccactttgtggagcattttcctgcatgctggtaaataccctagctgcaaaacaaagatcaattgagatattattatcattactataagagttaagaatggtttagttgtattcacatttttattaactcaccaatggaacctccgaaattcattaaacatgtcaagaagctgagctccccagtgcttttactagaaaagtttttccatatctgagggatcctagcacacagaaaaattgcatgttgggatgcatatagagcttcgaaaagaacagggtcaatttgaccagctaagatggttggcgccacagcacagtatctacaagatgatcgtattaaggaaaaattggacaataaacacatgtataaatatctaaacaatgaagaataaaaaccagtctaatctgaaagaacgaaagcaggatacagtagcgctctgatccaggttgtcaaacccaaaggttgagagaaatagtagatgacagcgactaaaattattgctgtgacagacagatgagaagagaaagttagcttcttattaatgtaaaactataaccataataattagtcaaggtactcaggcctgagttctacaccaaaattttcaacttgccataactataacaatttaaaaagacaaactatcaccaatttcgatcaactatcctgcatcattcttaaaatttaggataagcacacaaaaaccagaccatacaacttgcacaatcaataaattacatcttagctggtttataatctcttgctactatacatatctaaaggcaagcacattctcttgaggttatttctacatgtgatgacacaaaattatggcctcgtaacaaccaaccaaccaactcattacagtatattatcacacaactatgcgtttctcaatcaatcaacaaaagaggggaaagaaatttagtcagaagtgaatcaaatgatcaatcatgtttcaacaatttaagcatatattgtacaaatggtttcattaaaattgaaaatcattctattattctatgcttaaaatcaggtaaggttcatatatgcactagttcccccacgtctccaaggaagcattttgctcatgtgttaaattagtagtggctgaaccacttttctagagagcacacaatcaaaaaacagaagcgtgttcaagattggcaggcagtttttttggcctattgacttcgattcgtggcttggttggatcaacacaaggagaaagaggagccttattacagacctgatttcagctactatggcaggcgtagtttacagtatttggatcaatagtaatctctgtattcttgaaaataaatcttttactctcgatacaatatgtatcgataggctgattaaagctggagccacaaagaaaatttcaaaacgacatatcggtgccctcaattttttaggcaaatgcagttagttttgcggctttctaggcttggtttgactaataaagtttctttcttgatcaaaaacaattagtagtagcttatttttataattaaacaaagtttggggaagaataccttggatcaacagaaaggctagctccccataagctgagaagggaagccccttgttaaaacagtatgccagagcaatggtgtaaccaactacctcaagctcaaaagatacaacactaagacctctcacacttccattcttcaatattttcattatctgcattgcatcccattcacaataaacacaaacacaaacactagcttagcaatgatccagtaagaaaatccaaacatcacaagtttaatcaagcaaaataatataacttaaataggcacgatgctccttcatcccaatatttaaagagtagctaagctaaaattcaaataatcttacaattattaaagaattaagctttttcttacatgatttgataaagcccaagccaaaaaaaaaaaaatcacatcttttgagttaattgatgagtataaccttaaatcacaaaactatataattttttttcttggaatttctcaaataaataaaaataacattctcgaatttttgaaaattgattgactggaagggatcaaagaacaaattgagagtgaggaagaagttttacgatacctgagggagtttgac

SEQ ID NO: 36344 - DNA, 5394 bp, Cannabis sativa
  modified_base (3851)..(3871): a, c, t, g, unknown or other
aaaacccaacatcctctaagacataactgcacacaagtgaaaaagagatgtcaaaaaaaagagaaatagtctaccctacacgtgtataagggcaccctctcgaaaaattaaggaacatgtatcctcatcagaagagtcttcttcctcttgctcgaccacaatggtttttccctttctttccacttggagggaaggatgagtagcttccttgggaccatccctgatcctgataagctgctcaataagtacttggttgcattggggagccttcttttgtttcttcttctttggagcttccttatcgggtacaacttcctcttcttggctagacacaacatctcctgctacctgcttgcccattgaccattgccagtcaaatagagtttatacttaataaaattggccttagtagccaagacagaaatatttcaagcatccaagggaagtctgagtatttcttgagccctcttcctaagttctagtgtcatgggaggccggtagtatgaaggaatgggttaaaaacttgtgtgattggtgtccatgcatttgacaaaatagtagtcttccataaaataatcaattttggatacgtcggtacccatggtgccactcaaccacttttctttaatctgggagaactagaagtacctagacctgttctacttggggctggacttcaagtcaaacaaccaatttgtgtcgtgggtagacggcttgccccaccctttagaagcgtacatcacgaacaaggaagataggtatttaagtcccttggcagtgagctgggttagactgatatggtaataattggcaatctccttgaagtacagatgtaatggcaccattgcaccctgcttggcatgagaaaccgaccacacacagtagccctctttaggatctgttgcgagctacccaagagaaggaaggaaacactcaacctactgaaggagggcctttctcgaagagattggtcaatctcttgaatgttaggagggatggtggagaaaccaactgggctcccctcggaaccctcctatttatatggcaagccttggtgtactcctcatctacgtaatctcagccagcttctgggacttctcctattttagggataggttctccctcttcattaaagccaacaaaaggtagcactcgaactaccccctcttcctcctctccttcttctccttcagcctcggagggagtagcaggatggaccttgccctagttctcaacttcttggacctcaacgtcctcttcaacaacattttcttccttgagcgtaggtcgtgcttgttccattccaattgcaatgaatagtctggcgcaatgagggtcgctctctaaagtttttctcatcgttttttttgttcacgccattctttatgtatgggcaatgacttcaattcagttgtatgccgagcaatagttatatcaaactcagattcaggtgttcccatagtagttagggctggacgaccttcaggcagagtattaatgagactagattggactctgtatgtccagttagtatgcaagtagcgcctttagcctttattcaattcctagatgaaacgcctatatcccttaccaggtacttggttggcatactagtggtgctgcacctcgggctctgggcacagtgtatgctcactactcactttccaatcttcaaagctagaatttaagaggttatcactagacgaagatgagcttgcacggagttagggttggtcttcgtatagaagttggagcaagtcttgatcaatgtggtgcttgcctccccacaaatcaccagggttcatcgacaaaaggtgggagacaagaaaataagcgttggtcggaggaagagatgaaaaattgattttatatgccgaccatatcaaattaagaataaaaagaaagggttttactcaaagtctgaaatcctaatcccagaagttcaaaactcagatggtaactggaaattcttagaatatcatgaacgagtgggaatgaatgattttaagtcaaaatcaatacgcagtcagagaattagaagttatagttaaacgttggttaaataacaaaaccctagaactatctattctacaatcagtcaagaaaaattcaagaacagagaaagttcatggcaagaaatcaagaaaataatgcatatattcatttgcaatcatctaaaagaagagagatacgtgacttaatcactggtcaaagccttctttatcttctcaaaacataacgtcaatgaatttcttagcaagttccttcgaaggtttagaagaaaactaggatgaaatttttcgctctggttctctgagagtaaaaatggctaataaaattgtcaaaatctttaatccttttttataggcatccaaaaagggaatataaatcatttaaaattcaaatatttgggtttcccccccaaaagtgaacgttagtactcattacaagaagtacaaccatcacacatgaagtgtcactcaactattaatgcgtgattcaaggtacaacttttaagaggtatttaatgctcaaatatcaaagagactttcaattaaagtcatgacggatcaatctcaacctcaagacacgggtcacccatccggacaagattcttgaccaaatgaagtcacgtgtgatcaagaaggtccctcatagacttgggggtaaatattatcctatattttgtactatgaagtggcagttagctggatgacatgtgtctcatattctcctacttgggcagaaggttgcactcctatcagcccccaaagattagtagaaagatccatgtcatccgtacatagcaagatgtccgagtagaatcactaggagacatctgaccaaggctcgattatgtgatcaactcgcgtgcaccgaacatgttatgtgattttgtaatttcagaaatggacattgttgcttttatgacacgaagataatccctacattcgtgggatcaatgtagagaataaaggcaatgagccaaggtttctcattatttgtattgtaattatggaattaaattagcaacctatttaattattatagattaagataaattcttcatgtaataagtccctataaatagtggtttaatctcactatttagggacacgaaattgattcagaaagaacactcaagggataaagagtgatttaagagagaattacttaaagatccattgtaagagctatatagagagagtactttattctttgtctcttatgtcaatacaactaaaaggggagtagaatattaccattctcacacggtcgaacctctagaaattctagtattctctttgtttactattttttctttctattatttcttttgtctaattgttttattttgactcactgtcattggctagaagcgaggtcaataatatatatattttattacacacaatatgctcttagatctaaccttctaatactataaagtttaaaatgaaaaccctaaatctataacagacatctctccctctcatcttctcccttcctcccgtgtctcgctctctcacatattggttctctctcctatatctataacctctctcaaacacatacaataactcactgcaaatcgtctcctactagccaccccaaatcacatagacaaagtttctccctcctcaaaacaacgacgcctccctcgactagacctgataccaggtgcataaagattctttttctttaaagcccctgtctctctctagaagttcaactttagatctgccctcttccctcctccatgctcaactgcgctagtcggttggcaattcaatccaattaatggtggttatggtggatggcttctataaagactctctctctctctctcnnnnnnnnnnnnnnnnnnnnnctctctctctctctctcttcagaccacaaaagaaaaacccacatacccaattatcggcgtaactccaccaaccactctctggccaccatccgaccccacgtgctagaccattcaaatcccagaagcaccgacgacgccaacccccaagcggcgctgccccttttgccactgttagtccataattgcaagtcaatgtttagaggttaaaactctgaacgaattttctagccacttctggtatcgatttgatgagtcttctacaccactagactcatctcattgaggagaacaatcaacactaagccattttcgccagcctgctactttttccagtgaaatttttgtagctccacctctttctagaaaatttcaagtgatatcgtgtaccattttgaaaaaaattggcatgggtgtgatctactcgttgaggtggtcatttgatatatactacccctattttcggtgacgtttctagtacaccaatgtctaccaccaccgataatttatgtgcactgtttaggtaagattttgaaactcaaaactttaaatatagtaatattatatgtcgttgaactcaattttcaatgtagaatacaaggatattaattatttagcaatttgatggtataggtgagagcgatatctaagattgaactaaacaattggagctcaagacttgagagcttaggatcatctttttagataaagtttaatagcttaggagagatagggacttaacttgatttttggacttatttttatatgtgttgaataacattagacatattctaatttttatgatttgcaaattatttgaataattaaaaacttaatctgcatatttttttggtctattctggggcactgagtgccaaatatatttttgtataaataattatgcatgttatgatttttagatttattcaaaatacagtcgctatacttctagattttctagaaaataaaagagaatatgttcttttgttattcttattatttaccttcttttagttatacttgtaaagaccgcttaactttaatttggaaattagcagataaatagagtttaattatgaaacttgcgtattagttatggattatcattttacggatatttatttgaattcataatgcattttatatgccatatataaaattttatattttagcatattttgtgcccgacaacattagaacgcaacgtttggctattagaatcacattgtagtatttttaatatagcgttgcaatatagtgagacattagaaatgtcagaattagtcgagattttagatttgaccaaactacccctaggtgtaagggttgcttttggggtaagcaagggaaaattagtcttttttccctaagatacttttgtcttctagagggactttatgtgtattctaatctgaatattattttagttaaattagataaacgttgttttattatactttaaccaaaaattagaaaattaagaagaaatagcttctctcttttcactcactctctttctctctctc

SEQ ID NO: 36345 - DNA, 3413 bp, Cannabis sativa
aatagttgtattcaggatattagaagatggaacataggtcagaattctctgaaatagcagatcaataccactcagaaagaccttgacctccttcttcaatccaacaatcctactacctaggatctttccaaaacaaaatctctacaatccaaactggatagtctcttgcacaaaaatgaaatttaccgaaaataaagatctcaagtcaatcggctcaagtttgaggataaaaccacaaaattcttccaacacaaagcctcgactacgaacataaataacctcataagatccattactctggaggatggttccctagctaaacctatttcttctctccttcctcatttttttttttgatttctacactcaccttttcactactcaatgggaggaccaaactgctatctccaacatcctaaccggcatccctaaccgcatttcccccagtgaattctctgccttggaaaggcttttcaccgtggatgaagtcaagaaagccttgtttaacctctctaaggacaaggcccctggacctgatggattaaatgtccatttctatcaaaaaaattggaataccattagtaaagatcttagcagtgctatactggatgtcctaaataaccatcctactatttcccatgtcaatgatactatcctagcattaatctcaaagaaaaaaaagcctcgacctttcgtgattatagaccttttagccttcgctccacactttataagatcatatccaaaaccgtgccgaatagaataaaaattgtcctccattccataatctcccaaaacaagtgtgcttttctcactataggaaaaaaggaaaacagggctgggctactattaagcttgacatggaaaaggcttttgataaagtggaatagagcttttttaaagctatccttgaccatgttagttttcctccatcttttatctccgtggtcatgaatttcctatccaatgttgtgtgtcgcatatcttttaatggtaccctttttaacagcattacccctactaagggcatcagacaaggtgaccctctttcaccctatatcttcttgcttgttgctgagggtctctctgcctccattcgggctaaggagcagggtagccattttactggccttagaatctgcagagatgcccccataatttcccaccttctctttgctaatgacaacatcctcttcaaccctatcactcaaagctccagcactatcatcaaggatatgcttcattcttatcatgaagccactggccaaatcctccatcatgttctcccctaacaccaccgaagactcaaaagattattttataaattcctttggttcaggttgtgagggttttgtgagcaaacatctagatgttcctcattgtattgggataattaccaagtctcatttccattatcttgttcaaaaagtggcttctaaattgaatagttggaatgggaagttcttttctagagctgggaaagaaacacttatcaaggttgttgttcaggttgtacattcttatggcatgtcttgtttcaaactccctaataccacctgtcttacactttctaaaaaccatttcaagattctggtggggttcatgcattaataagaacaaaatttgttggaaaaatttgccttccctatgtagattaaaattctatgctggccttgatttcaaatctcttaagaatcactatcaagctctaatttccaagcaagcttgaagaattttgtctaacccttcaactcttcttcacactctcctaaatgccagatatttcaaaaatagttatttcctcacagtccctaaaggctaatctccctcgaatacctagaaaagcctcctttggggtagggatctcctcaagaaagggcatttttggaatgtgggaaatggcaggtccatctctttgattgactctagctgggttccaggtttgcgctcactttccttcttgcataatttcaaacctgctgagcacaatgtttcattcttaattaataacgacaattgttgggatttccccaagcttcaacaaatactgcctctccaccaagtccatgaaatcctgaatattcccatcgaccctaactcggaagacactctaatatgaggccatcattcctcaggtcacttcactgttaactcagcctaccatcttgcaaactctaaacataccccatccatcccttcctcctcaaacatggagtgttttaaacattggtggaaaatagttttgagcaccgaaacacttcccaaaattaaacacttcaccaggaaggcttttaaccatatcctcgcttgtagtctgaacctatttcaaaagaaatttttatcaaggcctttctaccctctttgccaaaaccaaatcgaatctatttctcattctctcgtccattgcctcagaggcaagtctgtgtggaaacactcctcctttagaatttttacattggcaatagtaactttgacatcaaagagttttacatgagaggtctagatcaatttaacaatgatatatttactgtgtttattagtctagtgtggcagatttggaaaataagaaataatcctcttttaaaccgttctcctaacactcccattgagggggaagatttggttgtttctttattacaggattaccagacagctcaatctacatttccttgttccaattccacagtttctctagcttcaaattagacttcatcatctctctaggatccaccaactcactatcaataacatggccaatacactcttcaagttgatgctgtactggacctgaaccatctaaaaacggactaggagcttccatttgtagcagtcaaaatcatcacataacagtttttcaatacaaaaatggagagtttcaactccccctttttgctgaagctcaatcccttttagaaggtctacattggtgttcaataattaagattcccctttggtccattgaatcagatagtctgcagttagtttcaagggttagccgtcattggaaggacaatttggctttgccaagtgttgtgaagttgatctaacaatccctatccttattccctaatgcttttcaacgccacatctctcgagtttttaatagtgcaacccataacaatgctagaaaagctcttcgacaagataaggatcttatttggaggtcttagtttccctccccctctttgtatttatttcgtgtcactttgttcaacatctttacagttacttcgaaaaaaaattgtgtgattaaattctattattttggcactctaaataaaaaaaaaaggaaaaagaaaatgttgatgatgatgatattgtaatatactggatatataattatatataaatatatttgggaaaaattttagtttattctttttgagcaagacacaccatgtaaaaaaaaatat

SEQ ID NO: 36346 - DNA, 8546 bp, Cannabis sativa
gtcgtgtgctttagttggaggattattccaacgaagtgcgttctattattattaacgattgctagttaataaaattgctaagttttattcaaaaaaaaagctatattttaagtggtgtttggttgggaggaataaaaatataagaataagaatggaaatgtgaataggaatgaaaatataatgaaatagaatttaaaatgcataaaaaaattgataaaaaaaatcattaaattttttttcttgttatattggaatggtcttttcttcttttttaaaatagaatagtcatttcaccaaaatagtgaaaagagcattctattagaatgtcattctaatattttaaaatgtaatcaaagaataaaaattatttcctttctattccattccattttatcacctctaaccaaacgccacctaattttgcaaaacttaatgaagatgctctaaagagtgggttatgtgtattgtttgagtattgtttttattattatcattaaaattaaaattaatttatataaatttaaaaacaattaattttttttgtttaacacttcaaataatatatacacatttacatggtcagattaattttatatttaagtttatacatattaatttataatgaaataaatatctattttaaaaataaaaatgatgtaattatttaaattattattttcacattacaattaccaaaaagaactatgatagttaaaaatatttggaattgaaagaactttaagcagtagttaatattacataaagaatatatgcttaaataaaaaaaaaaaaaaaaaacatacataaaagaatatataatcaatcattccattaacactagttaaattctcaatcactctttggagataataagtctaagatgagagatgtaaaagttgaactatatttagcacaaaaaataattttatgacatttttatatcaacttttactattgtgctctaatacataattataaatcttgatacaaaatttaatatatcatttaatgtccacttaataatttattgaaaaaatataaaatagtactaataatagaaaaataaatataaaatttaataataataataataataatgcaagtgaattaatataaatgagtttgttaactaaaattaataataaaatattaaaaatagcataatagtaaagataaaagcatagcatttattgtgatgtaaattatgcatcatgctatgttgtgatccaaatttaaattattttttgttatgtgacatatttgcatcacaatttgacacactattagaatagaattttaacaaaatgagatatattttctatttgcatctctattgaaaatgctctaattctttttaaatatcattataattttattttattttttaacattacatatgctaggatgtaatattttatattttaattaaattataagtatatttttcaaagtttcattaaaaaaaaaaaaaaaactcttagcgccttaggggttcttttctttgaggttattgttatcccaaaaattgttcaaataacatgacatgagttttctcaacacgtggccctagacaacatctgtgcggcatgaaagcacaagaggattggtgaatatattctttggattcgtttattatctactcgacataaaacaagctacgcgatagccgaccaaaaaacttagtcatttccgctactgaagagaaggattagaatatacagtcgagttaccagcttggctatggtgcacaaagataggatcatttccatataacatcgccattacaatggctaaaaaagaatatcagttcgattatgcttcatgggccgaacaaaacaagtaaaaataggaaaccgcttaaggtgagaatgacaaaatatattctcgctttggggatataagaacgggaataaggcatatggaagaattagaagaagttaggatagatcctaccatgccagccaaaattatcaaaatatattgaaaaatgctctaattctttttaaatatcattataattttaaaggaaaacctcaatgtatttttcctgatctcatgatgacatggtgggaatttatctatcaataatatgccacgccctaaatattgatacccaaaatttttaacatgtgcagcagaaaagaaagttgcttgacaaggaaagagcacaggccttgaaggaggaggtggaaaagttttgaatcaacaagttcatcatcaaagcattctatgccatttgggtttcaaatcatgtattagttcacatgtcgaatgtgaagtggaggatatgtattgatttttccgacctcaataaaacatgtccaaatgattgcttaccactttcttggatcgatcaattggtggatgcaagagccaaccatgaaattccaagcttcatagatgcttacttaggttataatcaaatcaagatgtatccacccgaccaggagcatactagtttttgaacaaatgttgggctatattattataaggtattgtcgtttgggtaataaaatgttgaactaatataccagtaccaggttaacagaatgttcaaagacaaaattgaccacaacgtagaggtttacgtagatgacatgttggtaaagtccaaaaggcctgagggcatatagaggatctaggcaaatgttttgagattttgagaaaattgtaaatgaaattaaaccctctcacatgttattttggtgttggatcgagaatttttttttagttttatagtaaatacccacagaatagaggctagcatgagaagattcaagccattatggtcatgaagtcacctacaaaaatcaaagaagtataaagtttgattaattgaattgctgccttaagaagatatgtctctaagccaatagataagtgtgctcccttcttcaacatcctccgaggaaacaagaagtttgaacggaccgtggaatgcgagtaggctttccaagagttaaagaaataacttgcacaaccgtcaattctttcgaaaccaccagatgatgaggaactgggaatttacttagcaataaccaaacatgcagttagtgtcattctaattaaagaagatgagggcatccaacatcctatatactatgtcagcaaaagattgatagatgcagaaagtagatacccccaattgaaaagctaacttactatttgtttctgtcctcgagaaaacttaaaccatactttcaagcgcaccttatcaaagtctacaccgaccatccactcaggcaagtgctccaaaagctggacgtatttggtcggttgctaaagtgggcaatagaactgagccagtatgagattacttaccagcccaaatgatagtaaaaggacaagctcaagctgattttgtggtcgagtgcacaaacatttgtgagattgaaggttatgactaccagtgtaatgccctaatccgtagggatgccacgtgtgtgcttttataaaatagtttataataatgaactaacgaattgacgaaaattgtgatttgattaaaaacttgatcattaactgggacataaaattggtttggcaataattagggttggggatccccttttaaaagatttacaaagattctgttaaaattttacagcaaaatactgtacttttcagagttgccataaaacaaaatcctgattactcggctccaccagctgaataagctaatgtttacatttgtcggggaagacctctaactcatggatgacctagctcagtctttcctttacttgcaccacaaagtactcatgagtcacaaagactcaacaagaaaagtagaagcataaacaataaatatcaacatgcagacatattcacatatattgatccaattataaccaagtaaccatatattcaattcgtaatcaagaaattacactatctaatgaaatcaatcattacaacaaatgcttgtctaataagataaattaaagttgttacttaataaagtaatcattactcgttgttgtctaatgagacaaccttaatactgttgcctaacgagacaactcaatgtctctatcgttgcctaatgagacaacagataagtaagaaacctaacaacaatttcaaattggagtaatgactatttcttatattgttgcctaatgagacaaccaatagagtaataacccattctcataggcgtaattaacgaatcatatatcaacataatatgtggtacaattgtacttttcttacctcaagtctaaattcaagcatgtcagtcaacttgagtgggaaacgcttaacgatctcgggcccccaatccttgagcagctcctaaggttgattacttgaagagaaattggatagaaatttttagttttccctagtttggtttgagccgaagaagaagaagcaaagggaagagaggagatgatgttggtgtgttttagtttctatagcaaactatttctaaccttttctaaaaataataaataaaacaagatacatacaacttaaacaatatcaaaacttatttaataaaacttttggcaattaccaatttgcctttctcacactaaaattttaaaggtaaattagtcattaataaataactcgcctcatgtcataatttctaaccaaaacatatatccttttggtatcaataaaatactcactaatatcgttgtgatatttttggccaatgaatcagttctctactattgtcggacctgaaaatattttattttacaaatatcctttattttacctacattgtctaataaaatttctgtaattaataaattatgcttatttatttatttctattaaaatctttaattattacataattaacttagtaagattataatcttacctatctatgcactaaatatacatattatttcatatttaaaaaaatatgtcttattaaatataattacattttcgggatattaaaaccagacataaattaatgaaaatggtatcaggacagagaagaagtaagagcaagagcagaagcaaaaactagaaaagaagtgcaatcctaaaaattaaatataaaatatagttagagactgcttaatatagtttaatagataaataaaattatttatgtatgttaattaattaagtaagagattatttaattatttatgtatgtgccaaggtatcatattattatgtgatatatttagttaatactgataattacggaatagttcaagcaatatagtagaaaagtcactgcggataaaatactgaagtatggtatttagaattattttggtgtatatgagtgagaattatttaattgggttaccatttaataattgattaagtggaatttaacattttaatcaaatagatggaatttgtttttaattaaccttaaactctttttggcttgagatggtgatgacacctaggcttttgctaactttaccccaacatcgagtcaaccgcaaaactaacctttcattttgatgataaccttaataactactctaaaaatactttcaaaatttcacatatcatatgtccaatcttagattccattgtatctcctttgtagcatccagcactaactacttaaccaatacgtttatcttgtaataaatttctcgccttaagtgtgaataacactagattttggaatccgtgtaccttccccaaaaacacaaccgaagttttaccctccgatacaacatcactatttcctcttgcagtcactagtagtgttatacttatctaaccaatcaattctcaatatcacaccaaattataacgtgttgcctaataagacaatctaaactatgttcacctaaataagggaactaataatcactgttacttaattaagtaaaccgttatctcctataagacaactatatttaccctacaacgagtttatagagtaatgactctatcatttatatggtaataaccatacccaatatactcataaaaggaaatcaatcccacatggtgaaaacaaccagtcctctaatagataacaacgtaccatattcgcttataacgacatgtcacctgatctactatttcgtcataacataggtccaaactcaactttcctcaaggaatgctctcatgcagtttggatatctcgaataaatttgtcgtttctcattcatgcctcgataataaacttgaccaacttgctaaaactcatatctaaagtttgcttaaattccctcttttaatcattaagctccaaccctaaccaatactaattagtaacttttgggaattttctctaatgttattctatgttcatagttgatcctctgccccctatacatggagtgtcatctcaaccacttgaacacatgaccgtctaactcctagataattagttgttacaatcacatctcaaacttcgtgctcctctagacctccaatgtaccttgccttccttgaggctcattgttatttcatcaaagataaactaactcaagcagcatgcttgcttttcgacaggttaccttagccaaccgtacaaactcatccacttctgcgacgcggtaggttcattataatacctcccgtaaacatcaatcaagtcatatctcaggttatggtgtccaaatcataactctaagattcaaactctcaccataatcatgtgtctccctcttaagtagaccttaaccaccctcaaaataggagggttctgcttccaaaactactcatatgatggcttcaaaatgtcttccacactttgcagcacaaccaaagaatgtcggtggatttgattcataaccaagtcaagcctattgcttcctcgattcccttgttcgcttatcatactactaggtaaatctttcatatgataatgtctattgcttcccaatgcggaggtaatccgaggttgccatcatcccactcatttccaagctcttgaacctcccagctaaaccacttaagtcaccttggatgcattattagaaactccatcgagcaccaactaaaagaaaataaacttcccgaactaacataaatgctaataagcatttcctttatatttattctaccaataaacatatattttccaacatactcactattagcatataatcatggcattttacaaatataacttaactcatgctttttaaataatcacatatagcaagtaaacagatatcacttactataccatgagtcgagtttatcttcacaataaatgtacttatccagccagtctccaagacctttacaattgtggttgctttgatatcatattatagcgtcataacccgtagggacgccacatgtgtgcttttataaaataattctataataataaactaatagtttaataaaaattgtgatttaacccgtagggacgccaccataattattaattttagcactatacaataattagggttaggaatcccctttaaaaaagtttacaacaattctgttaaaattttacttcaaaatattgtactttttaaagtttccataaactaaaatcctgaatactcggctccgctggccaaataagctaatatgtacatttaccaggaaagacctctaactcatggttgacctagctcagtccttcccttacctgcatcacaaagcacatgtgagttacaaagattcaacaagaaaagcaggagcataaacaatgaatatcgactagtagacatatttacatatacttatctaattataaccaagtaatcatatattcaattcataatcaagaaatcacactatctaatgaaatcaatctttacaagaaatatttgtctaataagacaaaaaaaggttgttacttaataaagtaaccattactcattgttttcgaatgagacaatcttaatatcgttgcctaataagataatccaatgtcactatcgttgcctaataagacaactgataagtaagaaatataataacagtgtcagattagagtaatgactctttcttatattgttgcctaatgagacaatcaatagagtaataactctttctcatagacggtaattaccgaatcatatatcgagatgctatgtggtacaattgtacttttcttactttaagtctaaattcaagcgtgctggtcaacttgagtagaaaacgctcaacgatcctggacccctaatccttgagcagctcctatgattgattatatgaagagaaattggatagaaagaggatagaaatttatatttttttccctagtttagtttgagccgaagaagaataagcaaagaaaatagaggagatgatattggtgtgttttagtttctacaacaaattatttataaccttatataaaaataataatataactaactaataactaaaaaaagataaatacagcttaaacaataacaaaacatatttaataaaacttttgacaattaccaatttgcccttctcacactaaagtcctgaactaaaactttaggagtagcgtgttatgaggcatggcaacaaaattcgtaaagtgttatgaggcatcaaatcagggaatatggctgagaaactttgtcactaggctgcgtattttggagaatgtagaaagaccactcaagatattttgt

SEQ ID NO: 36347 - DNA, 10909 bp, Cannabis sativa
agggtccaatcggtaatttttgcaaaacataagatccaaaatagtatttaccctaaaatatattttttttttttattttgatcttatacatttttatttgtatccttataaaatttatatattttatttttattctcacaaatttatatttttttctataaaattctgtttttcattaatgcttcaattttttcccccggcctaaattatccactgcccataaggagcgactattctattatagtatcatccttattcatataaattgtaaattataactagtataacgataatcatatgataaaaactagataaaattccaaaaccaaaccgaaaattataaaactgattccattatgattaccatataacactaaattgttagtgtttaagattaatacattaatttaagtgaaattgttaataatgatgctggtcatcgtatatttgtatgaattggctgggttgatgagcatcataaatgccaatgcaaaaatacaaaatatattataatttgttgtacaataacatttcattattctaaatttatttattctgataggtagctagtgatgagatgtttaatggaaaataattaatgtgtcatggaagtatagaatatcataaagatgataatgacaatgacttattctacctcaataataattatatatatatatatacaagttcacacataacgcaagaataatacgaaaagaataaacaatataaaatatctctaaccagggatctaattggtgcgcgccaagacatgttttcgtcgccaatgagttgtggattacttccgccgccgccgccgccgctgcctcctcctcctcttctactcgaaccgcctttgaaaagcttagtcagccatttcataaagcgggatttcctctcaccataagaagaaacaatttcccctgcagccacaaacattataaaaccactttaatcaaattcagttcaattccatccaagcttattatagttgttataaacaaagatttcagaattaaaactgtacgaatttggtgtgcaacagagctgtctgaggatcaaattaatgagagtatatattgtgtgtgtatatatataccgtaaatgcaaggctgagaaagatgagtgacttcagaagaagtcatgatatcgagctatataggcttcgccggaataaggaacctaaaattcgacagtgacgcacagagagagaaaacagagaacacagccagagaaatggagagagagagaaagggaggaaacaaatttgaagcaacggcttgaaaataaaggagaaggaaaacaaggcattgtggatcgttaattttatatttatttgattatttattttttatggaaagaaagagaatatctgagagagagagagatgattttagagggagaaagagaagattcttgacttgataaagctatctagcagaagagaaagtgtgagagaaagcgggaatctgctgaggcggagcacaataaagcaacggtggaggacaaccctactcttctctctctctctttcagaatcacaaaacatcagaaaatttatgctaagtagctctaacaagatttataacaaaagtttcctttttttttgtttttccttctcgtgcacacgtagttttttttttttatttggcgcgtaaagaattgttcttatagctttctggttttgatgttttttttttccaaaaaaaacatgcggcggttttagttattttttaaaggaaaaaaggtttcggaattctgttaatttacatatatgccatggaatttctcgtacagttgtataagaagggaactgtttgggacatctcaaaatttcttttacaatacaaaatttgggtcgctgacttgcaatttcgactttcccaatttgaagtcaaaatcacaaaagacttcattaaagttaaatctaatatttttcccacttaattgtcaaaatgaaattaactaatagttagaatttgactgtattatattagttctatactttatttagtaaattatttttgttttgaggtttttttatttttatattttaaaataattttatttttatatttatacagaaatataccaaacaatttaaatcgttacacaaattcacattgcaattcacagaacaactacaagaccaataaaaataaattaaaaaaatagtatataaaattcaaaaaaaaaaaattcaaataaaattgttatttttttattaatatataataaataattaataaaattaaaaaatttaaaaataaataaactataatattttataaaattaaaatccattattttttaccttagttattaaactataatgcatacacatcaatattttggatctattttttttttttttttaaaaaaaaaagaatcaattttggacaattttaaataggattgggtattcgatccaatccaatcttatacttcgaattcaatccgatccaattcaattaaaccacaaaatcattacaaatctaattttaaatactaacttaaaaatattaaaagtagctttgtttttaaagtttttaaaattttgattctcaataataaattaaaatgtaaaaatagtattataaaacatattttttagaaatatattagcaaaggcacctataactatggaaaacacttcaaatttatcaagcacttatgtagatgggtagatgttaaaaaaggtaatgtataataaaatatgtatatatatttgttaatataaagcatctcagaaagaatattatgcgcttgagatttggatgttttatttttattaatccatcttaaaagtattatcatcttctctgttaactttgaataagagagagcagtgaaaatctgtatgacttatgtatagtttttatatggacgagtatgaaatccactatagatcatatctatatataacatttgatttttattttcttttttaaatattgctatataaattgatgtttattagaataagaaatgttccattttcaagatttagaagttgcaattatattctaaattcttatgcttttaggttgtcaaacatgaaaacaaagggggttagttttttatgccatagcagctattttgctttttcatcgaatgagatacgttttcattctttttgtttaaatttgggcatgattgtgacattttctaataaggagttaataaaggagaatagtacatctctgtagttgattttttgatctcaaatacagctcaaaacagaagcacgaatccactttttattatgtcatttgtttatacgcatgaatgatatacacacacacactctaagggaataatttttaaccatgaaatttgatggttaaaatttgataaaaacacatcgttttattacattgttacgattcaaaagaattgaattgtgaaatgtgattttcattatgtatagaacagaatacaagcaatgtttatcacttgagctaattaattagccaactctgaatcattcttttattaacaaactaacaaaaatcagaaaacacattgagtttgtctttgagcaaaggaaaatgagacttggaaatcgatttagttaggcaatcaactaattgagcaatagctggaacatgttgaaacttggtatctgtttattgataaccttgtcctagacaaagtaaaggtttatctcaatatgcttagtctgtgcatggaggacagggttagcagcaagcattattgtgctgagattatcacaccaaatcaagggagcttgagttgatgtcatgtgaagctcttaaagtaaagattgaattttataggtaatagctaaactccgaagctcaacttctgtggaggacttgaatattgtagtttgtttcttagattgccatgccacaagaatatctctaaaaaagatagtaacatgttgtagaccatcgatcaacaagatctgaggcctaatctgcattacaatatgttgtgaggttgaagtttggtgccttagtaatctgcaggccatatcaagagtaccagccaaatatttcaggattcgtttgacaacaacctaatgtgcttggtgtgggttatccatgaactaacacactttgtgaacactgaaggcaatgtcaagtcttgtaaccatatcatattgaagtgcaccaacaattgaaatgtacaaagaagggtattcaacaggatcactaccaaagttggatactcaaagaccactagttattggagtgttgttggttttagcaccttgaagctgagtcttgcagagaagatcttgaagatatttctactaacaaagaaacaaaaaaacagaagtatgaatcacttgaatccccaagaagtaattaatagggcctatatcttttaaaggaaaagcagcactgagattgcttatgagatctgaaactaattgagcattaatgccaacaactatgatgtcatcatcataaacaagaagataggtgcaactatgtagagtggcctgaacaaatagaaaatgatctatttttagtgaagtaaagacaaggttaagaagcagtagacagtttttcaaactaggccctagctgcttgttttaggccatataagaatttttttagtttgcaaactttagtacgatggccaaacaaaacttggtggttgagtcatgtaaatttcctcttgaagatcaccgtttaaaaaagtattatcaacatctagttgtcttacgctccaccccttttttgacagttatacttaaaaccattcggatggtgaaaggtttgactacaaggttgaatgtctcaatgtagtcaatatcaagttgttgataatagcttttagcactacaaaatttacatttggcaacacttactcaacaacacttaataaaaaagtgttgtttatttgattatatttgtaatttgacactcttgaaaacaagtgttgctaaataactctcattgttaaacttataattttaaaattaaatataaataagcaatagtaacacttttaaataagtgttgttcataaattatagataaataaaaaatggtaacacctttcataaaaacgttgctatatatataatatatgatcctaattttagtttttttttttttggaaataataatctaattaatatcaaaaactgtatatttatttttgctttaaaaaatatatactatatttagtgggttgtaacttctccaacttttattgatcactatactttaacatatatgacaagacaacttggagaagagagcaactatccctctttttaataaactaccatattagatatcaagctatcatccatataatatccagtaagaaaaacacatatcctccataattttgttcaaaactctcaaaataccaacactatatatatagaggtgttgtggaccatttcaagagtttagggtcaagttataattaagctctctccatttattttctacatagaagatagtgatgatggtgaacgtttctagaattatataaattttatgctatatatatatgtatatattttactactaccaatgtgaatacctaatattgtagtagaagatcttatattgtttttaaatttttattattttgttttatttttgcagtgctcataaaaaggagaactatagtgctttggactagcgaatagagatgaacatcttcaagctttcaaagaaaaataaagttaaagaattaaaaaaaaattctagaaatgcatattttgtttttgtacgaacaatgtatttaattgaatgatcttgaattatatgtactaaatttgtattgtaagcatgaattttattgatggaatatatgtttattattttttctttctaattcacaaaatacaatgaatctaaattaaaaataagacaagtataattaaataataaatatatttaaaaagtaattattaattaatattaataaataaagaattaatatatcattattaatattgccataatagttacttaattatattaaattggcaacacttttaataaaaatgttgtccaatatatttttgactttgcaacatatggtaacacttttataagtgttggcttatactattacctttggtaacactctaggagacaacacttttaaaagtgttacctttaaattttctttaattaaaaaaaagtgttactaattgtattttttctagtagtgttggaagtcgagctatgtacctagagatggtttaattaggattctctttcaatatgtaaacccaggtttaattaggattctctttcaatatgtaaacccacttgcagcctatcgcagctttgttgggaggaatatcaaccgaaacccaagtgccattatttttcaaagaaaaaaaattctatttgcatagttgtgttccaaggaacattcttcaaagcttcttcaacagaaaggggtgtgagagataccatcaagactttaggtttgtgaatgtgtgcctttgacattgtggtcatgggatgggatgagtgttaccagtggtgatggcaagtggagcaacaggctgaattggttccataggtactggatgaacagactgtggaagatcaattgttgcatatggcacaagaggtgatgtgtgatggtcaagagagttttgaggagaaattggtgttgtagaatactcaatttgtggcaaagactagagagaaataagaggaccaatgtgagaagtgacaagaggagtaactgaccttagtaatggctcaaatggagaaaaattagaattgataggaaagggccctaaagatgagggaggagagaccatatgaagtacatgaataataggaggctgaccatgaggagtgaatgtggaagatgcggaagaagaatgtttgtctttggaagcagcttcaaaaaagagaaaaacaaactcattaaacaacacattcctggagatatagagcctaccatctctagctaagaatttgtatcctttatgaactatattgtacccaagaaatacacaagattgaaatttatgctgaagtttatttatgttgtaaggcctcaaattagaataataaaggcacccaaagactcttaacatggagtagtgaggcttggtgtggaataagatctcaaggggagacaaatacttgagttgtagagagagcattctattgataaggaaggttgtagttctacaagcctcattccagtacttcaaaggtaaagatgcatgggttggaatggttaaggcactctctatgacctgtgctttctttctacaatcccattttgctcatgagtgtggggacaagataattggtggacaatacctaaagttttgaacaatttggtaagagacctatactcaccccatactgaggcaatctttctggattcacttcgccttacaaccttagatttgattggatagccttaattttgtaatcaagctgtaattctacttatgttttgaatgtggtaaaggtggataaagcttcatttttagttcttaataggtaaatccgtgtctaaaaaagcatccacaaaatttatgtgtgtctacttgctattaatgatttttctaagtggcctttcttcctcattgatgttgggttgtttttagaggatttaacaagttgatgttcaattttacaagagtaaccctaattcatgttttttggttacatgaattagatcggcatgctcttcgaatggatagagaacttgtatgattagagatgagatcctttattttttaagaattcatattttttagtctgtataatattattatttttattttcaatgaatatgttcattgtcacaacaaaaaaaaaaggctaaggaaagaagtgaccacaaatacatagtttaataatgtaaatgtccattttttaaaagtttagaaaaatggccaatataacacattatgagttcgtttggtatgtcgtattacaatgtattgtattgtatattattagattaaattgtatttcatgcaatatttttatgtaaaattatgtgtggtattgacttttataggtatctaaatatataatattttaatataaattaaagtttaacatagtattatataaaaatatggtatataatttaattcaatgtagaacaatacaatacaatacaataggatctaatacaacgtaccaaatgagccctaaatacacttcattaaatatgtagggctatttacaaaaatatgagaaaaaaagtaaattttggtatatatcacatccaaacttaattgcactaaatttgcaactaaattttagaggtaatgaaaatattattactacaagtaaatgtaacgtaaaatattttaaatagtaggacaacataatgttaactaaaataatattttcgtaatgtaactaattatgtgatacttaaaatacgatttagtttctttatatatatttttaaaaagtaattatcgaaatcacacaataaaatagatttatatatttagatataatcatgctactttaaatataagataataagacacttatagtaaactgccataaaattaataagaattaattatgcatactaatgtcaattacaaattatttatgagattataaattactataagtcttttattatattatatttaaaagttacgatatggtatattaataaataaagtattttgatatgttaatataaaaatatataaagttaccaaataatatcttaaacataataaaattaattgctatgaaaattattatacatactaattttattaataaactatataataagctatatattttatatatataacacttgaacttaaatgattaaatactaattattttttaaatgattaaatatcaattatttttataagttactaaaagtacatattttgttatttaatgattgaaattaactaaatgacgcttaacatcaatttattttagtaaacaattttgataattactaaaataatttataaagaaactagatagtattttaaatactatagaacatattataaatttgactaagaagctatataataatttattatattttattaattttaaatatatttgaaggtaacgtaaaagtttatgtatagatatatatatatataaataacataaatacatcttgatcaacaacataatataatctaaaaagaaaaatgtaattttaacaaggatgtatatgagataatatgatttcgaaattgagcttattaaataaaaatcaattagtatatatcttagtgccttatttttttttttaataatatttaataactcttaattataattttttttgataaattagtacaatgaaaaatacttttagtatgatatatattcatgaatttgtttgagtataaaatttggttatttttttaaaatttattaaataaactaaatggttatttttaatttcaaacatcttattttgtgatggtgtaaaattatatgcttcttacatgttaaaagtaaattcatttaaagaataggtcatattggtattattttttaatcaaaataattaatagtgtagttgttattctaaagcgaatgctatgtggattggagttttgctcctttgtgtttgacgaagactttggtttgatataagccatttcttttgtaattgtttgaattgaatgaattctattgaaaaaaaaaaaaagtgaatagaagaaaaaaagaataatgaaaaatcaacaaaggttaatggtcatgcatttaaaaaaataataaaaataataataaaagatgcgttgaataaggaactaaagaaagaattgcatggatttatttatacaattcgtagagcattagtgctaatgatatgattcaaattattattgttatatttgttaatatttaaaatattacatatatatataaaattccattaaatataacaatcagttttaaggaccccaagtaacattaaactatgtctcaaacatggactttgcatgtaattctgttgtagatggaactgcctgccgcaatttcgagactgtgttactactttatcaccaatttcaaatcatactccaatgtgtcaactttcaactcttcatataaaatgttgcacattttctgtaaggttgtgtcagtttcaccatcaacatcatacttcctttgcttttatacactcaattaaatccttcaacatacactccaaataccatcatacaatacaactagaaacacaagcgatcttgcacttcaatacaaacctaaaacaactgaatcagaataacaaaaattacaataatgggaaatagttttgacaaacagccaagaaccactcaagaacttgtcgaaaagcaatcgataaccgttaaaaataataaataatcaatcatcaagaaacagtcgagaaatcgtcgataacatgggacaatgaagtttaaaaagacaactatacacaccatcgaaaaaattatcgactgtcaagaatagttgcaaacacaaaatcattcgtcatttcgacaaataatcgagaacctattgaaaaattgtcgagaaaggccttccctgaccttaggatatttgcgtcgagaacctgccgagaacgtatcgaaaaaaacatcgagaaaaatacaaacccctagaatacaccaaaaaactagatatcacaattttagcaaaaaatatatcaaaaccaaataaatacaaacaacaatcacatagatctactgaaaatagactatatttttacaagtatttaacaaaatattttaaaaaatacttacccatgaacccacaagctccggtctccaaactttgtggtgagacatttcgggtctttgacgggcttccacggcaaatatttggatttcaacgaagatgagtgggagctagagagaaattgggggaggagggagggcaggggccgtctgatgatgtaaatttatatatatatatat

SEQ ID NO: 36348 - DNA, 6354 bp, Cannabis sativa
acttatataactacaacagattgtgaaaataattttaatctgaaaaactctcattaatgtgaaaacaaatagattttgtactagaataagtttttttaagtgtactgtaaacttttcataaatttcaagataataattaattaaagagagaaaagggtgtaatatagttgctgaggtaagcatatatgtaataagagatgtgaaaattgttttgtcagcaatatgaatatgctctgtaagctttcaatttggatagaccaacattagcataaatatatagagagaaatattaaaaagtaccaatagtgtataaacatctttctatgttttaatgttgctattggtctaataactttgaagaggtatgatgaaagtactcttctcaataacaatgctcatatatacataaacatttttgcaatatatataatatattattgatgatgtgagccaaaactaaccaataaaaaatatcaatagttaaatctgtcaaaaaataatattaataatagaaggaaagtattacacgcctattctatattattgtgttttttttaaaagaaaaaataacgcccatttagtgcgttgataatgacccgacgctttgtaataaaaaatagtaaacggcttattttcccttagaatttttaaggtccccaaactttatgtgtagctaaaatcccacttaagctataaaatcattgcaaagtatctctttaagaaaacagtttgctaattaatataagtagcgcaataggtgttaatgtggcgtaatgacagttcctgtggcataattaaggtgcagtagaagatttcttctacaaagacatagtgtgttaccttgtacactttccttcctggaagtacttgagaaaatgggtgagtctatttccaccaaatatacttgttcttctgtaaaatggtattgtacgggtatcgactctaggatatcaacatctcttgttaaggccaccttggcaagcatgtccacattggtgttcctctccttggggattttgtttcaccgtatagcattgtaactgctccaagtagccatttatttgtgccaagtaagcggccgccatatctttagtctctttgcttagtactcccctttcacttgaaagaccactaggtgagagtcattgaaaatgtgtagtctgagtgatttttagttcttttactaaccgtaggccagcaagcaatgcctcatactttttcttattgttggaggcttttaaatttttttgtgtagtacttagagtttagattctcaaaagtgtctgtaaagtcatatatgattataagtaatagttgaacaattttatatatatttaaatattaaattattaatatattatatttaataatttatatataaatatctaaaaatttattcatgcacgaggatatgacgtaatataattaagattattggtcatgaaaaaaatattcaacaacatattaaaagttataaaatctttaatcaatagttcctagtatcgttcattgatgccaattattcggtgcaaggaatctcgattcagatcactgaagtaggacaccttgatgaaggcgttttatataatcgaggttatatatgacaaggaccgatatgtaattaagttatatttatcaaactagttgtttaatataaagacctaattcatatcacaacgatgattaattagtagatcggcctaaatcttaagtaatcataaactcgtgctcatgttactattttttttatccactcgttaaagtttctttgaaaagacgattcttataaattctgttttgggaagctaatattgtgtattgatttacaatatataatcttgactttcataacagatcgaatgttgattgcctttaaatgttaattctaaaattgaaaaattgtgcatgagtttagattgaatctaaattttactatcactaatgaattaatagtactaaaggataaggggataattagaaggattaaacggtaatttgaccaaaactaattatgaatcgatacatgaagggttaatcattggtattgattatatcaacgggcactgtagttaaactcaaaaaatataagtttataattactaagagttcaattccatatttttatgaaattaataaataagattctttggttgataaaattcaataaataatttaatttattgatacttagtattataggttcatggtccatagatcaccactatatagcactatcaaggtatggatgacacaagataaagatattaaaaaaaaaattactttgaattatcaaaatagtaattatttattttaaattaattatttgaataaattagggagataaaaatattgttacgacgaacaccaacttgtaataattattataagtgggctcagtcactgtgtaataacattgatagcctatcactattggtggccctaatgggtttatttttagattaattaattaatttaaacgattaatacttatttaaatttgaatttgaaaagtaattatagatatttaatatggtttagatattccttctagatagttggagataattttaagtggttgagatattccctcaatcaattattaaatttttattttaaaccaaatatttaaatttaaagttaatgtttataacaaaatcggttgcagatatttattcaaataattaaatattattatttaatatttaaattataaatatcttatttaattaaacttttattattattttattagttatagttaatataaggatataaacttaaattaatatatacatattacttaggaaatctaaaaaaggttaatcgtgtccttattttttctccagagaatattcttgctcatgtgttgagataacaacaagaacatcatatttttttgtatcttgttatctacgtttccgtataagtgacatgtggcatcctcaaggtttgattagtccgcataattccaagcccgaatccttcctgcatacgaaggccctttccaagtcagaaatgggcctaagcccttccaaactcccagagcgtagcttcttaagacacgatcctcacatttttaaaaaatcatccagccttccaagagatggtgcaaacgaggtcctttagacaatcaacaaggcacacccggatagaaagctcacaaggtgcatctagaaacccttataaggtgacgtgggtacccgctgacacctagtcacctagtcctactaaatatgatcttgtcccctatgtcaggacatggtagtgcgtgtactacaaaaagggatatatcgccttttatccaaaagtgtaccctcgagtgacacctgtccagatcgcctaggcctccttccgtacgaacatttctgccccacaagccaaaatcctatcgcgagcctcaaagccatgtattatatgtatttaccccaatagttgactcattttgtacagaaatcctagcgggtcatgggtatgcccgaatttgaatctaaacttataaaacccactttatcccttcatgtacaggggacaaagaacaaacaaaggaaaatacttctaagttctctctaagctttgttcttttaagagaaacctagagaaaaacactatagcaaaaattagggttcttcaagttccacatcccatttgtaatacatttaaagcctcacaaagacaatacattgactcgtggactatagtttattaatacccaaaccacgtaaaaatatcattctctcttttacttaatttaatttcttaagttcttatttaatttagttttcgagatctcgataaatattttagtgctttcactgaaagctctagaatggatcgaagatacctaacatttgcaaaaatggtggctactaggaagactgttgtcaaaaaaccccttccttcaagctaggatgttgtcatggacaacgctaatatgctccctctaaggcacgctcagcggcgccttgtgagggatggagaagtgtctaaaactgatgacagaatggttgaaacaaccaaaaattgagaatagttcattaagaaaaactacaagacgaggaagaggatgaagaagaagaagaagatggtgaaattagagatggatactattatgaacaagaccccaaggtgacccaagtatctcgtgagttagctgaaactcaatgaaagctagtagaacaagaggccttttcttgatgaatggagaaaatgatggtatgactggaagctatactcgatgttatagataaggacttcaaagaatatgttttagaggagcatgttaataagggaaataagagcaagccctactgatattggaacctcagctcctctaaaggataaggggaaagaaaaagttaatgaacctcaacctaaaaaatgttgcattacctcctagaaataacgtgaacacgaccaagcctcccttgcagacaaagaaggccaccaatgcctatgcgcttggacacacttccactttgtgaggccacgttgagcataacaataggcctagagctcaggtttgaaggcctactattatgggaaggaaaaatcgctctagtgattttgttaatctgggtgaaatttttcctgaggacagttgatctatagttgacctccgaaggcgtcttgattccaaacgtgagaaagccaaatgagaaaaagcgagccctcgtgggaatgatctccaaaactacatcaacgatagaatttgtgaatgtgagcttttagataatgatacaagcctctttgatgaaactggtccagaattagagtggagctaaatcgaactcggaagacagatccagaactgtgtgacaagcatatcatcgatgtcctactagaaaattttaagatgccatagatggaattatgtgatgggaggaaagaccccaaggctcatttgtccaaatacaatcatttgatgcaagtgtaagagttagtgataaggccaattgcatttgtttttcactgacgttagccacgtccgctgaggattaatggaaaagattatcacttggattaatccacgactagaaggagttaaagtctaccttccgaaaacaatttattgttgctagggattacgacatagcggtcgattccctaaccaatctcaaacaacaaccatgcaaaagtctgaagaacttcatccaacgaatgatggaagtagcgaccaaaaataaggtcagtgatgacatgaaactcatggacctctagtttgatagatactctggaaaatgtctacaaggaaatctataatattgtacagaaatcttatcgttctgggatagcagggagctataaatcctcctcaggtgtgattctccctcaagctcctggaacacagtttctgactttacttgcttcgcctacccacattgcggtagcagtcatagctctaggactaggaaatccttatcttctatggttagctctgccacctgctgatgaccatttcgccactatctctagaggtccccaccttgctagaaatactcaaaactccccaaagagatgtttaaacgaactggaacattaagggtaagtttgcactttagtgcaattaccaacctagcgtcccagaatgatgattcttctaatgaccttcacagaggagcatgcaaggcttatgaactttcctaacaacgaccctctagtaattgaaggacaaagtgcaaacaaaagattcttcagagtgctagtagacaatgacagctctgttagtattttgttcaagtttgatttccaagcgattagactattaaaacaaacctattaccattttcgataaaattataaggatttaatggcaatagtcatatgttatttatttaaatgcattgccttaaaatctataagcgcggtatttagaacatatttgatcactgtctgacctacctaacttatgggtttgcaggctaagtcctatataatggattcccaacaaaaaatgagaagttgtggcaacatggtcgagctcgaaggcagtcggggaggtcaaaatcctccaaatccccatggacgcggcagaggccgtggaaggttttaaagaggtgtacatgaaaatccattacaagctctttaatattgggagcaaagatttgcagaaatgcaagcctgaattcagaggctaacacagcagggtccccctgtagtgcctccactgcaaatgtcggccgctttggttccagcggtgccaacagaacaacttattgttgccaacaagtatggaacctttgtatgaaaggtttcgcaaacaagcacatccagtttttttttttgggtggtccggatgtcatgagaggcaaatagtggctcatagtaattgagaggatcctgaactttatgggtgtc

SEQ ID NO: 36349 - DNA, 5714 bp, Cannabis sativa
tttttttttttttttggataaatgctaccaaatagtattttggtaattagataaatgtttttttaaataaaacctaaccaagtggttaagagcacgaggatttggtgaatgactaaaatcatcctcccctcacacacgcaaaaaaaaaaaataataagcatttgtcaatagatcactaatagtgtattttttgctttaaaaaatgaacaatatacaacaaaaggatcaattttgcaatagttacaaaatgaacaattttgctatttatcttttattttactagtgtaaaaggaaaacaaagaagtgtcccacataatcattttcttttgtcttctaaattctaattatatttaaataccttctattttatttttattttcaaataaagcaatatatactcatcatcataaatactaccgattttattttttttttgaaataaacatatataataaaaaataacaaaagttgctctacaaattgatcctaagtaataattccttcacttcaaaatctttatgtctaatatcctaccatgtacaaagcaccttcaaaacttttaaaaataaattggtaagcgccaaaaaataatgacacatgtttcccatattagcattccaaattcataacatcgacaataaagttcatgacttgtgccaattttgatatggctgctttccccatcgtttcagcatatgcatagagcctgctgctgtaaacagccccattgcagcaatgaccagaattgtagaattctcaatgtttcgatagtagcctccctgaaacaaaaatgttgtaaaaaaaaaaagaaatcatggtcagttcagaagttgttccgagctattctttttgtattgtaagtcatcaaaataagtgaatcgagtatcattattatttgaccataataaatgccttcactcaagtgacaaaagatagagaaacgcacttgcaccagaaaaaacagaattgtgacatttgcaggggcttgagaaaggcttatcatccctccacgcaactcattgggcacatacctgagaacatgaggtaacagaaagccatggaaattaaactcaatcgtaataacaaatgactaatttttattgtgaaagaaaaaagggaaagaactcttattcaatgtacatggtccttaatctggcaagtgaaggcgaaatcagaccaacagaagcactaaacaagcaaaatagcatcactaaaacttcaatttcctgcaaattaacaataaaatcattataaactcaatagctagaaaataaatattgcattcttaatactaaaaacacgattcatacctgataatcgtaagctgtaatacacaataccatcccggctataataaatgcacatgttaagtaatcctcagttctgagagatgatagtccaccagtaatccatgggaataatgtgcttcctagcattcttgagcctagaagacatggaaatatcaatcctaggtgcacttctcgtccatcagcctaaaaccagaggcactggaaataaatttatggaattcaaaacttgccacaaaattaatggttaaaagaaactccattaatggttgaattgaaagacaaaagacaaggaaagacaatataatcacttgagttttgcaagcaattcttgaaatggttaccataccaccacagttggagcccacagaatccagaagaccacataggaaaagtgaaggcaagcttgtgcccaagccagcagccatatccttttatctgtcaactaaccaaaaaattatcaaaaactagatcatttatgtcgaccttttcaagcagcagttaaatatctttctatttaattatattttacatatttttgccactccatgacatctataaaatgccccaaattacaacaaaaaaacagaaggcatttgtgagaaattcctcttggaacctcgtttcaataaactcaagaagcaaaaaagctttgccaaaagagaagtaattactgtactaagtgtacattgagcaagtaagcaatgtagttcaagtagagaaggaaagaaagtgggatgaacttataaatagtatataactctcaaccttaccgccaagaatatatgttgagaaggaaatcttatactccttgaacgctgctgtttgtgggacttctgcccatcccttggttatataaacaatacacatcattgcaaccacaacagctaccgtagaaggtgaccgaaggtttctctctacattattatcaattagccaatttgaaaggatttgacttccaattagcgaggcagactcaaagaaactcatcagccaaaatgtttcattcaaagcatcacgtctgtgcccttgctgcaacgatagaacatatgcataattataaatgaaagagtaactatatctgccgtaggaatataaaagcacaaaaactgacaaattttcaacattgtattggagaaatgaaacaggataaaccaacaaatcaaaactaaagaatggaaaaacaaaccttttcatgatgaactaccatccaggtctcaaaactgaacgaaaatatggaagcagaaactgacaaacaaatactagccaccaaaatacttggatgtgcaacagttctcttcaacaaggcaataaaaaggtgtaagatgcaaaagagcaaacaaattttcttttgtcctctgcataaaacacaagataagataaatattaaagtttaccaatgtctgaaaatggaaaataaaattaacgagattcattgccaagaacagcagttgctgaaaagcattagccctaagctattaaataagcagattacattctggctataatgtaatgagtatcctcaccttaaatagattatgcaaactaagttctaaatttctggaagtgaggaaattataatatgttgatgttctgctagtataactaatgaattaagatttagaagtagagaaaagcactgatcaagaaaatagatgaataaacttacattaaatccgatactactcctaagatagtaccaaagaatagagaggctccagttcctacacagagagacaatactatgtgttctctactcacaccgtaatatgcaagctccatttcaccaaaaactgaccataatccttcaacaactggcaaagtgggttataaataaaacatcattaatagaagaaaactaattgaaatacactctgctcttctgtttggttgccgagaaaatttaagaaagaacaaagaaatttcaaagacctcaaatcatccagccttactgcttgcgatgctcaaattctcatttcattatcatgttaaatcaattcaactttcaaagattaaacaaactttctacattgcctacatgctgtagggcacccaactttttgaaagatggatcaatacgtgaagttaaggaagtgtgcacagacctgaagcaagagagtaaaggagaataaagttcctctggaaacgaagaaatgaagaggaagacgagactccatggtcgaaaacaacaggagttctgctactgctgctgaaattcttggaggcgtaagggaatagagcgatcgagaagacacaggccaagaataagagagtatacagcgatggatttggctcccaaacggagctctcaataaccactgccattgattctctctcctgaaataaaggttggtttggatctcagagaaagcgagccatttttggacctcgaagttggggaagagtgtaactgtaaatgggttccgcttttcagtaatccgaataacccgacccgacccgacccgaataacactgttaagctggctttaaaagcaacgacgcagttttggagcttccaatgacttgtacggatcatactagaaaatcactacaatttaaatctttcaactttgatgtgtaaaatatagaatccttctacaaaagttaaaagtccaaatttgtcattgacatttttatttccacccaacaaatttataaaaacattctatttaattatttttattttatataaaatttatatttttaatttataatattctttctttaaacttttttttttttttgaaggaaattctttctttaaactttccatctgtttaacattctttaaaaaaatatacatacaaaataaaaataaaatatacaagaaaaaaaatgatgtgaaattttattaaaaaaaattatacataattttttaaaaaattaaattaaataattattgaatttaacacaaataatgtgaaaaataaaatattatgtgattatttaagactaatttaagtgttttttttttccaatgaactttaatgtattataattgtatctaaagtataggttagtagttgggtattttgtcaatttcaataagaaaaaactaaaaaataggtcaaaaatttctaactctcttcttcgtctggcgatgcatgtttgttggtttggcatcattttctactctaaatcagtatatatgctgcacaatgttctatttgttttattatttttttaatctcaccatattcaacttttcttccttccaagttaattttttactttctttgcattgaaaatattctaaattgagaaatgattctcgaaaaacaatatttcatttaatagaagataacttgaaaaaactcaaatccaaacaaacataaagtagatatatcttgacttgtacttcacttctcaatattattgattagctgagctcaatagtcaatactctctctttcacaacttcaagtacacgtacgtacctagtattgactcaacatgtttttcataattatgaaaagaagcttcagaaaaacataataaattgttgttaattaatactaatagtaagtactaagacaaaacattatatgccttgtaatataagtttccatcttatttatatgttttattcacaccaatgttaaaagacccatcacaacatttttaaacctccaatgaagatgactactttggaaacaggtacttggaaagtaattacactactcttcatataattatatacccagtaaggacccaatttagtataataaaaaagacaggacctaaacaaataaagaatattaaaaactaagtaatagagtgggataattctagtgccatatacacaatatatgtttattttatccgaaactataaacactttaatatgtacttgttataaaatgaggctaattttttgaacccttcgtctcctttgaatagcggtcaattcatctactgctgtagaagaagctcccatggtgctaaagggtgtagaagacataaaagcgccaattattgtttgtcttgaattggagacaaaggcatgttactgaaaacaacacgatattgagatttaatcttaatggcaaacacaattgtcttaatcagaaattaatgttagtccctccaagtttattatttcaactcatttttctatacttactgtttgcacgtcatgaaattgctagttttcctagtataagtgatttccactcctagaaaatgttcactatgattttgcataaaccaacaattaaggcaatgataaaaatggggaaaaaattctatataatagttgtcaagtacacacctagttgcttcaatgggtcccaactccaacttatgtgacatctgtactttcagtgatgaggcttcaattcttcaagttttctgtaaaaaaaaaatcatagatgaaacttaagtggatgggcaaaactagatgagcta

SEQ ID NO: 36350 - DNA, 3035 bp, Cannabis sativa
  modified_base (2315)..(2326): a, c, t, g, unknown or other
tgaattatatgggttaaaaaagaataaaatattgggcaaaataaacttaagtgccgtacacaataatgggaccactttctagttacaattttgccactttatttcaaccattcccatgcattgtgccattgccactactctgcacagacggtacaagcgtactattgtccttgcacccatcccgctcctaagaggacgaaactgcccctgccgtcaccccaggcaactccgccgatggcccatcgcctgagaccatatcgttatttgccacctcggtaatcgcttccctatgaatttctgtccccaagagaaaaggttcaaatcctacacctttttgtaaaacatgtcgacgcaactcttcccaaccttgaacctccgccacttcctgttctagcatgtctctctcataaggggcatattccgaaaagcagtctttaattctagaccccagttggatccagggtctatacattggcacatccctttcaaaatcaccagtaatcatcttatgttccctgtgacataggacctcctcatggaagatgaccccacatttatagcacacttaggggacattttcatatttgaaataacaccaaaggtttactccctccggcatggggaggaacaaatccaccagaagtggtttgcgcagctggagattcaccctgaaacgaatgtattcttgggtggggaagccattcttcacaatctgatctatgcaagcctccgagctaatccgttcagtgatcgcaaccgtgtttttcatcgtccaaaaacgagggggtagctcataaacctgaatccaagctgggatacgctaaaatccacgctactcgactgaccgtcctcatgcattggtttgacgatcatgaacccatcagaccccctgcaaggggcattcttcacagttaactccgcctcatgctgcttggagaagcaaatgataaaaaaattattgtttacaatataccgtaacatgcatatatcactctacataattgaaaaaaaaaaacaaaatttttaataaaagttacaacacagtaaagataaaattatttttttaaactgatttaaaaaaaaaaaaacaaataatttttaaagcgatttcaaaaaaaaaaaaagagtttttaaatatatatttaaaatgaacgggtaatgtgtcacatacctaaaactagtgtagttacatttttttaaaacaactagtgtaattacattttaaggtgcacaaacaatacactcaaataaaacgtattgcgatttcaaaaataaataaaatgtaatataaaataaaatgtatgcattaaagatcgaaagagtacaaagatttttttactctcaatataaatatcagactcaataactataaatatctaaacacatctaaccaatactcttgtaagctacgatatcattccaacaccactcattcaaacagttactaatcaataatgcaaggtaatgggtcaaaaagctaaagaagaaaaaaaagaagtctacttaaatgaataagattatgagagaagagagaggtaactgcaataaagaataataaatacgaataataatatgcagaagaagacaaaccaatagaaggatcggatgcattcttctcatatggtcatgacatgtatgagagtgttttggtcccacatagaataaattgtagaaaatgaaggtatatataagaaacttcactcattgtcaattagttttgagatgaaccccataatttttaacatgctatcatagccctatctctttgttcatagacatggaaccccataattctcaagagagaaaaatattaatcaaaaatattattaaatattattagtataaaataatattgatcttatataatttaatttaataaatattataaaaaattattaattacatataaaaaaattatcaaaagacactattagtattagtgtaattaattattaagttttatataacataaaaaaatgagcattactattaagcactaataatagtacttagcaaattctagacgtgtctactttacgattagttagctatagtttttaaaatttatttatattaaactaatatttaattacacaaatattaatattaacacataaaaaaatagtaatcagtactaacactttttaacatttttttttaaaaaatagtttttaaaaattaccactaaccgatcattataaaacccctcacatcaatataatattatatattagagcattgttattacgcactagtgatgtttagcacctttgcgacatatcgcgttgcgattagctagtgatactccttaaaannnnnnnnnnnnaattatatgagacccgatacttagtttaaccaatagtaatattgacacataaaaaggtactaagcacccactcgtgctctctagcatttctctatatattaatagcaatgcttatggttgtatggtcacctctctacctggccgactagagagttcccattggtcattattggttggtgagcctttaaaagaggcagagatcagcaattatatccttttccttccactttctttttttggaaatttatcctattctctctttccattacaataaacttatcttaatcctcacaccattaaagccacgcgttttacaaattatactgtagctgtcacccatgtcggtaactcactctctcacaatatctgatcttcccaccacgtgtaacgttcacaatgcgccacgcgtcccccaacatgcaaatatggcaaaacgcttctctcttataagcctctcacattttgtcctctgagtccactaaccatccaacatttgtctataactctcttattctgctgcttatagaaatttatcatttaatttgaagtcttaatggatcatcaatctcaagatatacatgctcacaagaccggcgaaccccatttaggtgactgttgttttaatgaaatcttcatttatttcctcagttctttttctaatatgaagtgttttgatctgatctgtagtaggggaaggtgaagatgagca

SEQ ID NO: 36351 - DNA, 3197 bp, Cannabis sativa
  modified_base (1683)..(1689): a, c, t, g, unknown or other
tttttttttttttttatggaacacaaacatatagtggtacatacacgtaatttgatgaccatattgtttcctacgatctttcacttaaatattagcaaagtaagaagtagcatatatagagctcataagacttaccaatgacaagagctttaagagcttcattggtattttggcgaaacttacgatgcatccaacaaagtaactgcaacaaaaagaccactagtacatgagatgaaataaacatcatatgtaacacagctttttaatgttatcatatcatcgatccaaagaaaaatttactataactacgtacgtaccttcatcttttgattagtgttaatttctcagaaagttttgctgataacttagcttggtttggtgatgactgttgagaaggaaggaaggagttaaggtatataggttattagcttctcttgtcttagttttatgagtctgcaaatatatggatatagtgtagtcaaacgcttcctaaaagtgacaataagaggtatagctgggccaaaccatgaagatagttacaacaggatcaagtcaagtggccaaaatggcatgtaggtcccttggacccctccataatttttcttttctttttattcttatgaattctcctatcagtgtcacagtagtgttgtgtatatatagacatatatttatacataggggcttctattatcatataggaaattaattatgagcacatgtatattcttgtttttttatacacgaggacatgtattttataattcgtttaccgtttgtataaaattattattattacaacttaactatgtatgaaaattgaaaaatagctagaacggctttttcaaaattaatttcttctgtacaaaaacacgctatgtatgtatgtacttttagtctgaatgcagggtttgatttggtgattttcatatgtgcaattgaaaattaacacgcttgtattagaaagtcccacaatgacaacgtgtgagagcttaataatatagatatatgtatgagctacgttcactttgtcaattatttttgatatggaactatcatatatcttaccatacaccaaattctattctatttttttcaaccacacattgcacctctttgaggatcagtgtgaattaactcatcatgaactgttcaattgttcttcttcttccattttgataaaatatatacatgttcatgcacatgtactttctgcagaagatcatgagatgtgttccataaatgctagtaaattttcttagttggtagcagggtaaccccacaaaaaatagtgagagctagctagagagaatattttgtcataacccaatggggtcaaacataacaggacaaacatgcagatttctctaattagaaactcatggacttaattaaaaagtcctgaattttggttggtccatgatcttcgatgaattattttctttttagtccaaggagacaccttatctaattctttatcaagctatttattaattaattatatatataatgtagtttttttaatttatttaattatacctttagcaataaatatcttattagtacatatttggccttgttatcatcaattaacaattaattataaggctatcattttcttacaccagctgtaataatgataacaccagataagataccgtgtgtgtatatatatatatatannnnnnnatatatatatatataaaactttaacaggttaaactacaccttttaactttttggtgaagatcattgctgtcatgcattttgctttgatttttatacatacgcatgatcaatctcaaatagttagaacttatattatgtatatactacttcagtcaaaacacatatgtagtatcattaccacatttgcatatattttccgatctataaatatttatataatttgtatttgcatgtttctttccggcatgagaagaatgtgtatatatatagtagtgtgggttgggctgaacatgatcaaacagctggtatcttataatttcaagggtgttttctgttgtgtgatgctgaagttgccacatggttttgatctaattcttcctttttctgagcctttcatttaatttttacatttttatcaagtacatatatatatatatatatataaataatctgaaaagggggggatcaggataagagtcattatcattaggatgtagttttactcacagaacagtctctattttgatgagaggttgttggctcagaggaacttgatgtgccccaaaagcatcttcaccaaataattagaagttatttgggaaaagggttgtgcacttagagacaaatagtgagacattaatgtattttgatgagaacgaactatttcaactcaacaatttttgtttattttatatatatatatatataaagaatgatgatatatacttatgatgatgataagagtactaaccattaggcaattaataattgacatgatatttggatttttaataaaagtttatgcatgtatctcaaaggcagcagtagctaaaccgtggctatcatgttgtgcatccttattattagctaccctaccaatcgcatacttctcttaatttgtttaatatatattatatatattgaggaaaatcgtgaagtgaagtaggctagctatatacccatgtatctattacattattagaattttaagtatatatataaataaaatattatttatatatataaactaaaattcttttctacaatataattggcaaggaaaaggagcctcctataaatatatatatttatatatattatataaatcctgaaagttatattcgtctaattggttcggcttctgaaattttttctcatttttttttttgagaagctattagcgtttacctttttctattaaaaaataaaagtaaaaataaaaattgagatctataaaactgaagcttattacaaatctaattatagtgttatggagcttcaaaagcctaaaacgagtcctattattgcagcagtatttctggttatgttggtacactcccctgatatttaattttaattattttataatataataagtataaattaaaatgtgaaaaatatattattatatatattaagtatatgataaataaatatctaacctatggtcttaactttacacttttgtaatttccatattgtagtttgaagaggtgttacaatttatt

SEQ ID NO: 36352 - DNA, 6341 bp, Cannabis sativa
ctgcttaaacaatagacataagacaaagacaacaaaacaataaatggcaagcaactagaattaatgataaaatatgctaatacctttaaaaatttccaagccaacatattggcttgaaggtgacatgacaattgcaagcaaagcacgaagaccaataaccttcgcttcactaagactatcttgcttaagcagttctaaaatcatatgattcatggcaaaatcaagattgtgttctgctatggtcacacagaactccacaagtttatcatgttggacatcctgggtaagcatcccttttcgtagaacagtcaatagttgggcggttacactgtctaagtggtcccatatacgattcgaagcctgatttgcggcatggacactcaggtaaaacctcaaaactcgatgaagacagtccaatgccataaagcggtgggtcttgtcctgaatgattaaaccacatcatgtcatacaacttagcacctgaaatggaaagccataagggtatggctcctatggtaactataataaacccccataataatacattgtatgataaacctgaaaaagaaaaccacttaatcattgaatgttttctcctccttactaaactacagtaacttaacttactctaagaagcttgtagagttgatccatgtgtggattcaaattgttgtggaatatttgaggatcgccaagacacaaaagaagagttaccaagggataaccaacctaataaaaagaataatccaaatgagcacataagaaaatacatggcaagccagagatgggctgtgagagttaagacacattattatttaagacaaatatagatcaaaactaatatccaaaatatacaaacatacatatatagattaaaactagtgtgtgtactcattaggtaccctatgttttatcaaaatacaaattttgtaacattgttgtcaataatgtttttctggtacctgtattgtatacatatttagtaacctggactcaaatttgataattaaaattttatcaatatgatcaaattgcctttaattatatgagtagtccattcaaatttaagtatttaattacatataactgagaatagtttggttgaatttatcaaatttgagttcggattccaaatatgtacaatttcaaaatccagaataccatatgagcattattgataacaaaaaagtaccaaaactggctttttgattaaaggtgccaaatgtgtttatatgaataagtaaattaaaaaatggaaacaactttagctactctcaacttgtaaaggaaaaaacaaaacaaaatagcataaaaccttctacaggaaagcaattttaacaccaaattcaatagaaatgtaacacctgctaacaaaaaatataattggaaggatttaggtctaaaacatatgacctctgtcactttttcaaaaaaaaaacgtacagacaaatgtaagaaccatcatccacattaatatatcttttgtttcataagagaataaaaacatcagtaaaattatacagaaggaaaagtttcttcctataagtaaaagaagatgattgatgaacttacagcaatatgcttgctctgtttatccatccaatgcatgagctgtgctcttattcttccaacagcttcgtaccaaaaggtaagagcaggctctacacccaaaggtggccattggctttttcccccttctgccaaaggtgctaagatgtttgaaagcatattgcacagtgcatggtaaagctcagtttttcgtttatgcggagctcggttgagagggtttgctttcgcaacgaaggaagcagatgcattcaatccaccctcagttttcacctgacaattaaagttcttttaagatgaattgctgccatttttctctaggagaaagaagacatttatacatacccctaactttaagtagcgcattccatttatgatactaagtgtttcgcttcgggcaacactagtgtctattcgacgagtattgagttccataaaaaacctctccgtcacagaactaaacctgggaaaaaacaatgcaaagtatatatgttacgtgtttaaactagagctgcaatagaaataggactgcgtcacattttagtcacagcctataccgtggtccaatcaactaagagcatatagatcaagactttaacatgtttagaggtgtttatgacaattatgcaaccagcaaaacaaatttgtcaaatgtcaagcaactaatgggtcatagccacattcaacaaacagtttaaggctgatcattttatacttttcacaaccctcccacccccatcccccaaaacagacagaaacctagtttttaaacctaattattagccaattcattttgaatcagattataatgccgctattttgtaggtgaaaacaaacacaaacacaaaagaggtaaagggagggagagttcaacttttggaagaaaaagtctcataaaaaatattgaggatggtgtcccaattttttttttctttttttgaaaatcctaccttaccagcatttcaaatcctcacatagtgaatcaccatacataagccttttataagccctatcaaactatttgaatttttcggtgaatatatttcaaattcatcgccccatatgaattaaaatcatgtcttttttttcttttcaataaacggatgtattcaacagcaccccaaacaaaaactaagaaattgtttactatcaacagtagtaacaacatttgggtcattgcattgcctataagtgttaactatgcaggatttacattacagatgaatttgtagaaactgagaacctttggtcacttttgcatttccttacaaaaattgaaatccttgggggtacttgtttgttatttccaaaaactgagacatcactatgcaaaaactacaaaattgataaattttttgcattcaccctaccctagttatgttccattaaaatcaacaatattcagttacctgatgcgtgacaaggcacctaacagttgagcaaccaaatctaggagaagccctcggagatcaaccagtgatggatattcgacctggctaacaagcctgcattcgagaatatgttcagtccttaaggcataatgtttaccaaaatacaatagaagctcacacaccactgtagcaggctagcagcctaacctgtcagcattgattagccagtcgaaaacaaaattttcaagccctgaccaaagcttctctgcagagaagatgattgtaataattattatttatattatatatatatatatatatttaaaaaaaatgaattaaatccaacaagaaaattcagagaactaaccagtaagtccctcttgtggacagcactccacaaaccgaatacatgctgaacaaaagatacactccactgcaagctgaaatttatacaaacaagttagcaaaaatagcttgccattctgcactacagagttaatgtataaacgaaaaagaaggcagttattctggggtgaagcttaacgctcaccatacaaatagttatttttagcatgaaaataatagtgaatgttgaaaacaaatattccatactgcaaataattacgatatgatgtaaacatcaccaccagaaaaaggaaaataaagaaaaggacaatgacagttacttaaaagttcatgaaaaaggatatttaatggtttggccatgatattacatgtctataaattgagcccagaaacactacactccttcacctcaagtggcttgaaaggtctgatttatcaagttttaaaatgcaaacatatcaaaaaaaaaccctcctaggtaattattaactatgcaaataaaatgtgacaaacttgacattatggagtgtagtaaacaacatgcatctggcagaaactaaaagataaggggaaaaaagtttcggtgaagtttttaacagcttatataattatttatctaaagaaaagaaaaaagtttctcgctacagaccttcctttgaaatgtagaagcatcatttgcaccttttggtgattcactgcaacaaaagaaaatggaaattctatattaaaatgaaaacaaaccaaattatttgatgtttttaatacgatgtagaaatgtccagaagcattgaaaataaacatcttaactattaaaatactgtacgcaaatagaaacctaggtgaaagagtaaagaaaaattctaaaataatatcagcagaagattactagaaacatctcaaaatataatttacctaacatatgccgttagtattggaacctattttttattttttttttaatttattttttgtttgacttgataatttgatacaagcaggaaaacagtaagaaagctactcaacaaaatatgtttatcatagtgtatgccccaaaacagcagcaacttgctggtgtatagtatagaaggcagatgtgcttcactctggctagaagtacacttcagctttgttttgtgcaactaggccggagaggaatagcagaaattctgaagatacttcatctacagaaaatttgctttgcatgaaaacaaaattctgagttgctatttgggtttacacagctaaatgctttagaggagttttgttttcagatctagttaggaggtggagtatattttgtaatcccggttccttctttatttacttttgttttgtaatcccggttccttgtatttatttttctttatattgatagtttcatctcttttcaaaaaaaaggaagaaaaaaatgaaaagtacatgcaaacagatgtgttttcactatgtgaactcagttactagctcaaaacgcatatctggcagactgcaacaaataattatgcttacttcatctttgtcccctcggcggtgtgtgtgttgcaaggagaatcaggaaagcattagccatctgtttatggagtgcagattcgtccagaatctttggtatagagtgttgaacaaatttggcatccaatggtgtatgccttggtcttatactcaattatttgagtgcaaaccaaagggggtaaaagaatgccaaccatgtggatggcagcatcacttactgttttctggggagtctagcttgaaagaaatatcagaattttttaaggcaaggaaaattctgaaggaaaggattaaacttcgggtggcaacttaggtgaaatcaaaaggttttgaaggattaccatttttggatttaagtggaaactgggagaactttatgtatttattgtaaagattatccttcatgtctatgatgtaaaagttttctccctatcttgtgattgtcttgttatgtgattgttttctcgttttgtctagtatatctgtacgtattggtgttgtaaccacggtttcctccgccacaagtgaggactctcaataaatttgggaggaggtcagtatggatgtgtgacctttgtctcttttttgaaaagagaaagaggtcacgtgtcttagattgacccatcccccattttgtattgaaaaccctcacttgtggcggagaaaaaccgtgattacagaagttttagcacaaaacacactaaaacatacagtattcaaaacaacatacaagtatataaaatactcattggtccaaaaaaattacaacaaagttctccattctctacttaagtctaagaatgagaagtgctcaaaatactgtatatacattcatgtaaccctccttcatctctttttttatgaaaagataaatacacatgtttacttcatcttttaattttaaatttatgttatcatgaacctcataggaaaaatagaactacacacctttctctccatcttaatagagcttctaaaaggggaactggagtatgtcttgcaaccatagctaaggaatccaatacttgctcataagctggatccgacggtcgaaggtactgtccatcctgtatatattccgagtattaaagtatataattattatttagcatacataacaaactacattccccagtagaaaatcccaaacacaattgaaattgtataacgtactctaacaaaaccaatttcacacaaatactaggcatttggatttaagaaagtgccagttatgtcgtaataatatcagtagaaaacatcactagagtgccatacaattatggaacatggactttgaaggaaagggacctcttgtcttagacagatccctccccgtaaaagattgagaaccctcacttgtggcggaggtaagccttggttacaaaggacagagacaaataagacttataatcattgctgaacaaaatatgttagacaaggaaaatactacccctacatcagtgatttccattctctacataaatctaaaaaggacaaatcctcaaaatgctt

SEQ ID NO: 36353 - DNA, 5635 bp, Cannabis sativa
ttgtttttattttggtttctattttctcactcttctttgtttctctctccagactcgctgtcacactcaatttcctggcaaaaaagcataagaagaacaagaaaattaaagaaagggttcgcgtaaggctcgcgttggcataataaggcaaagcggcgatctttctctcatatcgtcatttattcgcaaaacattaaataaataaattaacttttttatttttatttttttctatacaaattttatttaaatcccaattctcaactgcttcgtccgtgttcaactcgcgtctaaactcaacttcttcaaaagccaagaatcatttttttcacagggagaaacagattcagataaaccccttttcatcattttctgtgtatcgacggtttgattttttgattcttcatagtaacgcgtttctgtacctatactcaaacacccttttcttagtttcttaccttttttgttctttcaaactctctcttcgatttctttgatcttaatcgctaagtgggctttgatcagatctcgtgattgattgattgatttcggtgggttttcttttatctttttcgtttctttttttcggttgggtaaagatattagtgagaatttggtgatgagcgatgttgaccgtagaaagagtttggttatgaagtaatatggaagtggtggttacacttaatacacgaaaaagaagaggaaggagaagatgtcgttttacattggtcgcgagtcgtcaaaggttggtcttttctatcctttggaggggatttgagtttcttttttcttcttctttattttcattgtaggcttaaagttttgttttctgctctttggtgcttgtgattgatttggggttctcttttattgattttcgtttttgtttgtgaagctatggaagagaatttgcgcagagacagccacagagctcaatcttcttaccgagaattggaaatatcttctagggggacttgtttgtcaggttcatttttcatcttatctctaatttagctaataatatattttgtattcctgaatgttttggttgtgagaagtcagaggtggaggtttggctagcctacttgaaagctagagtcttctggtcattgtgtaatttgtgtcagaaaatacttgattgggattgtctttgaaactggtataaattgggttgtttttttgttcaagttttagtttgtgtttgtcagagattgcatgatacgcaggactagcaatcttgccatttcacatgaaaattgttggctttttgtcttgaaaatttctaaagtaggttttgttgaagggttataatcatggtttgttacgtagtagtattttgagtttgagagaagatctatgcttttggacaaagataaagttactatcatcatgtcacgtaaattgccacgtttacataattaatggccttcacattctggatggtagattccctcactgatttacttctaaaattttcccaccttgttatgcgtcgttcaatgtgatgccactagtgtgatattacattagtctctaatcaattgatatttgttaagagtttttatgattgtaatgtataagtacactaattttaatacgttgacatttattttattgtgttcttcttgctttcttctggtattgctaaatcaatatttgtgtcttatgtctaaatttatttttgtccacagtacatacatggtctggctgcccgtggagttcattatatacatagaccggggccaacacttcaggatgtgggcttcatagtactaccagtatgtatcgattgattatatgttttttgtttcttaccatctttgtattgatgtatgtgagtgtctcaacactgtcagtagtttctgtttttagtaaccgggttagtataaaacaccttcacagcagaaaaatattttctcattttgaattttttgtgtacacaggagcttgggttagacaaagcatatatcagtgagactttgttcagctttatctttctgtcatttttcttggtaaggtttattctcttcttgtattcaatgttacttttgatttcagtttcactttatatgcttctgttaacttattttgtcttgtcagggagacatgtttaataatcttaggcatgcctataaatcttgagtcgccagctgcctttcctcagtcttagatttcagtgttcttgataattgacatggccttaaataaaatttttgtttagtcattttgaattgtaaattaattagtaggaattgaaatgttatgctagagtgatttccagtaaagttcatactttagttaattttttctgatattatgttttgtgctgttgcagtggactttccatcctttcattttcaagagcaaaaagatctatacagttcttgtatggtgcagggttctagctttcttagttgtaagtgatgcctttgggaaattaattcagttttcttatattttttgtagaagatttctactgagatggttcaatttaaaatcagaccagtttagaagtagcatttgatgcatgatatgatattctaatacaattaataatgctgtttgagtttttagcttcagttttaaataatcattttaactctgttacaccaaaaattatttgagttaaatacagatataaattaaaagattaatttctgtatagtttatattgaagaatccatcctcaaaattttctgatggcttttttacatttctgccacaggcttctcaaattctccgagttttaacattctattcaacccagcttcctggtccaaattaccattgccgagaggtatgttggattggttgtatacattgtaacgggaatgaagtttctggttttagatgcatatttatttaacacgaggtaactcgtcgatgtgctgtctcttgtattgtagggttcaaagcttgccaggctgcctcctcccaatagtgcttttgaagtcttcttgttaaattgtgagctacacccttttcttagtttccggaattgttgtttggttttaaagcattatatgcttactcgtcttttcacttgtgccagttcctcgaggcgttatatatggctgtggtgatttgatattttcatctcacatgatctttactctggtctttgtgctcacctatcagaaatacggaactcgcaggtaataatatatttgttgatatgcttatttgttaaacaaaatgttgcatttcttgttggactcgtttcttagtgctcgtttgattgcactttgttgcaggtgtataaagcagctcgcttggttacttgccgtcatccagagctttttgattgtggcgtcacgcaaacattatacagttgatgttgttgttgcttggtatgaacattataattcagtgtactatgttaactcggttctttcttacgcttttcgagctttttgtattgatgtaaaacttattattattattttcttctgcaggtatactgtcaacttggttgtattctttattgacaaaaagttaccaggtgagataataatcttttgctttctgttttgcttttgagggtataaaaaaaattgagccttggctgactgatctatgttacttgtcgacacagaattgcctgatcggagtggaggtgcatctctgttactcccactgaccgccaaggataaggacggaagaaccaaagaggagaaccacaaactcttaaacgggaattcgggggaccctgctgattgggtatgttgaatttgaatcttatgagcaaattctgaactcttttctttttgttcttccgaactgttgtttactgtgaatattttgattgcgtgcagaggcaacgaactcaagtcaacgggaaaatacttgaagatggaaacacagtccatgctgatggtgctatgaacggtgcttaaaatgaaccggaaagtgatcgatgtgggaagctttttgaaaagttttaacgtgaatttgtattgtaggggcctcctatgttggattgggacaacattatttgtattggttaagatcacattttgatatcagaatcagcatggactatttccaattgttgcacagtcttctttcttttttaacccttcttggtaacatgacatgactgtctcgtttttggtttttagcccacttaatctaatctaatttaatcagtgtgcattacgttacattattaacttttattggattaatcaaatagtgttttatcgatacatttagatgcaatattattatttagtggtaaaaccataacatagtttttcacgtaaaatagaaaataataataatggtacaactcaacaaacttcataacgaatgatatataatgtactatatgttcaactttgaccaaaagtaacggttatggtgctgatgtgcatgttcaccagtttttttttaatttttaaatgagaaaatatattaaaacaaataataataacaatggaggtgtaacccacgtgaatgcgtgatatgatagacaataaaatcgtgccatgatttttgttcttccagacaaagaatatgagtcggttcataattgtacgttctttcttatatctttattttatttaatgggataatattagactttgatcttaaacttcactgcactgtcttttaaaataaaaaacgacttgtcgtttttgacattgaacattgagcttagtagcaggtaggtttgattcatgtgttcacaatgaagttaccgtcaacctcttattataattttcgtatccgaaaatatgttgggatatttatttttcaattttttttagtggtgctcgttatactcacaacatcccagtaaatttttgaaatatttcgaatattaagaattatgtttctggtactgtacactatttcgattttttaaaaatatacaaagatgatactgtaactataacaaataccgctatgaaaaaaatatttaggtatgtgatttcgaacatggaggttgactaagaaattgcaataggaggttgtaattagcactcttaaattttactgtattgatggtcctattatgatccataataagaggttgtaattagtactcttaaatttcactgtattgatggtccataattgtgtatttgtccacattgctcatatgtgataatttgtaggatttttattacaccaagcaattatcatgtcatagaattttaataattagattaatattatttagtgattaaatctataaaaaatcgttttctacaatgaacattgagcttagtagtaggatcatagttaacatctagcactaacaccaccatatagaacaactataaaattaaataatataatatgtatggaataataccatctccccaaattatattggacaatttaaaatttgaaaaagctgatttcttccatcatatatcaagggaaatttaattttgtatgcatatttgattataaagttaattaggtaaattagtattgggtaaaatttgtaatgtgtatttatttttctataaatcccaaattatctcacatttcgaaatcatttctctaaactctatttgtttttctctctttccctcttgttctctctttccctttttctggttcttaccaaactctgtcaccaaaactaccgtcgaactcgaccctctctctctctctctct

SEQ ID NO: 36354 - DNA, 6613 bp, Cannabis sativa
aaccatgaagcatcccaagataccaattttgcactcgattgattgctaacaatgacacagttttgggctttcctagcttcatgataatcctccagataggagagagcaaaataaaggatagtatcagcttgttttggcaaagtaccatgcctctctttatttcgttcactccatatactccaaagaatggtagcaaatttttccaactgcaatgaagatcatgatacaaaaaattgcatgattaattctttcaaactcctattgttagaaaacagaccatcgagacaaaaagaggagcgctgccacacttgtcgagcccgtttacagaggaaaagagcatgaataattgtctctttgtcaccattgcaaataaagcaagtggtcgaatcattaatatacctagtgtgaagaatattagctactggaaggcaatcatgatagcacaccagaggaaaatttgaattttcgagggtaatgacagccctcagaattttttccaccattgttgagcttgaataccactagctgaaggagattggtctttcaaatgcatagccaaagcataacccgatttgactgtgtatattccattagattcatgatgccacataagagtgtcttgttgttcatcaagcattagcggaatgttaagaattttgttgacatcagaatccaaaaataaagatcttaacatggaatggtcctattgtcgagtagccaaaagtaaaactaaaactttcaaagttttgtcctgtccttgaaaagtcaaaggcttaaaggaagtgaatcttagccaagggtctgaagcgcaaaagatattatcaccattaccaaccttctaacgaagaccggtggcaagtaattacttaccccatataatgccctccaaattaaggaaggataagaacccaattcagcatccaagaaagaacaatttttaaaatacttgggctttagaacacggctaagtagagatgaggggttagcaaagatcctccatgcttgctttgctaataaagcttgattaaaatggacgaagctcttgaaatccatcccaccttcaatcttagagtgacacaacgctttccaagtcttccaattgattccattatatgaagagtttgagccccactaaaatttattcatcataatctcaatttgtttggttaaaaatttagagagacggaaataactcatcgcatacgttggaattgattaggccacaacttttagaagaatttctttgccaacaattaagaacaatttttcttgccaagcagagaggagattccataatttttctttaatttccccaaagagaatatttttgtctcgaccaaaataagaaggaagtcccatatatctttcatggcacggtttgatgagcatttgcaagatctgatgtatgtgagcttgtactgctggacgagcatttggagagaaggataagacatatttttctgtgtttaatcactgaccagaagcactatagtaaagatcaagtgagcgcttgattgcagcagcagatttatgatttgcacagcaaagcacaaggctatcatctgcaaaaaataaatgcgaaacaattggggcaccacgggagacttgcaaaccatgtaagttgcttatgttttcttcctgctgcagtagacaagaaagaccttcagtgcaaataataaagaggtatggggacaatgggtcgccttggcgaattcctcgggtaggaaagacatgaccttggaccttaccattaacagagaaagagtaagtaacgctgcttatgcaatgagtaattaaatccacagcagctgaagcaaagcccataaccaacataatattttgaacgaaatgccactcgaccctctcaaaagccttactcatatcaagtttgatggcagcataaccctattttcctttcttaaaatgttttagagaatgtaataattcaaaagcaaccaacacattgtcagtaataagtcgagattgaaggaaggcactttgcgattcaaaaatcaccaatgagagaaaaggctttaaacgaagcacaatagcctttgaaaccagcttataaagcatattgcaaaggatgatggacctcaattaagacatagaatttggctttttgacctttggaatcaatgttatcaatgtctggttcaagctgctaggttacctccatcattaagaactttaagaacaacagtagtgacaagatcccccaccaaatgccaataattagtataaaacattagtaacataccatccaatctggggctgctatcatcactcattgaagaaagtgcattatagacgtctgaaactatgtacggtttagtgatttcttccttcatagcaacagtaatggagcatggcactgaagaaataacttgttgaagaaccccatcattaacttctgtagtataaatgtcttgaaaataatctacaataacacgactgataccagcgtgagaagactgctcaataccatcgttatcaagaagagatttaatgtggttaacattctacccgctggtggctttctgatgaaaaaaattgtgtgttagagtctcccgattttaaccacaaagtgtgagatcgctgctaccaatagtcttcctcttgagctaataaatcatctaatacactttcacttctcttaagctcatcaaagtgagaaggactaacatcataggatttattaagagcagcaaccttttcttgggacaacttaatcttctttggaagatctccaaatttagaccgatgccacaattgcaattgagatgagcaagctgaattttttttaagaatttgcttagcaggatctgtagcagtggatttccaattggttgctatgatagcaagacatgtctcctcttgaagccaaagtttctcaaatctaaatctagattttgtatttttgagggggacaatgtgctagtggtaatattgtgatctttaaagctctatggtccgattggaaaaagtccaagtgagcaatgacatgtagtgtgaaattgttaagccaagatgagttaacaaatccataatctaaatgctctttaacattgataccactagagttcttattgtgccatgtgaatatatccccatcaaaagaaagttcttgcgatccacagaagtctatggtattgtaaaaagtatcaatttgtgactcaggtttcaacggaccactaagcttatccgagtgagaaatattttcattaaaatcacccatgacaatccaaggcattaatggggttgtgtcttttagtttctttaagagttactaagtcaagtgtctttgagtaacacaaggagtaccatagaaactagagtaatgccaagaagggccataattaatagacatataacaatcaacaaagttcttgccataattcaaaatagttacattgacatcagcttttcaaagaaaaagaagaccaccactaagacctattctaggaacttctatactattaggaaactttaaagcattacaaaatttagaaagagaaccaatactaagtttagactccataataaagattacatcaggtttattttgagaaatgagcagacaaagttggtggaatgctcttgaattgctcaagccccgagcattccacgtgataataatcatggcaattggcgaggctgagtatcagcctgcaccaaaagggcactaattccctcttcccccaatgaaattttagagaatttagaggaggtgataagatgttcatgcaacaatgagttagtagaatcagcaagaggtgtggctcttatacgacatcatttaagcacatttcaaacatttttgcctgaagtaaccaattgcctttaagtgaacatagaagacatccgattttcattaattgtgtccacatcagtcgaagaagtagctggtgtgttgttgacatcagtagccacattaggatgagtattaatcaaagtggagtcagtcaaaatggtccttgattgagatgtagtaaaggtgttattcagtggtggtgaaacatgaaagtaagcaggagggactgccatagagataaccgcagaatttcttgcaggatgatgtgatgtgacagtacacatagcattggactggtcatcagatgattgattatatgatgttgttgtagtcgatgtagcacaatgagaagtgagaacaggatcagtgctgcagtgtttgtcaatcttgcaattagtatcaaatgtaggagcagcatgtggaagatcaatgatacaatttggcagttctacacttgtattaggcaagtgatcaatttcctccctagaactttcagcaatattcctttttcacggttagtaatttgtggaggggcagcaagtaaagttctttatatagggataattggagaaatagtgttgcgtgcaagatgagtaatgaatggccatggatctgcctttgagaaatcctacctataacgatcataaccagtcttgggtagtgcagcaccttctatccaaggtccataggagagatcaggctctcttccttcatcaatcttctccaaaaatagtgggcatatttcattaaggacaatagggaatggaacctttctttgctaaatactcacttttctccaattggtatttatcggatcctcacaatactgctgagttttttccaaaatcaagatcgctcatatggcatcatacgactgtaggggtttacacagtcaagtatggttttcatttagctgattccttggttgaagtagatgtgtctttcacatctaataatcgcaacagttggtggaaaagtttatggaacctaaatttgtctcccaaaataaagatctttgcttggagggttatcaaaagtgctttgcctattgccgtcgcactaaaaaaggagaaagttattgactcaatgacttgttcgttgtgtaaccatgcttgtaaatctataagacatggtttgtttacttgttggtatgaaaaatcagtttggaagacttcacaattcatgattgactaccagaaagctcataatatgtaagatgaaggatatgtgatccatttatccttactgtactcaaaaactgagtttgaaactctaatctatataaagtgggctatatggttagaagggaataaagtttttcatggtgaagctaaacgtgatggatcctatattgcttcctatgcaataacctactatggaaactttatattctctcacaaccctgctacaacgcctgctgttgtggcgactcatgtagtaactgaacaacgcccagaccgacggagggagtcccatggaagccacctaatctgaatggtatcaaacttaatgtgcatgcaatagtcaatctgaccaccaaaactttgggtattggagcaattattcgcaatcataaatgagttcttcttgctgccatttctaaaccagtccaaggttgctttcaatcagatgagatggaagaaaattctctttttcatagcatcatgctaggcgagtcaactaaaaattctcataacaaatattgaaacacatattttacgattatctacaacatctttagatttatcttcctttttagatttaatctctgatgttcgttatcttttatcttctttccctaaagttattgtttctcatatttggagacatactaatcaagcatcacatggtttaacaaaatatgatctagagttagataaaaatatctattggataggtgaaataccttaccctattttttctattattgtgaatgactcttaatttataataatagtagaattttattttcaaaaatatatatataatttaatataattttatgatttaattatcactaaataaaatattgcgatatatttcctattatgttataaaaatgaagaaaatatatatacataggttttttcttataaaaacaataattgaaaataatattattaataaaaggaaaagtaaaattaatatgcgtctgccgggagtcgaacccgggtctattgcttggaaggcaattatcctaaccgttggactacaaacgctttgatggttgatattggtaactaactgtactactcacaacatattttgatctttcaatttatattacacttatatatataataaattgagtaaaaaacttaacaagaacataatactgccaataaaccaacttatttttattattattattttaaatgaaaataatctttattagacaaaaatatccgctaatacaaaggactaaagagcaacgggaatatcactctcagaaaaaaaaacgacctgaccaataacaagcaccacgtgccatatagtgcgcgactttattagcagactgtttaacatgaccaataaaaacattacttaaagaagataaaataacttgacaatctttaacaaataaactaaaaataaaaggcatagataccgaaccacgaatagcttgaacaactaaaatgcagtctgtctctaaaatgacatttgaataaaagatacacgataattatgaattgatatataataaaatttttaagtttcgattggcatctatttatttatagaatccatcttcacaatcacttttaacccagagacattctcgtgattatcgaaataata

SEQ ID NO: 36355 - DNA, 5890 bp, Cannabis sativa
  modified_base (3980)..(3985): a, c, t, g, unknown or other
cataacaaataatactacatatatatttttttttttgagttaagtagttatttctcgaaaaaaaaaaacacatgttcaagagaaatgttttaatatttctcgaaagaaaaagagacatgttttaattatatctcaaaaatttttcacgtgattaattagtacgtttgaattaaaacatggattattactgatttattttcttccaacaaatggattagtactaaattattcacgagttgagatgagattgggttatatactataccaggtgaagtgaagctgttattaatataaaacacgttttactcaagtctttcaacaacattactaattcagatcttcacgtgtgtatgtaattattattattattataaaaaatcatcatctcatcaaagacactcaaatttcggtctaaatgcactaattaaacatgtacagatctctcatttacctttattacccacagtccgagtaaacaggccaatattaccgaattcttcgactagaaaaactatgaacaacgtgattaaatagacacactatatatcataataaaaataagaatatagtaacaaaaacgtgagtaaacaaactaaaagtaaaccaaatcactatctctaggacgaactactttctctcaaatttattataccatctctatttcgtaatattttctttagtatgctatcttgagtttaactgtaacattggtattttctttttcagttaagagggtttcttttttattatcattgaatcaaatcaataacaaaagaggattagattgttatatcacaaaaagaagaaaaaaatggaaccattatgtgatttttgtgaggtggtgagggcagtaatatactgcaaatcagatttggctcgtctttgtttgcaatgcgatgtttgtgtacactctgccaatcttttatctcgaagacacgaacggtcattactgtgcgacaattgcaatagacaggctgcgatggtccgatgtgtggatgagaagatgtcactgtgcgaaagctgtgattggagctatggtggcggtagctgctcagccaccggacaccgccaccgccagcccatgtattcctacactggctgtccttctttagccgagttttccaatatattcgagtcatttctcaatgagccttgtttagatgctaatcatggttggggttctaatgtaatagagcctaataaagatcaagctatcaaatcatcatcatcttctattgctatccaaaatgtagattgtatgccttattttcaagatcaattacctttctttggcgatgactctgtgttatccaaggtacgtacacctgcagttaaatatgatacgtaaagattatatagggaccatatttctgtaatggttgggtcacattgccatattatgtatgcgatagatatttgaggttaccaaatgttgttttgtttactttcaggatcattcaaagctcaaggaccagaatattaatattcctgatgggaatgatctatttataagcctaaacatggatgcaatgaactttggaagtaataataatgaaatatttaactcttcacaagcttgtatgaataggtacccgtttgagagtggaggactggatagtactatactaatggataaaaacttatcagctacagaatccaatggtcatactgaaagtgctatggaggtaatttctcccctgtttagtgctatactaatgtttttatgtttttataattgagctagctagcttgaacttttgtttgtgctttgtaatttaggcatcttcatcaggtcagcagcaagattgcatggcttttcaggcttctcaagtgtgtggtacagctaatgtgatgcaaccaacaatggatggtggttctaattgcttgcttttgaatcctactttcacttctggccaagttcatagctctggcgccatttccctatccaacattaccggcgaaagtagtgctactgattatcaagattgtgggatgtcaccagtttttctaactggagaatcttgggagtcatctctagaagtaagctgcccccaagctagagataaagctaagatgagatataatgaaaagaagaaaaacagaacgttggttcctaaactcttactctcattatgaaggccaagagcaaaaatgttgttacattaaagtgatttttatgtaacactttctttttgtgtgtgtgtaggtttgggaaacaaattaggtatgcatctcggaaagccagagctgatactcgaaaacgcgtaaagggtagatttgtgaaagcaggagaagaatatgattatgatcctctaatgacaagcagtggtgacttttgatcatggataggatcatcatcatcattatcatcatgaatcctttaattttcaagaacaaagtctagttctctcttctatcaaatcttcattcacaccatttcctctgtccagaaatttcatggtttttctagtccatatggagaagcaaaaggctcactcatttgatgcgcaatttacatggtacacataattataaaacagttttcagtagtaaaagaaaaaaaaaattgtttattaggcaggcactaaatttttttattgttagctagtaagtaatacttttatttttgtgtccctctgatgtaaagtcattagacaaattttgttaaggaaataatatgatcatttacataggaattttctcaaaagtaaaaagaatttacacaggaagatcaatatataaacactaattaagttgtacttatgttatcttagccttgtgattctgtttcatatggggaccatttcaatagccgaataatgtttttggttaatcatttgtaaattagaaaagggctcactattaatgggagaaaaattattcttaattatcacaaaagttaataaacaattttattagaaaaaaaagttaataaacatacatgtgccactcccatgtataacttataagcacaaagtaccttattaagtattagatttttttgcttaaccttattaatttatagtttatgaatttgatatgactatatagtatattgatgaaaacatgcacctttgacacataatcttctactgttatatcaaattatatattttttcagggctagaagtaatgggactgatattatattagtgattacatcacacatgacttggaccttgatcctcctcatctggttaattaataattaatcatagtatttaataataacttaacaaaagagtatctcacaaatatgtcggcagattttcaagttagacagttttggtttatatatttgactttatttccaagggagtgactgttgagttgttatgacaagattaattgttctatgctttacgtgagattaatagtgatacgtatcatatcaagttctgttacactgagacgagtggcattagtataatgttcactagtttatttttcttcatattattaatattattattgctaattgtacgtgccgatcataaatttgattcactcattttttttaaatgatggacaaccacataaacaaatcacgatatttaccacttaaaatcatttttcggccgttattattattattattattgtttctaatcccaacacgaaaaagtttgtacttgatcaaacaatagttattattaatttatttgatttttcaatattgaatataggagacaataaaaccggtgaaggaatattgtggtgatcctgaattcacgtatttgtttcgttggaatccacctcacacaatcttctccaagaataaaaaatctccacacaacacatattttgtggttattaaattctttgcgttttcaaagttgacatttctctctgttatctaaaatgttttgactactgatttagtgatttgccttttattcattcttaatttagttgtacttttcaccagtaatcttctcaattttgtttaattattaatcattttctctctctctctctcnnnnnntctctctctctctctcttgtttagaacttcaatatttttaaatcattggaagtcatttgaatcttgtactactaatattattcatgccaaacatgatctgtttaagtgaattttttaatataattaatcctaactctttcggcattatagtgacagaggcgtatatacctcttgcatataataatcgatgcccatgttcaactatatttagataattttaggaaccaatcaagtatattcattttaaaaccatttcatttcttttggcggaactgttacgtattaatataaaagaaaaagaaaatgtataattaagagagtttgaaactcttaaatcccaacatttccatcaaatctacatagaaaaacctccacaaatttcactatcccagaaacttggttatctcatcagttggaacaaaaaaaggcttaaaaaaacaagaagggcgtttttagtgtagtagagcaattagttttggaaagagaagaatcacactggcttctttgctgatccgatgaagtagtagttgaagaagtagttacaagagttggaagaaccatctcaaccgaggctccaataagatatctcttggtgagtttatgacatgtattgcaaaggaagcacctaatgtgtctccgggctaagaaattagccccatgaacccatgtgtcgcattttctacacaagtacgcatcgtctgcctggcaatacaccgaagccgccgagctacacagctcgcacaccaccgagcatgtgtcgtcgtcagtgctcgacgaccaagctacaaaattactccctcggttgctctcttctagccctctacacattcttctttcttcctcttttaattaacaaagctcaaaagactcaatgtgttgtggagaatagaggtttttctatttttgtattggacagagcaagttggaataagaagcaatttataggaagtgtttgggttggaaatgggatgaattctgtcctagaatttcaccattatgacaatctcatgtcactatgtgacaataatgtcattttcttttcttttttcaccttggtgagtttagcacacagtttaatttttttttctctttctcaaatttgtggttgagaaataaacgcttataataaaggaaagagtgtccaaacacatggttataagttgtgagcttgtttttcaagccttgttgtgattgtggtgagatgcttgaagagactgatggaataggctgcggatctttttcattttttgagtggttacaaagtcaattatagattaacaaagaatgaagctctagttgtatggtgtagaattaaagtctcttacaaaagtaggacctaccaagtccattggcttctttgcacgtatgacaacttgggttatataaaatttggaaattgatttgaccattattttataaaaaatatatttttttattttcgtcccttcttggaccccataaattggagagacggttgagtcagtcagtggtgagcgtagaaaagaaataatgtctttgtccacacattgttatatagcggtggatcgatacatattactccacatgtatggtcgaaagttgaaagcttccacgattgaggctcttacatatgccatgattgatatccaatatgagcttgtgacttaaacaaatatatattattatatatatttttttttaaaattaaaaaaagaatattcaaaagcaatggacaaaataagctatcataggtgtccaactatggtgctttttcttcaatttgggattgacaaagtgatgaatcttgaccacttgttttggagaccatgttagaagagtacgtagtggcaattagatcacaatccccaatgttagaatttaataatccaccgaaactttttaatgtagaggctaccgtcggctacc

SEQ ID NO: 36356 - DNA, 4766 bp, Cannabis sativa
  modified_base (1919)..(1922): a, c, t, g, unknown or other
  modified_base (4224)..(4256): a, c, t, g, unknown or other
ttacataaaaatattgcataaaatacaattgaatataatacaatacaatacggtgtaatacggcgtaccaaacgaatcctaagtgattaagtcaaatacttaaagcaagaagcaagcagtcaataaacttcaaagagaaaagtccaaccttagcacaaagagaagcatgttcctttgcaacagagaccaccttcttcctcagtgaatccacattgcacaatacctacaagtaatatattatagtcacaaaatggatgaaactatagttataacaacaatgaccagcttgaatggtatgtcaagcatgagatgcttatagtctacctcttcataatttccatctccaagagtcaattcaattagagatcgctcataaggatgaagggtatgtctctttggaaaactctccatgtaagtcctcaaaggaactgccaattcctgaacacagatagtgaaagcaatatgtcaaaaaatttacagaagcaccattctcatccccaatatttggtagaaagtgcaaaacataatactattaagggtatttaatggttggtgagttttggcaaaagatactttaagtgataaaagacaaaatggaagttaagagcgaactttcatcagtgcatcaagctgctttgcacttctatttctctctcgctttgcaatgttagcaatgcctgtgtcataaacaagctaatttagcaggagttataaacagaattcccatcttatcactttacatgcagttatgccaaaaagaaatcacccacaacaattacccttagttggagaaactctcttggccttctttaatgctgagtaaagaatatcaaaagatggcatcaccatgggcagcttttgaaatgcaccaactgtttcaagcttctctgatgatttttcctaaattaagagcaacaaaaccacatgaaccatcacagatttgtagtaaagaaaccaaatcacaagagtaaaattagaaagaaaaaaatattaaattcattgactaacttcattctttcttatttctcataattttgtgaaatttgttcagcaatggttatgaaaactagttgtgtatcttctcatttatctgattaattttttccttttaaactaccttcttttgtcctatgattcctgataatactgttaattaatagacaagtacaagaagaaataccttttcttcaatttcctttttaattttgattgtgggtacgtagctggctttaccattgacatcttcatatgaggtagtttgtatgttcttgcatgagcagggtggtggataaaatttgacaccaggtatcacatataaccctgcataggtggtatacatcactaaatcatctccaaaccttattggatttcagaaaattgcaataagttgaaaaattcaatcaccattgacaatgcaaaaaagaaaaaaaaaaaggtaacaaaggattcagggcaataatgaaaaaacacagcacatcttccataacaaggaaattaaagcacctcagaaatccagattggtattgtttaaatcaattcaagcctcattttctaaacccgtgatgaaaaaacaaatgcaatataaagtatgtaattttctcttaaaagaattaaacttttttatgatactaaaagatttatagagaccagcaaatggggtatactcaaaaagtttaaatatctgggtcatatctatattgcttaaaaataaacacagcgaaatgtaagtcacagaaactgatatgtaaagaaaaggtaaatgaaaatggaaatgaccatgaagaaggaaaggaaaaccttgggatagttttgagcttctgaaaagtattctggttgggggagtttgccagagttgaaagagacaggaagccctgctcattctgtctctcttcagctgctgagagagagagagagagagnnnnagagagagagagagagaatttgaagaagaagaagaagaaactgaggaaggaggtttaagggtttaaggatttgcgtatgtattgggatttagaagatgggaagcttggattggaatgggaaagagttcggaagggagaacagactatcttctctttgactgacttagggcttgtttgtgacttgtgcttttagtttactgtaaaagtacatttttttaaggttgtttttttttttaaagaagtacttctaatattaaaatttaaaagaaaaaacataaaccgtatttaaccttcaattatttttcactttaacattatattaatttttgttaaaaaaaaaagctattatattaatttatttagtaaataataatatgttgtataaaaatatactaggttcacgcataaattatttttttcattaattatatatatatataaattagaaaaattttgtagtaaaccctaaaagatgtagattatttatctgtttcatcaattagaattttttttttaattaattctttttcatgattgcctacatagctatttagaactactaaaaatagtgttgtttataacaaaatatgtaaatcttgtttttggaattataaactatttaaattttttgaaaaatttacacatagttttaaataattgtaacatacgccatcatgaaaaaaaaaatagactaaattttttgttaagtgccgaaacagataaagaatctaccgaaatactcatttaaaggatggtgtatgtagacttaccctataaattatatgttttccttgtgttccctgtttccattctaattgtaagattataaatttttagtatgttaaactttgacatttaggcaaaacgtatattatcgaaaaacaaacgacattacttataagagtggcaaaacgagtttcgacacggtacacaaacacgaatacgacacgaattttacaggttagggtcagaaaaattagacgcgggtcgaaaacatgtcgacacgacttgccgtgaaattaaaacgggtcaaacacgacaccacacgcttaacacaaatttgacacctttttttttaaatataataaaataaaaaattattaataataatataaatatataaaaatatatatttagtgattcaatattaagttaaaaaaataataatttaattttctttaaggaaattaaaaatattttaaaatttttaatttttattatatataaaaaaaactatatataaatataagttttctaatagaacttaaatttatttttcttctctacaactccaactttaataatagcaaaatgggtcacagtaggtcgacacgaacacgacacaaatttttacgggtcgggttaggattgggaaaagtagacacgagtcaaaaaacgaatcgacacgcctaacacgaaatataaaagcgaatcgtataaaatatgacacgaacacgacacgatgacattgcagaccaccttaccccttcgggcccttccttccaagttccaacactccttaggcaaacgtcatctaatgattgctcctgaacaaaaacaacttgtcgtttcgttttcatttttgctaattgctcctattatattattcatgacaaaaataaatataaaatattcttatcaaatcagattaattctgaaaagggaaatttaattttttatacttacatttggttaaaaaaaaatttctaaacaaataataactaatatttgtaggatatgataacttttatgatatctctaaaatactctccatttacatcactcctatttatacaatcggaccatatctgctaccattttttttttatgtttttatacataaaaaaaaatagtatcaggtgaccatcggactaccatcggaccagatgtttttgtacatacaaaagtagcatcaggtgaccatcggacctcatcggactactaattttttttatttttttttttatgtttttgcactagaaaaaggtatgggaaatttgagagaagtatttttggattttagataaagtgatcatatattttcaatggtgatatgtattagtttaaggataaaatattaagtatatgtaactatagaaaatcaaatcccttctgaaaaatgttggtcattttgttaacaagcataactatattacgtaagtagttggttattttggttgactgcgaccgtacattcccatatgagagaaaatgattaaaggaatcacgcatattcttaatctgaacagccattcaattttgtaagacagacaaacatagcttatctctctctctctctctnnnnnnnnnnnnnnnnnnnnnnnnnnnnnnnnntatatatttatatatacacacatacatctcatttcacaatcacatacataaagttataataacatatactatggtagctcttgcttcaattcagttttctcattgtccctttccatgtgacaattttcccaatacccatttcagaagaacctctctttccacacaaaacctcagaaaatcagcttctttcactcctcctagggcctccatttcatcagaatcgaaatccattgatgggtattaattttgaaatctctttctctttttcttatcattttgtttgaatacaattaagttcacatgattattattcgaaaatgtttgtttaatggcagtaccaaaggttctctagctttccttgctcctcttgaagccattctatttgatattgatgggactttgtgtgactcggatcctcaacattatgatgcttttcgcctaatgcttcaagaggtacccctctctctctctctctatatatatatatatatattatatagatcggaagag

SEQ ID NO: 36357 - DNA, 9216 bp, Cannabis sativa
  modified_base (9187)..(9190): a, c, t, g, unknown or other
gcaatgctctatttcaaaagttaataagcttggaagttaaaattgtagtattttcttctgcttgggaagaaagcacatatacaaagattttttgaaatagtatagcaagagcattaagaaggttagaaaaaagacataaatacctcatttatcggagaactaaaagcttggaggctattattagcttgaggaggcattaatgtcttctcagtagactttttgacatatctctcggaagtatcactgtgtgatgatccatctggacaagatataggaaaacaattggggtgaatctcagcttaaagattacattgcagtttttggtggatgttgacatgcaaaccaacctaactttcttcaaaatatagtcagaccttacataataatgatgttgagacaggtgaatagaagctttctgaatatctaaggaaatataatactggagacaaactataatggagtgaacctttatgtaaaggttttgtagaacttctagaatggagacgttggatatacatagttaagtatgatgatccaaatccataaaaaagtctatgtaacagggcaaacaactaacctttaggtaccggttgaactgccaaacctgtgcactggtagacaaatttattggtgtaagttaatgtatattgactgaaaaattagacgaacaataacaccaaaaaaaaggactatgaaatacaggcaattctggctgatcatattgctgcttatcattgtcaagattagcagctttaatcactgcccttgtattctgtgtctgatccataggtttcctcaactctggcttctatttaaataagaaaaaaaaaagtttgcatcaactaaaaagcagtgcagtcagtcagttactcaatttctaaagccaaaagttctctacatatacctctggtttttcagtctcattaagggataatttatctgagaaactatccaaatcagctttagttggctcgtcatcatcatcatcatcatcatcttcttcagctgcaagttcttctttctcaagttcatcaaatcgggacataatgcgtgcaaattcatcatcttcaattttagcatttttgttgtctacttcagaaaagcttgaagaaacttctataaccagtccagaaaagaagcatcagtatctcaattatgtttctaataaagaaataataaaagattcattaaaatgagttaattaaaagataaatacactaaataagttccaaattgattgaaggataaggtgtttgctttacaaaaaaaaaatctccaaagtctaccaataacatatatggatttcaaatgatttcacaagcatgttagaaggactgggaatttaatgcaaagtagcacacagaaggaattgcttcgtcaactgtcctaaaagctacagtaaataagaaataaacatgacaatttactgcaagattgttcagatactctaattctccttcagatttttcagtctaaactctaaagttactaaaaacaaacaaacctggttcagattctccttcaacagaactttcctccacataatcttctcttatctctagaattccttcctaagtacatgtcaaacaaacaacaatcaattaacttgaactacatttctaccacagaaaatggtattttaaatgcaaatagcattttctctcaaaaaaaaaaaaagtaaatagcatttgacacatccaaaatgataaccaactatttaataaactcagaaaaaaaaatgccagaacaaacctcggcttcagaggcagttctgtcgaaaaatgaagcctctagtttgaggtcttgcaccatggccctcaaagattcgatttgggattccaaggtattccctcttcttctcagaatatccacggtttgcttggatgtcctatctgcatagtacccttctcccaaaagaacctacacaaagaaatcacagtagcccagaacatgtttaagacaaagaaagtttttttttaaaaaaaaaaaaatcaaacactgattgtccactgaaaattcaatttctataccagaaattcattggtgtgtatcaaacgcccagggaaaaaagctgccttaccaaatggaacctacaataattagaaaaaaccataaaatttgttttttcaaggagtgagtgagaatgagagagaggtgagtattgggtttcttgccataatatcgtggtggagctggtctgggagtctctggacggtgctaatgaggttggcgttatcggagacgaagccccggaggcggtcaagctgctgctgcttctcgacgatggtgtcgtacacgcgcttcgctgccttctgcgcttcttcagctgcgaacaacgaagatagcggcgtcactgtccctttcgcggagccttccatttcccggaggaaagagagaaagggggagcagagacggtggagagtggagtgggtttgggttttggttttggtgagagggaaaggaaagcttcgcctgagttgggtttgggtttgggtttctccaattcaattgtattttttttaaaaaaaaaaaaatattgtgtcataaatatttaatattttagatttatatacttaaatatttaattttatttttggagacaaaaatacttaatattacaattcttttacgtcgttactaacaattttgttaacacataaatattaagaaacaagtaacatttagtttttaatattaaaaatattaaattttaaaataaaataaataaatgtaatacaccctccacgtgtccatatttatgagttaacggaagtagtagtaacgatgtaagagaattataacattggatatttttgcctccaagaataaagataaggtatttaaatgtataaaatttgaaatattaggtacctatgctgcaatttagtcattgtatttttactgtggtttaccaagaaactacaacttgttgggttttttttttttttttttttttcttgaataaaaggcgttgaataaaaggcgtttccagattaataccacaaaattagatttcatggtcattacataagatattatctggtatagcggaaagattgacatactagttacatttttggcgaaagcccactttgcaacattatgggccacaaaattacattgtcataaaataaataaaaaattttaacttaacaaaagattagagatatatttacattaaatcacatagttatcaataccccgactggaataagttctctttagcacattgatagccgtcttagagtcactctcaatcaacacaaaaatatgcttcaaagagaccgctaattctaaggctaacaaaaaagtcacagcttctccacttagagggtcaaagaagttgagcatgttggtagccacccacaagaccgactatgtgtggtctctagccaaagccaccacgaacattgaaccgcaactaactttaacatcacagttgattttgactcaatctttcgggggaccaaacaagagactcaactgtcttcggtgaagtaaacagacaagaaccataatcggtataacacatatagatagagtcaatacattgtttaatattacacatagaattattgtttaccttgtcgttgcgggctttccagatcgtatccaccacaatcaaagcataaaggagcaactcttgtacatccacacctctagcctttagactccacaaaaatttaacccaatcccagacacaggtcccagagtccatatttggcataacaccctagggtgatgacctccaaaggtgaaaggcaaagttgtaatataggaaaagaagttccatagtttcctctccctctccacaaataggatatgaaacttccacaatgtgtactcttctaactagaatggatcgaataggcagtgcatttgagagaatgtttcaccaaaggaccttgtgatgctccaagactagaattctaaattttattccataaagctggagcaacattgcaaagaggagcacgattcaaggcctaaactagataggcatagtagagaataagccattcgactctttagtccatatccacttatccctatcctgactgtaggatctaccaccgttgatgatgttaatggttgtttatgggtcaaaaagagcatggagtttggatatgtcccaatctccatttgctaaaagcaaatccgcaactttctccaaaccctcaggtcgagtactagtaagttgaggatagaaattctaaccatgaataatacacggatcatcccatatattagtatttttcctatccaaaataagtttacagtccttacttaagaatttctttagatttcacaacaatattcttccaaaaccttgaatcaaaattcttgtaggaataattcaagaaaggcctaccttttatatacttaccattcaaaaccttgcagcacaaggattgatcctcaaaaggagagcccagccccatttagccagtaaggcctgattcatttccaaagtttttctgtagccaagccagccaaatttgaggaattcttcaccaaaattctttaatttctagttgatattactccctaattcaacctagaagctttgaggtaagctccttactatgttgattgaggatttttttcaagtttttaagttggttttagattacgattttgtgattttgggactataaggttaaattgagttgaggttgtgtttataggcctgatttagggtatgtgtgagcttggattaagtgattttaatggctgctaagtttggaattagaatttttgaaattagggtccaattttggttctaacttggtaatttgtgaaatttgatgaattgttgtgaatcgatgagttggataccttatttttatgttaacaaactgttctggagctgttggacaggtttggtaaggttttggtttgattttggggtgaaaacttagaattttctgccagctagaaccagtcgaccggttggttctggtattgtagaaccgatcgaccggtgggtctgcaggggagatcctagggttttcttcttgaatttgatttttgctcggggtgttttggggacctagtttagggtatttgtgaattgtttagcatattttggagctaatggaagttaggatttgtctggttatgggaattaggaattgttctcggagttttggtttaaagtatttatcgaattttattatcgtgacataggacagactcaggatcgtcaagccttgtttccactcaggttgacccgcacgcgtgatttctagactgaggtaagaaaagtttttatgcaccgctaagtggttagaaaagaaacaattataattgttagtgcctcgaatatgattgaattattgatatgtatttgccgtgcctcgattatggttgggccttgcaaacccagttgtaaatcgacctacgggtgtggtttaggtgggtggtcatctggtgtgttaggtgatttatctgttaatgtggtggagttgcttgctattcgtttaggcctgtctcttgtgcatcaatatggtttcaatatctctattattaatagtgatcctacaatgacaattggttggattaataagtttcacatgaattttagtgttctattttattagatgtctattctttattagctattgttgatggtggttcttgcagtactattctgcgttcgacaaatagtgttgcctacacactaacaacatatgttattagtttaggagattatatttggacagatgattgtctacgttttttttgaattcttctctataaacagatttattttaataaattatgtctttttctcaaaaaaaaaaaaatcttgcagtgtggttgcagtttgagaaattacaaaaaatgcatatgcggtttagttttggtttgaaaaaaagttacaacctgcactatttttgcactgcaagcaccccttaattcagaaattgttgtcaaaaatttaccgaatccaaaggtgatgatgccgtagaagaagcttcaaaacaatttttttttccttctttcttcttggttagagtcgcagtcttagttgatcaactatctaattttgcaaaaaaagaaacttgtatccctacaaatgtttttttttttactttattaatgctttaaaaaaatgcttataaataataataataagaaaaacctattgttttttatatggcataatttcactgatttgattattaatatatttacagcacacctggtcgtagcctcgttctattatattttgattaaattgttctattattaacaatgaaaaaaataattataaattataatgtgatcatggctagtgattggagcgtgtacagaagatatctgagagcgcgtgatactctgccaccaaacacagtagagcctcctctctcttcttgacttgaattttaccgaaaaccagagcacaaaagcaaagacaggagagagagagatacatgtcaacgaacaccaacaccactacttccccatcgttcttcaactcccctattcatacccttaatttatatatttaagttactacatataaataatacaattaaattagatatagttggtgaatttcttagtacataatcttctggtgaaggggaagcttttgttgttgttgttgttgttgttgtctttgggtgtggtctattagtcgttgggctttcattatctcatttagatcaattggttacttcctaaattttgactctaattcaagcaaacctatttggcttctttcttcatttccatgtatctttaaccttgagcttttctactctaatgggtatcttcctattgtctccgattcttggttttcgattgtatcaactaagctccgaggtcaaaattttctggctttgattattattattattattattttgtctgttggggatggtttgcgcggattctgatatggtggccaggagatatttgggttttgggttcttttccaagaggagattaggtttattgaactgggtcgtctttggattttggtttgcgttactgcttttgcagccggtggctagtgtcagacccttgcgagagagagctcgttcctggggcgatgaggttggtattgagattattgcctactttttattttagtttatgaatagtttcatcagctatgaagattgcaatttgaatttggtagtggttattagttttgttcaatgtttttcttccttaatgtacactctaagagattagagattatatttcagtgaaattatttatgggctttagactgttaggactgggggaaatcggtgtttgtgtttactccaaagctgctttagcttttttatttagttatgattttgctgcaatgaggagattaggaggagaagagatattattctgatgtaatttgcaagagcactgaggatgctagagtatttcctaaaatagatagtaacatactctgcttgattgcacaaaaccatagattaaagaggagattcattagctttgtcattgatgtggttctctggcattgctatgtagtcgtattgaaagtagctcatactctttcacattgagttttgatcttcataaactaaagtagacaatacagatgaattgaacctttcatttatgcaagaagacaactataaacaatatgttttttaagagaggaactgtcatgtgaagccaattttaagttactgaacttccttttagagaattagttgctctcatttccctttcactttccatagtatacaaatgtaagatttcctttgaaaaagtttctggtaggaaaaggagggagaaaactcttattttcttttgtgtagaaaaaagtagtcgtttaaaatgtatggaaatttgagtaaatttactgaattcacgtttatctcttgcagtggttatttgtaagaaaagatgaaagtgacttgggtccattttctgcatggaatataactggaacttatagaggttagtaacttgcattgcactcatttttaaatgttacctggtaattttagctgcatgctctcaacgtgaaattgatgaagaactggagcttctttgtttctccttgggagtaccaagacttatgtaaacatggttttcctccgccatgtgtgagggtttataataaacttgggtagaggtcagtcaagacttttgtcacatttatgtgtttataaattgacttcaactgtgattctattggttgactagtgatatgagtttgtcatgttgggaagcatacttaaacaaataatttagtaatttcttaaaaaatttcgggtgaaagtgcaggattagttgcatccctatttggcagcatatatgatgggataccatgtgattttcttgttttatgtcacgtactgtctgttcattgtgatcatataccatttaactgacacggttatgtggagttgcggacaaatttcactagtaaagatccattcaatttagtttgtatgtctacttcgatctgaatactggtacatccatatttgtgtattgcagggaattggaagtttctagattctgcaaatagctcttccaaatttcctgatttcaggaaatcctcgggcaattctgtaattgagttagttagtacacctacaaaaataaccggtgtacattatgtgcaggtgagtgctctgaattattgttcatagccatcatgtcaaaggaatcaagaccttatgtaatcagtgactttgttatgaacacaaagattgccactttatatagccattttactatttgattgcagtatctctgaaaggctcatgcagatatatgcattcaaatctagatgatttctaagtccttagtgagtactagaagtatagaactactgtctctgctgtgaaaaagtcactatgtccgagtgctgtagtgctaaaaaatatatttttagatttgatatctgccatttaggttagtgtcagatgattgtgctaactccaatttaacttagtctattgactttgagttgcgagtcatactttctctttagtatgaacctatgaataattatgacatttataacctgctttgcttcaaatatagaagaacaaaaaggaagtgtcttggttctttccttcagattaggaatatgactcgattttgtagaatagaggaatttatgtttccattgagagggaataatctgcatttagggctcgtttggaacatcgtattaggtcgtattgtattnnnntatattgaattggattatatatcata

SEQ ID NO: 36358 - DNA, 12480 bp, Cannabis sativa
  modified_base (92)..(101): a, c, t, g, unknown or other
agttgttctgctttgtgttttattggtattttataaaaacacagtatttttgaaaaaaaattcgtgtggcagtatttttgtaaaagttaacnnnnnnnnnngtatttttgtaagtttccctattagatagggatgtgggtaaagtgaacacaaatttggttttacaccgttcccaagaacataaatcctccaaccaaacactcccttagtgatctttttccctaggatattttcttcaaatattgtcccaaaatgggcatgagtctctgaaatcagatccaaagcccatcaacatggaacaaaccaaactaaaagcccaaatgaaatagatctcaacggtccacaaaatttcaattttaaccgcgcgatggacttgatttagtttacctgtaccgtaaagccgagtatgatttcactattaaccaatagaaaagcgacacgtcataccctaatagtgtcagcaaagtcagctatttaaaaagcgagtttcgcttctttcaaagatcgtctctgtagcctattttgtagccctcttctcctctcagccggagacccccaaaaatccctcgatcaacaagaggtaaccaactatcataataaatatctaatctttatgtttaatctctaatacatgtgttacaatcgttgaggtttgttaattttgatctgtttttattgcctgagttatatgatttttgtgtcaatttttggggttttgcttttaaaggtttgatttttagttgttatatgtattctagatctggatctggatttgggttttggttttcttttagttttatgggttgtgatggctttctagatcggtttgatatttatttagtgattttagttttgttagatctgtgatctgaatgatgtgtattaggttattttcatgtgtgtgtggatctgatgtgtattctttagggctttatctatgatgggttatctgttttagtaatgttagcactgttttggaatcgatttggataaagtttatcatattctttcttttaggatcgatcactgctattgatgtagtggaatataagcttatattttgcttggtctgagctggagtatgttgtcagatggatttactatgattttcttaagctgtgcctgttatttcttaataaatcttcatgcttgtttttagatttaagcttgtgaagtgatacttcgttttatagatgtagttgaaagttgtagcaaatatctactttaattcctgtattataggaaatgaaatgggggatctaagaatccacagattgattgtgttgttcaagtctaacgttgttatctagtacatcgttttaaatgaagttttaccataacattctttttgtttgaaagctgtatgtaattagatgttttcggtctttgctatgtttctcatgcttgtgtttgtatggtattctttcagggaacgacaccatggataataggcatcaacatcctacagtcatgcaaaaggtagcagggcaattccttagcaattctagcatttctcgggatgctggtttccaacgtcctgctgtgtatcaaaggcctgctgcatatggaaattaccgtaatgctgcattgcaataccagtgcagtgctactactgatttgtccatggttccatcagctgcatcgcctatctttgttcaagccccagctgagaaaggacattttatgattgatttccttatgggtggagtttctgctgctgtgtccaaaacagctgctgccccaattgagcgtgtcaaacttctgattcagaaccaggatgagatgattaaagccggtcgactttcacaaccctacaagggcattggtgagtgctttggccgaaccatcaaggatgagggatttggttcgttgtggagaggcaacacagccaatgttattcgttacttccctactcaggtttgtgtttgtactatttttactttcacatttcattgtgtatatatccataaattcatgctaaatattatgcttgtatcttgtgccaggccctgaactttgccttcaaggattacttcaagaggcttttcaatttcaagaaagacagggatggttattggaagtggttcgctggaaacttggggtctggaggtgccgctggtgcttcttcccttctttttgtctattctttggactatgctcgtactcgtttggctaatgattcaaaggctgccaagaagggaggcgaaagacaattcaatggtctagttgatgtctacaagaagactttgaagagtgatggtattgctggtctctaccgtggattcaacatctcttgtgttggtatcattgtgtaccgcggtctttactttggattgtacgattctttgaagccagtcctccttactggagacttgcaggtatttcaacattgctctttttgttcataattatttcagctaacatttatgatccctgttaatggctttagacactaaatctgtttgtctccatttgcactagccaaaagcatttctattttgctgggcattgagttcctgttccataccaattgacattattgtattttgtgtttttcgatgttaacaggatagtttctttgctagctttgcccttggttggcttatcaccaatggtgctggtcttgcttcctacccaattgacactgttcgtagaagaatgatgatgacatccggtgaagctgtcaagtacaagagctcctttgacgctttcacccaaatcttgaagaacgagggtgccaagtctctgttcaagggtgctggtgctaacatccttcgtgccattgctggtgctggtgtgctatctggttatgacaaattgcagctggttgtgttcggaaagaagtacggatctggtggcggttaatttttgagttactgctattcagtttgaggaggtggaggatagatggtgatgaaatcttttgttgagttctgagaaacttgtttcggcaaaattttcagtcaataatttactttttgaggaaagtgttgttcccatcaaactcaataatttaaattttggatcaaaattgctcaaaattgcaggtcaagttctagagtggtggtcaaattccactgactgacacattttggagtttcaattatacaattttttgttggatgtttttgattatatttactatttgtaatgagtctgatttaaattttagtacttgacatttatcttttattatgtgcaacctcctttctaaacaatcctgtctttggtgcaacaatttaccttatattcttacactaaatgctccaaggttttttaacatagtgattacatcagttgaatattgaaagagacaacaagggttgtgtgttattctccactctaaaaaactttcaattttgattctaagctagttttttctacttgtaaagacaagaaaaatgttacaaaattcatctctatcgactcactcttgactttcgattttttctcttactctctccctcaatctcaactggttgtgggtttcggtcttgtatggtactcttcccctctgttggattgggatgaccttcgttgcaagtggtcgatggactacattgcatggttggcccttgggtttggaggatgagttatgatggtctataacagtgggtgggtggtgtgtaggtgcgttgtagtcagtggtgtactgctcgacagaggtcgtggcccgtgggtacctatttgctgttgcttacaatgatggtgtggttatggcgatccaatgccttttttcctcgagggggtattggatcactagcccttgcagggtagtgcactctcgtgtctcttttatgggtgagttctgtatttggaagattacgattttttttttggtatgttgttcaggatatgttattgtttttcttattaacattttcttttttgttgtaatattagtgttttgtaactttagctttagatcattttgtgaggtttttctctttgtatcctttcatgttgtgatttggtttactagctcgtctttataattggggcgaattgctattgtttagttatcttcttaagtaatttgtatggttttattttcgctttatttgttgaactttattcctttaatccatttgaatgattaaaaaaaaacaagaaaatttatgtttaatatggttcttctaaagtacataatttacttaggaacttcaaatacttagcaacattgtgattaatatcttatcatgacaaaacaaaatgaatatccaattatggttaagactaaagaggaatctcactttaagaagttgactccaacaaatctctttagaatattaacttctttttccatcttctaatttgaaaaataacacacataaaaagaaagagagaaagaaagaattgtcttgcttgagatgcaatattcttgacccttttgttaaaattttgactagcttttttcttattatttgataaatttataaacaacacaatacaaaaatgtcccttctatagtcatgtatgtagatatgatatgttgctttattattaattataaataaataattaattaaaaatataaaagataaattccttacttgtaaactaggacacctatggtcccatcccttcttataggttattacttgtgttctacccctaaatctctatttaatcaataattagtggtccctattatacatattgtaattaataataatattggtaatttggtttatttttattgaaaaatgttcttattatacattaaccattttggggtttgagtacacaaaaagctttcattaattacaaaccaattctttcaaaatctacttaccatttaccaacatccattacaaattttcaaccaatataactactattattaattattattatattataaagttgggttaagcttaaattaatggctttgtgtgtttttgtgtacagtatttactaccactactacactccatccacaccacagtcaactatgttagatggttaaatagtatttaattggactaaagtttcaatctttttactattttacactctttttttataggaaaaatacaatttttttttttaaataataatattaaatatataaaataacaaacatgaagaaagaaccaatgtaatttattatagtgatgaaatcttggtcttcttggttggtttgttaggtttagattagaagaagaagattatgaatataattatgaagagggtagcattatacttaaaactacatgtcgaaatatttttcttttattttttttttcttttagtgatattaattataattacaatttttttttataattttaaatagtagagtattaaaaaaaattaaagttttttgaactagtaaaattaaaatatgaaaaacttgttgatactataaactatttattattattttttgttaaaatttataaatttaatattgtaactataacaaacatcatcattgatacaaaatattccaataaatatttttcaacacaaaaattaagtggttgaaataagtaggtaacattattaatttactatttttttcttatccctttgacaatcccgataaccacgtgtcatctataaagatcttatagttcagcgcactttaattagattatcgataattaccttaacaatttccatcacacagatgacaccacttacagaaagctaaaccttttaatccctttcaagaggaactataaacaaagaaaaatactagtaaaaataattcctaccactacacttctctcatatttttttactttttacttggacaaaagataaggtttctgctactaattgcggctaccaacagtctttttttgatttaccattatgctttttcaactctcaaacgacatcgttttcactctctctctctctcataccattatatacatagaaaagtggaggagagagaaagagagaaaaaaaaggaaaacagtcaaaataaaaattaaaccttttttatatatacactctcacacactctctccctctctctccctctcactcttctcacatacaaattacaactatagagagagaaagacaagatttttcccattgattcactctctctctctctctcatcaagcttcatcaaaattaatgtatgttctttcttttaactttttgaattgaaatgtttcatggtttgtgtttataaatataatcttattatttttttcatttttttttctgtcactttctcacagattttccttccatagaaaaaaaaaaggatgtgagtagagagattgtggtcatttttctccattttcccacaggtaccgactcctcaaattcatcatcttttgtttggttccttagaaaaaaaagaaagaaagttttcatttttatttttctttcttttatgttattataattatcttcttaaaatgtaactgaagatttaaacatacattcttcttaagctttaaaaatcaaagctttagcttacattcatataaaattctgattttgggttattatggtgcagaaattacccttttcattgagctttggaatgagacattagaaaactcataaaggtttgaaatttatgaaattggtatattcctataatgataatcttataccatttaacctaatagtaataataataatttgtgggttattatgattattcttattgtagtatcaagcagagtgtgttatgggaattgagtgacaagacattattcttattattattaatattattaatattaattattgatatgaacgaggatagacaaatggaagtgcattacatagacactggctttccttacacagctactgaaagcttcatggatttctttgaaggcctcacacatgtccctccactcacttatcctcatcctccctctgtccatgatcaggtatgtatatattatatacacacatatatataatggggtttggtttgtggttatgtatggttgcttgtcatgcttttgggggcagtgattaatagagattaagtgaggtgttttgatggtggtggtattagtaatcaatgctttggacatgggttgttgtactgacacacattgatttttgtcttttgtaatttagtatggtttgtttgtataatatatttaaattgtttgtttctcttttgtgaccagtactgtttggaatagttctgtgtctgtagtacaactaaatttattatcttcctttttttctttaactaatatttaatgattaaataccttgtactaattgtaccaagaaaagaccaacctttgttaaagttttgttctttgttttttggtgaggttttgatgtagcttgttgttaaataaatgtgtatttgtccttgtcattaatcattagtttgttatgtaaaacaagtttgtgtcttctttcatatgtagagatatttgactaagaaatagacccttaagctttgttgatcgaattcattgtcttagcatggtgagcactcgttttaaattatctcgtgacctcccattatcgaaatttcttgtcgggtaagttctgacctacacgaaaggcgtaacgatctaggcacggtcttggagagaggctcagtgaaatagacatgtctgtgaagatacaaactacctgcacttggacaaaaagaccctatgaagcttcactgttccctaggattggctttgtacttttcctgcgaagcttaggtggaaggcgaagaaggcctccttagtgagatactactctgaaagagctagaattctatttcgtatagattgagataccactcaaattacgctgaactaattaaaataagattttaattggatttgatcggttattagatgatattgtcaaaattcaattaaaaactgatctaatcctatccttagtatgtcgggaaggtatatgtgtgagtgagtggggtgtaatagtaatagataatggaattgcattttgataatgggattttgttttggtgtgtagtagtgaaactgaataatgttcatttgatatattataatgaaaatgttacactttgaatctgctgtgtgtttatccaggaaagtttatactggtcaatgaacatgaatccatacaaatttggattctctgggacagaaactactacttctacttcttactatggtcattatgaggtaaatgatcatttgccaagaatggatatgaacaggagagcttgggaatacccttctatgatgaccacagaggaaattccaaccacagatcactcagtacaacatttcgaggatggatcgtcatcaggagatgcggatgcagcaccggttcatgccacacttgaagaaagttagtctatctattcctaaatgcttctcactcactatgcacttcatgaactttatgttccaacaatgtacgagatttcgagtccttttcgagcacctacaattcaattaacttgagcattgctattaggcaacacttataaagtgacatccctatcccaatattgaattctaccagtagcgattacctcaatttcttgttatgtttattagtgctaattcagagtaagtttgtaatagtaaaattattgttgtgctttttgtagatatcccaaatcaacagaacagtaataccagctcttcccaggtatgaatctcttggcttctgcacacccacgtgggatttcttgtctgtctttttgtttagttgacacacataataaaaaggaaaaatctgtacaagacaagacctatttataagccttttttctcttcatgtcttgttgcagactgtgtggcaagatggcatagatcctgacaacatgacctacgaggtatactacatttgtgtataaaattataaatcctattcacaaacatagtaaagttgtcaaaccatgactgacagttctattgtcctatctttctttgttactattcaaaagtaatgcaatttgagctaaagtatcaatctttaaagaaagctcttttaatgttcattgttgttataatcatgcctttgtttaggaattactagacttgggtgaaacagttggtactcaaagtcgaggactttccgatgatctgatcaacttgcttccgacatccaagtataagtttggaagttttttctcaagaaaaaaatccggggaaaggtaaaattgtaatttgctcgattgtttgttttctggtatcgatcgaaaattgataatttttggggaacaggtgtgtgatttgccaaatgaggtacaaaagaggagataagcaaatgaaattaccatgcaaacatttatatcatagtgaatgcattagcaaatggctcagcattaacaaggttcaaactttatctcaatccttcataatcttcactattttactttatgtaattcccgaaaaattcttactttagctcgaatctgtttaggtatgcccggtttgtaacatggaggtatttggcgacgagctaagttgaggggcgaaagcttcaatttataaccgaaaaagaggaagaagaaaactcaatttttctttttaaaagttttagtcttttttctttttcttaaatctttgtatacatgatacagggctaggtaatgaattaagggtagatagtctcttgtcttcttttttctttttcttagtacaattgatgtttaattacaaattccttttcactctaacttctctgttgttgatgatgattatgagcttcataatatgaccaaaaaatagcaactttatgagcattcatatttgacacttttttttttttttaattatatatagccaaatctgaaatttcatgataagttgtgtcaagtcatttgtacggattcaatagttgatttaatgatgaaatggagaaatcaaagcttttttttttttttttttttctgaaaaagaaatgatttttaataaagaaaccaccaaatcataagacccctaattagtaattatcactcatttagagccatgcaaaatccaaaagcaaaaattgtcaaaatcattagtaaggggatagtgaaaaaaaaggcttcattgaatttatttgactttttgaagtacaccaacaaataatctatatagtacatacaatagttaaggtgctcctttttttagagaatctctctctctccttggatccaattaaagaagctcccacttaaatttaataataatgaaaagagacatggtaaagggtattgtgtgtaatattattgatataatttaatattaaattttatttattttaatttaataaatattataaagaattaataatctaattatatgttgtggtctcatagtagtgttacatactttgatgacctatagcaatactctaataaaaaagagaatttttagtctattttttttttttataattatgtatgtagttaaataaaattattaatataattttaatttttttatataatttattaatagtatcaaaaataaaattcaacaaaatatttagctagatcaattaaaagagagatcgagttaaaaaaaaaaggttcattgaattcatttgactttttgaagtagacaaataaatctctataatacatacaatagttaaggtgctcctttttgtagagaacctttctctctccttggattcacttaaagaagtccccacttaaatttaataataataaataaacaattaaaaaaacaaataataataataaagaattgtggcatttcccaacggtcagaaagaattggtagtaattagtaaagtaaatcaacggccacgtttcactcactctagtaaccgttacatcttcatcttcatcttcatcatcttcttcttccttcttccctccaaaccaaaacccatattctctctttctctctttctagctcaatctctcactctctttctctctctgtaaatggaaccagcaaagattgactggaaaaacattgagtcaaagtttgtagaagatgtgttatacgagcacattaacgcaccaaaatggttcgatttcttgtccccaaacgaccaccctgtggatgatgatgagtcttggttttgcagacctggtaacatttctcgaaaacccagctcaatcttttctttacacaactggaaatcattcccaaagttttgatttttaatttctcttgagttacttacttacaggttgcaatcacccaaagacagctgaagattttctcaaatctactccttctaaggtttgttttttgctttggcttttctgggttatctttgttttcttttatcaagaagatcaagatcttatcttataatggaattttttctcatttgggaaaaatcctattttgtgttttgagtttaattttgtgggcttaagttaatttagatcaatagattggttttctttgtgagttgaatgaaattcaacaaagtctatatatactgcttacttgtctgaaattttggtttaaattgtttcattggtgaagcttgcaagcccagctggtgtttctcaaatatctccacttggtgatagaagtcaaaggtactttagaagcataattgaattgaccttatttctctttcttttatagtaacttataccaactttctaatttgggttactattcaacagagaggccaagttgaagagaagaggggtagctcatcaagcttggattacaccaattggtaactcgaaattcaatgatgacagtgaaaatcataatccaaatttttcgactcctctaaacaacagcaataacaaccatgctaagatcatcaaatcggctttcaaatcaagcaccgaaaagaaagaagctgtagtagaagctccattgcagcagaagaacaataatgaggtgctgccaccgaggctgaaaagcacgctttctgcgaggaacttgtttgcagggcgggatattctaaatcagattactgagttttgtaatgagttgaagagaatggcaacaagaacaaaggagagagaagagagtgtgaaggaaaatgtggtgatggatggaaagattaaaggtgaggtgttgggtgagttggattggaaagggaaggagaggaagccattgcttgatggagttgaagagaatcctctagagatggagagatgcattctcaaagagaagcctcaagagatggagaggggcattctcaaagagaagccaagaagaaaaaagtaagtccacctttctatcttttgagctaaaaaaaatacttacacctagttagtttacttcatattgtgcatgatttgataccttcaagcttctttgcatcatttagttatgtttgttttacttcatgatgtaaagctaagtgtatgcacagctgattcataagccacacgaaattagtgttcattagctcctttgtgcataatggaatttcggtttaagactgtaactagactaaacgaatgagaggagtagctcaaatggtctggatctggttttctcccacaaagtctgaggttcaagccatttataggaacctatattgttgggttaagcatagagcctaatttcaaaaattatgataaggatgtttgta

SEQ ID NO: 36359 - DNA, 3222 bp, Cannabis sativa
ggttgatcgatgaacttgtgagtggtctaatgctgattagactttaatagaatccaaaccttttcgatgtcatgattttgcatcatgtcaggaatcaagtaaaagagttttgaaattaattattattactatccgtttcgttaatgaacttcaacaacaactttcttcaagtcataattgaaagtggtttcatatttcttaaaatgttttatcaattaagccaggaaagtttatgtggtttgtttatgtaaatgcagggagtagaaggattcaggtcagaggtagagaagagaatgcctggacagacactagagagagcctcttctgaagatcttgttgataagcaatgggagaggagagattatctaggtgttcatccacagaaacaagaaggcctaagctatgttggccttcacattcctgttggccgagtccaagcagatgacatggatgagctagctcgtctagccgatgagtatggttcaggagaactccgcctcactgtagagcagaacatcataattcccaacatcgagaatgcaaagattgattccttgcttaaagagcctcttctaaacgacagattttcacccgagccaccaattctcatgaaggggttagtggcctgcactggcaaccagttctgcggccaagccatcattgaaacaaaggccagagccttaaaggtgaccgaggaagtgcaaaggcaagtgtcagtgactcggccagtgaggatgcattggaccggttgccccaacacttgtggacaagttcaggtggctgatatcggttttatggggtgcatggcaagggatgagaatgggaaaatttgtgaaggagctgatgttttcttgggaggaagaatagggagtgactcacatttgggagaacttcacaagaaagctgtcccttgtaaggacttggtgcctgttgttgttgaccttttgatcaaccatttcggggccgttcctagggagagggaagaaggagaagagtgatttaaacttaactagtaatatctatctggtgtggggtcttctattctaccaaagtttcagcaattttcatgggacaagcaaacattaaagtcctcaaagaatagagatgatgatgaagaagagcacagggtattatttattattagcttatgctaatgtttaacaacttcactcacttgttttgttgtattgaccctgtttgaaacttcttatgcatgtaaagtaggatattgaaaccaagttttctttttttgcttggaataaaattgtaatttttaaagtaattgagaataataaaactgttatttattttcaatattcattattctaaaattttccatttatgtctttgggttagtaactctttctttttcaggtttcaaatgtattatgttagttgtaataataatttgcttggatggatagttataatttttccaatattcttctacattttctttagttaccataaatataatcaataatggtcttctactggttgccttgggtttaaaattttagtcatgtaaattcatacatatagtagctcatatttcagccaatgatgccttatgttgttatgtggaaagagttatttaatgaaaacactaactactcatttaaattagggttggacaaattcaatccaactttttttaatggtaattggatttgaaaaattattgtcccatccaatctaattaaattggatttcttaattgtttatttaattacacagttaatttttaatattaacttaaaaatataaaaaaaatacctaaaaactatatataaaccttaatttaagtttaatactataaaaatatatcatccttacaagtttaatacaacaaaaagtttgaaataactaaaataacaacaccaactaataaaataaaacaaaatatcatgaaaataaatacatgaaataatcaagtattgcaaattcaaaaagaaaataattaaataaaacttataaaaatttaatcaaaccattgttttactatatatcaataaatataaattatttatttaatatgtattagatataactggattttatcggtttttaattgaagtttgagattgacatcgaataagtaataggtttatttacaccacatattgacattttttaatttttttacttttttaccgtggggagaattttttttttaaaaaaaatactgtgtttttttttcaaaaatactgcgtaagttttatactgtgtactatgttaagtttttactgttgtttcacggttgtttttagttgttctacggttatttttagttgttctgttttgtgttccactgttgatttataaaaatacagtatttttgaaaaaaattccgtgtgacagtatttttgtaaaaattaactaaaattccagtatttttgtaagtttccctaagtaataactgatctaatccaattaaattccaatttttgacatttaattcaatccaattgtaattgaatatccaattttttgtaattagattgaatttaattggttcagttcaattagattgaattaaatcttgctcagttgaaatataatccaaaatattacagttcaactcaaatcctggattagaagctgatgtatgtggaaaaatatgtggtatttttgtaataaaaaatttaatgacatggcatgtgggtgcagatatcatgaatatgaatgaatacactcactaagcatattttaatcttacctgagtaacttaaaataaataggtaacaatctataacttataacatctgtaagtaactcgtaagaattgttgaaaagttatagaaaaaaaaatggtaatattataacccatcatctaataagtcactcaaacagacttagaggcctactaaaagtaccaagtgaccaaccatattgaacccaaagaaaccaaattgataactttgttactaaaatataaaaacaatataattattactattttttggttgttgttaatttaagtgctttctaaactgttgttgggtaaggaaatgtcatctttatataatgtttctacattttaaaaattgtgatggcattgattgagtttatagttatcaagtcactaactttattcattcactttttttttttttaaatgaataagtacttttgtattcctcaataacatttacaatctattaaagtcattacattcatatatttatacaatatatatatataggggtgttcacaaagtat

SEQ ID NO: 36360 - DNA, 2101 bp, Cannabis sativa
tactctcattgccaaaaaaatttatgatgattaatcatgcattataccatacacgccatattctactttctcaaccatacacttccaaaaccttaacagtaatagataatttgttcttcataaggcctacaaatgagattaatcttaaagatcggcaatacatttgggcctactaagtcttgactttgatacatttgggatttaacatgccaccacttttgtgtacaggaacgaacaagatacagaggcaaaatctgcattgcaggaactcttctctaatatgtacactgagcatcatcatctaagcatttttcagaaataaaatagcatgggaaaaaaaaattaattaagttaactataagcaagtacaacaatgaataagaaagcaaaaatgaattggaatttgaaacccttggagattggtgctgaaaggaaaaagaaaatattaagtcgttgatctaggggctttgagaagatgaatactcctcacaaacccttttccagcttcaccaacacctttcagtaacttagtaggatttggttcttcctcatttgcgccttccagcccacgtttctagaataagatttaagttgattaagatttgttgataggaaaactaatttgcaagggcgtaaaacgataaaaagtacatctcagttctaaaatgtataggtactgaacctttgaactatttatcccccatgttaagccaacagcatcacccccaagagaatcataccatatcttgaatgtacttgggaactcctcctacatatatacaagaaaaacacattgtaaataggtcgacaacaagttaaaataccaatgcactcggtggtaatgagtgctttacctctatatccccaagaaagcacttcaatggatcaaagtctaccagcagcttatttcttagttcctctgcacttcctttcaattcttcatgcaagaggaagggatgaaaaatcttgctaggactcccccgtgccacatacaatcctggccaacaaatgtgtattgagtttagaatatctgaaataagaaatggttccccaaaaagggggacagcagaaaatttgggtagccatgccaattcaggcatggcggtacgtctataatataccctgcgttaattcggaggggaagagaagacgttgggggtgtggtaatttatctctatggaggagaaccactgcgtcaaagttgttcaaaggagttcggaaaagacactgtacatgaaaagttccagagtgagaattatttacaatatagcaatattaataacaaaaacatgtaggccaacagcactttgacaaaggcattaatactcacctcccatctcaaagaatcactatgattctccaatgcaagctttgtcaacaagtttgcactgcttcgagcataagccactagcctcttaagttcctttaattcgatcaaatccatatgtaaatatagtgtacataaacaagtagaaagttacaacagccttaaatcttcatcgcagcatatttggagcaaggactaggctgctctctgaaaatttaaattttccagagtgccgaaagaacaactttattccacgaggagatttctatagctttatcagtaattttttttaatctaaacgtctatatgttcagtgggtttgagtgacatctactaagaaactttgtagctcgatagcaaaagatagcacaacataaaaggtcaatgagagacgagaggaaaaaaaaacactagacaagaaaggtgaatattgaaaatttttaacacttgaaaaacatacgactgcaatagaattgaatataaaaacaagatcactaaccgacgagtttggtgagaatctggtccaggcctcagacgacctgtcataacctgtagctacaaacattgcatgtttgatatcttgtgcatttgactcgtaagcttttctggccaacataaagttttcctggaaaattgttcacagccaagctaagaagaatatcaaaacaggaagggaccaactacaatacaagaatcctcaatgatttatggacaagaaaactaaccgttatctctttctctccgtcagtacccaaatcttcattaatgtcaaca

SEQ ID NO: 36361 - DNA, 4281 bp, Cannabis sativa
agcgctagttgcaatagggtttctatacgattttttattacaatttaagttgcagcgctagttacaataagagtttctatgtaaaattttataaacatgtaaaaaaaaaacttgttttaaagtataaaaatgaaagaaaaaatttctttttatgtaaatatagtcgttttcattagtttctgtcctgttctcctcatcaatttgccttaaaattcatatatatatatataaaaaaaaatattaaatccaccgattttttttttctttttttttttttttttttgaaatgagtccaccgaaattcatatatttactatgtatacctaaaattcatttgccttttgctgcaagaaagtaaataaataaataaaatcatttgcctttaattggttttgaaataaagtatgacaagtacatttaaagtatgaaaatataaccaataaaacaaaaaagatagcaagaatatgaaatccaatccaatctcattaaaattggaaatcccatcaatttgcttggatagaattgaattgaataagtttaatagaatttgtaaaaatatatatatatttaatgcaaactagacagcataaactgatcttcaattcctaggaatacaacatccaaattcaaagaaacactatcaaatataccttacattagttctgtcctgaatatgagaagtaaaattaagattatgaaaacaacactaatgggattcatatattttcttctgatgattttaaaaagtaataggaaagaatgcttaaaatggggtaccaatttcactcctggtttctgtagggctgtacaaagcagatctatttcttggtctattttcctccaactgcttcacaacttcctccatggtgggtctaaccgaaggcaccggggcacagcaacccatagcaagtttcaaagcctggatcaatccctcctccatgggacttcgaattcctttcacaacttcttcgtcgaacacctccattgttgtctcctcaagaactgccactttaaccattgaaggcaagtccacaaactcacttcttccattcttcccaggcttctttcctatcaagatctctaacaacataattccaaatgcgtaaacatctgtccttgagctacacttcttcatcctctgaagctcgggtgctttgtaaccgtcggtcttggcaagtgccactatttcgtcggccacagagggaaccatgatcttgtctaggccgaattcagtcagcctggcgacgaagaagtcatcaatgtgaacatttttggatctcacatttccatgagtgatgggatcttcaagacccgtgtggagatatgctagccctctggctatgcctaatgcaattttgtggcgcctggcccagttcagcacaggttttccaactctagtttctgcagaaaaccggaaaagtatataatgaataagttcaaatgaagttgtaccaagtgcccatgacaaaacagcaaatgtgtaaagcacttcattttgtaatttctttactgtgaatgaggaaaaggtaaaatgagtaacttacaatagcaatctaaggaagtaaatcatttgccttttccacagatcacaatgctttacttagaaagattacaaaacacagtatcaaaaggcctctgccaactattttatcccctggttttatgcctaaggtgaagaattgtagaaatgcccacaagtcttcaacattactaaacaaataaaaaacaaaatctttttgactttggagcaatgagccatgcaatttctgtcttctatcggtttgcctagaataatctttacacatatttatagcttgtaactaatcaatctcttaggcttaacagtgattactctacagattacagaagcaacaggtgcattagtaatccaaaaatgagacagcataaacaatgcatacacatgaaactaaaagatatccataatttcgtatacataatcagtaaatttagaaaggtgaatcaatatgctaccatgtaaaagatcataaaggcttctgtgggggagatgatcatatatcagaagcttctcccctctctttccttgatagaaagccctgagtggaatcaaattctcatggcgaatcctccctagttgctttatcactggaatacatgagcttctatccttacagctaccttctctcaataaccttaaagctatagtgcctccatcagcaagctttgccttgtaaacagttccataatttgtcttctccataacttgtcctgttgcattcaaaacatcatctaatgtcaaatgttcacccccttgaaacaatattagcttcccctcaccgccaccgccacctccacctccaccaataccatcatttccatcttcaatatcatcttccccttcctccaattcatcctcactatctgctttactggttctcttcttatgctgcacatacccaataagcactgaagccaaaacaacagtaccagtcatgaaaccaatcaccagaccagcgattgcacctgagctcagtctagtgttttcactgcaacttcttaagggtaacccacaaagggcagggttgtttccctcaaacacctctgcaccaaatgatttatcaaaaactggcagtatcccactgaagttattatgtgcaaggttcaacttttcaaggttcagctgagctaaaccttgaggaattggacctgaaaacatgttgttcccaagatcaagctgtttgagtacaggaaacctggttatgatgaattcagggaaattcccactgaacttgttgtcacccaaatcaagaaactgcaaattcttgcaggtagagtttggtaatgcaggttcaggaagagacccagatagtgagttaccatgaagcctaagagaaactagtttatcacacaagttccatatagaaggagccaaaaccccatttaacaagttattgcccaaatcaatatcagagatagaagaactgtagccgagctcaagaggaatggtaccctttaatgaattaatgttaaggtagagactttgtagcatagcaaactcaccaagctctctggggagtgaaccagataaattagcagcaggaagctgaagagagagaaggtgaagagaagggtctctgaaaagggtaaggttagtccaatggggtgaagaaacatcgtcgcatagaagaggagagccagtggaaaagacccatttgagacccctccattggcaaactggtacagaagaattccatgaatttaagagtaagttctcagcgttaccttgtaataaagttttgatcttttccaagagaagaacagcatcagcagagaaagaagatggcggtattattgatacagctgaagactcattgagtgttttagctgagctagtaacgaaggagacgaagaagaaaacatggagaaagaaaagcttcatagactccatgaaagaaagcagagtcaatacagaagagaaaagaaaggtgagagagagagtgcagagtggtggggagttcaaaggcgttctcttttttgggaaagctgacagagtttcttttgactaagagagtaataatcagtaatctcagagtccagattaattaaacggtcgtgatttgcttacatactcatgcagtactaaagatatgcttttcaaaatgatgatccaacggtggagatacatttaggagtgaaaatggtaatgcagaccctacagaataagaaataaatgcaagtctcattcttatatactggtaaaaagaaggaagaaaaagtgaaagatgaaaccatttcatttcattccttttttttttttttaaatatatatatatataatatatttagctttgtttgctatgcacgctcacctttataattctttcttttattatatagtctttgatttttgttattttttaggctttgattagcatatgaagaagccaattgtagttccttcaaatcaatggagctactctaatccttcatctctaccctacacgtgtacacgatactattttctatgattattaacacttattttgtggcactaatactaaaatatttcaattgttattttttttcttttccaagaataatacataatgttaatttttttttttttttacaattagatataaatcattctttttttttttgtcgacgacgtgacaacatataacacaagaaaatatttaaaatataaattaagtcccttataaattatataaagaaagtattaaatatagagataattgtatataacattattttttataaaaaatttatttttatttattt

SEQ ID NO: 36362 - DNA, 11467 bp, Cannabis sativa
ttataaaaatacagtatttttgaaaaaatttccgtgtaacagtatttttgtaaaaattaacccaaattctagtattttttgtaagtttccctttaaatttaaacaattaaatatattattataattgaaattattattttagtgatatgttataatattatttaattaaattttatgaaatttaatatttaattgtaatacgaggatgatattaaatactaatgatgtcttgtaatattttcacctaataatttattgtagctagaaaaaacacctaaattggtaaaatagtctaggatttgacatatccatagaacacaattattattttgctaacaaatgtttagttaattagtagtacttaatgtttgtcaatttagttcatgttatattaagtgttaaatttgatttgaattttatcatgtgtcaaatatgataatattttttaaaaaaattatgttggctccgtttttccactttgttagactgctactttatcttgatttccatattagtatgatattgtctgctttggcataaaccctcacggttttatttttggatactttctaaaaagacttcatattaatagagtaagtagaacacttatattcaagataactcttacatcttttaatgtgagacgtgggttgatatccaacatactatttttctagcacttattagagaattttgttttgcttttgcaggaagatatcgacattatgaaaaagctaaattttgatgcttatcgattttcaatttcatggtctcgtatttttccaggtaataacacactccattttagcatttaaatttacaacttctaattttttgcgatgtgtaccgagtgcattaccttcatttaataagaaaaattactacaaaacataataattttctttgtttgtaatcttttactatatttaatctttcataaataaatttataatataagcagagtcacaattcagaaaatgatgaaaatgaagaactacatgaattttagtgtgatgaggtatctatcacttttgatgtaggtaagaagttcgaaactctcggtcaaaagtttgaacctcacatttttgaaatattttctgttattttaagggtatgattttcttaaagtctattaatttcatttaatgaaagaaaaataactaaaaagtataataattttcttgataaatagtttttagaattgctatgaagtagaataaacccttaaaaacattgtattttcatgtttttaccaaatgtgggccaatgtgggactttatttctaatatactattactaatagaattgctattttttttttcagaaaagtaattactatttctttttctcaaagtaattactaattattattagaaagaataatgatatgtcaccataatattacatatacgacaacttgtttcatgtatgggtattgatcaaactgcccacacttcttgatttttgcactcagtattggatttagaatttttattttgtagagaattaattattattaaaaaaatatttagagattttttttactattttaatttataattatcaaactaaaatatttatatttaattttttaaaagataatatttttgttagtagccccacattagttttagtgggttcgtctctgctcgcaccgcaccacactgcataaaaaatgcggtttgaaatcttttgtggtgcagttatagtttaaacttttgccaaatcacgctgtttgtgattttgaattttataattgcagttcaaaccgtaccccattatatgttacaaagttaccaatttttacattataatttttattttattttttcatataaaactaaatatatgtaatatgtgtgtaacaacttaatgattaatgtatattttatgatattttttttactgtaaaaactttattagattgatttttgaatttttattgtaatatttgataataatgatagtgtacgtcattcaaaccccacaaccctcactgcgagcacccgtaatttcaagtaatcagttttacttcatatggattgagttttttgaaaaaaaaaaaatacagtattacatcactgtgtataatattattgtatgtaatttttgtacacatatccttactcttattattataatattaagctcctaattttcaatgaagtttttcttaatatataaataataaattttgaatgcagagggaactggaaaagtaaattggaaaggagttgcatactataacagattgatcaattacttgctcaaacaaggtatttttctaatcatattaatagaaaaatacagaaataaaaacactaaaaattattaggaatgtcaaatggggtaggtcaggtccgacttggcattagcccgacccaacctaataacaatttggcttgatttggcatggcccgatagctttcttaaacagggcaggtcaggaccaaccctgattaagcaggttgagcttgacccatgttaagtgggtcaggcttgacccacctctttcttttttttaatatttatttatttattattatttatattatttttgaaaatgtttatgtttagttttttttagttactatctaaatgaataaaacacgattgttatgggctagaggccgtccaatcggggcggggcctgacctggcccgtgaaaaaagcccagattgctattcctaaaatttagcattttctttaatataatgattttgtgttattgtacaggcattactccatatgcaaatctctaccattatgatcttcctgaggcactagagaagaagtacatgggtttattaaatgaccaagtagtgtaagtaataaataccattaaaaaaaatactacttttattctattgatattttatcgaaaaaacttagatttctattgtactgttgcatgcctttaggttagacaataattttttttttctgatcaaaaaatttactctctttaaatttcaattatcttttaagagaaataagagagtggactttgagacatatgcttcacaacattttgcaggaaagattttgctgactatgcagatttttgtttcaagacatttggagacagagtaaagaattggatgacattcaacgagccccgagttgtggctgcacttggatatgacaccgggttctttgccccgggaagatgttccaaggcatatgggaattgcacagccgggaactcagcaaccgaaccttacatcgcggctcaccatttgatcttatctcatgcagccgcagttcagagataccgccaaaaataccaagtaagataaaagtatttagagtaattttacagtgtttttcgagtttaaagacttttttgagttagttcttagcatggaaatgtttgcattgtcatgttagcaaaaacaaaagggaaagattggaattttgttggattttgtttggtacgagcctcttactcgatcaaaggccgataactatgcagctcaaagagcgcgggattttcatgttggatggtaacaaaatttgttttttctaacttataatcaagaatttacaactataaattgatgaatttgatcttttgtacatgtgttaggttcattcatcccattgtctatggtgagtatccaaaaacaatgcaagaaattgttggaaaaaggttaccaaaattcacaaaagatgagattaaaatggtgaaggggtcaatggattttgtgggcataaatcaatacactgcatactacatttatgatcctcatcaaccaaaaccaaaggtcttagggtatcaacaagattggaatgcaggatttgcatgtaagtttccttttatcctttattttagcttctttttatattacaataagtggaacattactattaggtaccagtagtgtcatagctagtgatattccatagtatcattaagttaaaatttgtgaactcgatagttaattctattaataatgatatgacatttcgactggtgctaggcaccactggtgtcttttagcatttagtccatacagatgttaaatttaaccttttttttttattttctaattgaacttgcagataagaagaatagggtgccaattggtcctagagtaagttttccaaatccaatccacacattggtttaacattttaatttggtttttttaacaagaatttgttctttgacacacttagctgaaatttgcaggcatattctagttggctttaccaagtaccttggggattgtacaagtgtttaacatacataaaagaacactatggaaacccaactgtgatactatctgaaaatggtaattaagcttattaactctaatcatctctgttaagaaatgaagaacaatgtgggattgtttcatatttaatagtatggtaaaatatatgaataaccatctcaaaataattagttaccacacattttgtatgtgagatactctaacatttcgattaagatggttaatgactattttcgctcaatcacaagtgacttttttgactcgctattatagatttcaagtagtttttttcggttcaatctttaggaaagctctatctcgagcacaagtggcgatactctaacgaaatcaacttatgtattttttgggaattagtgaacctaacatgttctacaatttcaaatctttctctttgaatttgtagtcctctctttgtcatggaatctcatattcttgatgttaaaactcgcaggcatggatgacccgggcaatgtgacaatggctcaaggattacatgacacaacaaggatcaaattttacaaaaactacttgactcaactaaagaaggcagtcgatgaaggggccaatgtagttggttactttgcgtggtcattgcttgacaatttcgagtggcgattaggttacacttcgaggttcgggattgtctatgttgatttccacaccctcaagaggtctccaaaaatgtctgcctattggttccaaaagcttctccaaaggaacaagcattagagagctatataaggataagtatagtccttgtgaagtatgtagtctttaatgttgtgtagtatgttaaaattgtctttataggcaataatggtaaaataaatgttgtaactcttttgttattttgttcaataaaaagtgttcatcgtttagctatttcttcatactattaattaatatcatatattaatcactaatttaagatagagattacataattgcaagttctactctcttgtatgcttttattaaatctactcctagtattgtttagtagattttttttttttttgttaataccattttggatcttgtattttataaaaattactgaattaatcatctgttttgttaaatggtaaaattgaccatatatttttaaaatagtataaataggactccgagtttaattttcaataatttttttataatataaccaatttgaagacaattcttaacacaaacagatgtagtaaacataaccagttttattataacacctctagatcgaataattattaagttttattttagctgaaaatcaattgagggtactattagtactattttagaaaatacagagttcaatttttcatttatcaaaggggtttttataccacatattgaaatttcaaaaaaaaaaaaaatcatttttactgtgggtcgaatttttttcaaaattactgtatgtttttttcaaaaatactaagtaagttttatattgtgtactgtgttaagttttcactgttgttccacgattgttttttcgttgttctattgttgtttttaattgttctgttttgttgttttactgttgttttaagttattttataaaaagacagtatttttgtaaaaacaattcgtgtgacagtaaaattataaacttttacccaaaatctaatatttttgtaagaacctaattatcaaaacagaagacccaattagtaacttttataaaatataaggtctaaaattgtatttatatatttatttattttgatgaattttatgtttatattgaacatttggatagcgttactttttagtcatattgttctatgtttgaatctaaaccatggaaatacaaaattcatataatgctcatttcatttagttaataaatttcttttgctttctttctagattattatataatcaattaataccaactataacaaaaatctctaataactcgttcaaaatcattctcattccaaattaagaagacaatttattaaactaaataaaaacacaaacactaattgtccaactaaataaaaaagtaattattcattagtgtctctttagcaaatttgctagtctcttaaaaactgaaaattagaagagaaaagtctaattgaaattcagatagtgtcaagtatgactactaatttcttttgagaagtttttggaaccaataagcagacatctttggatacctcttgagggtatgaaaatcaacatagacaatcccgaacctcgaagtgtaacctaatctccactcgaaattgtcaagcaatgaccatgcaaagtagccgaccacattagctccttcatcgaccgccttcttcagttgagtcaagtagctttcgtagaatttgatcctcgttgtgtcatgtaatccccgagccaatgtcacattgcccggatcatccatgcctgagaatttcaacccaagcaaaaagtcattacaaatttttcgaattataatagaatatatttgatatcatggggtgagcagaaagtcatctgaatattattaccattttcggataggatcacagttggatttccataatgttcttttatgtaagttaaacatttgtacaaaccccatggtacttggtaaagccaataggaattagcctgaaaatttcactaagtaagagaccataatttataatatgttttcctatcaaaaaaccaatgtgttatgggattgagaaaacttactctaggccctataggaactccattcttttcatctgcaatgtttaacgaattattaagcaaatagtgatactatttagtgtgtacaaatatgaatgagtgaaaaaaaaggggaagaaacttacaaacaaagtctacattccaatccctttggtaccccaacacctttggttttggtttatgtgaattagctacataaaatgtagtgtattggttaataccaacaaaatcaattgagcccttcacaattttaacctgttctttggtgaacttgggaagccttttgcctactattccttgcatcgatcttggatactcaccgtacacgatcggatgaatgaacctgatgaaaatttgatacgatttgaacaaaattgtccaattggaactatgcatgttatttatcggttagaaaaagagtaattagtagtgaaaatagatcatgtcactgggaaattttgttcttttggtaattttttgcgaaatagtctttatttggaatctaaacaaggcgtcaagagtatctgaaagacctgttagagagtcctacattgataatgtgtaaaaatataataccatatataagaagcataaactatttttctcatcgcgagaaagttaatcctttaaaagactaacaacctcaactaactattggttaagttagttagaatcggttttaccaattgattttgacaaggcaaaattactaaaacgagaaggctatttcgccaaagatgattttcttaccatcccacatgaaagtctcgggctctttgcgctgcatagttatccgcctttgacctcgtaagaggctcataccaaacaaaatccaacaagatcccaatctttcccctttgtttcttctgacaatgcaaaatattttataagttaagccgaacaaaaagaaaatgttcccttttacacgaagcgaatcggttatcttacttggtacttttcgcggtatctatgaactgcagcagcatgagataagatcatattgtgagctgcaatgtaaggctctgttgctgagttcccaattctacaatttccatatgctttcgagcaccttcccggagcatgaagcccattatcgtacccaagcgcagccacaactcgaggctcgttgaatgtcatccaattctttactctgtctccaaatgtcttgaaacaaaagtctgcataatcggcaaaatcttttctgcaaaatcaagtaaaacaagttaaggcactaggagatatataggctctgtcagggccgaccttgagtaataatggacccaagaaattttgcgtgttatatctaaagtaaagtgtgagtattattgagtctcttttcacaaaaaatttcaaaaatattaatttttttaatgcagaaaagtatactacataaaaattttggaccctgaatttaggtgggttctaggcactggtctagcctgagcttagtttggctaaacttctttaagctacaattagtttttagaattaaaaaagtacttttttaagtgtttgcataaaagacattaagagaagttattgcctaacacgattgtccaaacagaataaataagttaaaacttttacttatcttgaacataagcaaaaggcttaaaattttcaaaacgaaaccgttattttcgttatggtacttacacgacttgttcgctaagcaatcccgaatactttttctccaatgcttcaggaagatcataatgataaagatttgcatatggagtaatccctgtagaacaatgcacattattttaatactaataatcttaggtccatttcgataatttttacaaaataacatcagacgttataaattaggcatgtcaattttgtagatggttgaaatgtttagacagcttgttaaatttttagacaaaaaccattttacgaaaaattatgaaaactagaccaaagcgcaaaacaattttcgaagtcatttcgcactttgacctaatttcgataattatttagaaaatggtttccaacactctagacaggtagtcgaaaatttttagacattttacaaagaattatcaaaactaaaccgaaatgaaaaaaaaatgatgtcatttctccaattgtttataaaaaatcaaagtgaaccaaccaaagaaattacctcttttaagcatatagttgatcaatctattgtaataggcaactcctttccaatttacttttccagttccttctgcatttttgaatatgaaacataaaaagtttattgaatttaacaaattaaaagactaacatatcaacatgatgtgttatgttactttttcttttctctttttacctgggaaaattctagaccaagaaattgaaaaccgatacgcatcgaagtttagctttttcatgatgtcaatatcttcctgaaaaaataaaataagatatcgattctcattacaattttgaaattcaaaattacatgatttttgttgacggcttctaaatcaaaatgaattggcgatgaatgagttagatgttataaatttattaatatttttgagatacttcttctcaagtattgagcttgtcctcgatatctaacgatattgattaagcagtttattttatttagggaaatagttagcgaagctatatgtaaaaatgatgaaattaatgatagaaagtactgttatcggtataatttaatataattaagcatctgagtagcacatattttaatttcatatttattataaaaaatcattaacaagatgccacttattagcaatgtggtaatggaaaaatatttttgtattttcttttttaatagcttttgtactattattttgaaaacaataaaagagaaatgttatattattccaccgacaatttagaggtggctgctattctatataaataattcaatataaaatgtattgataatatcatttccaaatcttctcaactccatatttaaataagtgattgtcatttgtcccttgaaccaaagttgtacatcaataatttttttttaatatatattatgttatgtatcattttaaaaaagagtaatttatggtgtaaatatttaaatttaattttttatgataataatacttgagttatttttttagaacttctaggtacatgtctgataagttttagaatactacatttcctctctaagagtcgaatagaaaaataaaatacaacagtcttggcttcttgccggtgaaattttaaatttttttgagatgtgtaagatgagattttagaagaacactaacaagtataagagtcaggaaaaaacttattaaaattttttttaaaaaaaaaaaaagaacattttcaatttttaaattagaaaaccattttaaccaaaattaacttgaagtcattaaatttttattttttatttaaaaattcatttaaaataccaataaaaataatgatgcgtggatattaatttgacactaacacttggcggccaattataacaattattattaccataaaaaattacacaaatatttatttacaaccaaaaattaaatttagttatttacaataaaaaatcaataatagccttatttttaaactttaaagcattagatttctccatagtcactcatttacaaaactcattatttcttttagttttgctctacattattttttttttttcttatttatctaaaatattaaggaagatagaagaaaaataaaacttactttataatggtgatattggtctactgtaacatctgccgacccattattagcaataatccctgttaattcaatgtatttatatatttaaaaataataaaaaaaaatataataataaatgagaaattaatttaattttgaataataataataataagactaaccaggagtattagcaaaaacatcccaaatgctgggcccacgaccgtctttatgggccataccctcgacctggtaagcggaggtggccgtaccgaacacgaagctcttcggaaaatgggccctactaagcccaatagtcctctcttcttcactgagctccgctgcactcgcgtcgcactggatcaagagcagtactagtactattgttactattactagtgctgggtttgggattattctccacattttgaaaaacatttaaacatgggaaaatgaagatgaagaagaaagaagaaagaagagaatagagtgagagagaaaatggagtgagtgtgtagtgtatatcttgtctttatatgtaaagtagttgttgtgacatgtttcgagactagctttttgttttataatatacacccaaaaaagtgtcctatattattattttgggtatttgtgtctaatactttctaaattgttgaaggaataattacataaagtactattttgttttgtaaaatatttatatttttacgtttaaagaatatttttttatatttttacggttttccaaaaagtagaactgtacaaaaaaatttataaaccgcctaaaccgaataatccgcccaaatcgaaccgaaaaaaccgataaaaattacaaaccgaaataatccgaaaa

SEQ ID NO: 36363 - DNA, 3212 bp, Cannabis sativa
  modified_base (2742)..(2744): a, c, t, g, unknown or other
tcatgttgtccacgtgtagaagtgtacaaaaaaccctatagagcttctcttggccacccacagacctgtagggagcaggctggcagaccatggtccattccagaggctgtagagcttctcttcaccatcgatgcttttagagagtgtctttttttaagcgctccatccccacattacagatgccggacaaggcaagccacatcttgtctctctaggtggagcagagaaacatgctctagtaaaccagtgtggctaacttctagaagtatggtttatatcctcctgcttctggagttgtgagagtcccaattatagagggagcctatcttgcagatggacaagttcctgacttagatgatgatgtacctttatcgtacattgcccagaatttgaagaggaaggagagggccctgcgctggtgcttggccagcgggggtccatttggtgatgcttctctcggaattagacctagaggtcaggcttttgagggacacgctcgccccttacctacaactagaggcaagggaaaggcagttgtagaagattttgacagttcttcctccgaagatgatggtatttgatagttaatgacaccatattcttgccatgccttgaatgattataattgctttctaacattgctattttctttgtgcagatatgtcttccaggctgagaggtctcactgggggaccttcagatgagcagttggcaaggttgttgctcttggttgaccagcccttggctaagcatctagctttggccgaccagccctagactagacaatttcccttagtgggcaagctctgcatgattggttacccttccttggctggccaaatttgctagactttcctggccaatttgtgagttgacaggaggttggtcgtacaaatttctttggtttggtggatccacctgtctaaaattactattcagtggtggaacaaagtaacttcaattctcgcttctcgagttattattatcctttgtatttttttcttatccatgggcctagcttgttaaaattaggccttagaataacttgttcccgaatattttaggggagggcattattgtgctggtcggttagggtctaggcagttggcaaggtcccctctcctgaattgtcttgtcatcctttaaaacctcctagtgccaggaacttgatgttcttgccatatggtctgtctggcaagatttgtccatcttcaggcaagggaaggtctgtcctcatgctcgagagacctggttagactatttgtccaatgtatacctgcctgtagaccctacttgacctgtcgatgagccttcgttacaaaggatctcttatcagatcttggcctctttcggctgttatctcgttgaactaccttattaggtcactagcttccctattacgacaattcatctttgcctgatggtcttaaaggatggcctcttcatcgtccatttactttatgaatttgcatctctgttgggtaagagaatcgcaaccaatagcgtgtggttcttctgtctgagtgacctgaccatcttaatgtcgtctcccaggtccacgtgtagatcgccaatagtttgtttgctaattcatggtcctgtttctcctgcgtagtaatgtgaaacaacccattgtgttttgcggaggttttttcgtgttggtagggccttctgtttgaggcgctattggtggacccttcctaggcagcaagggctgatcattaagattcatcgagttagcaggttcaacaagattagtggtattggttgaatttgttgggtttgtgaggtttgcaggattgacggtgttagtcgaatcagtgagacctttcgcggtgggaggaacttgaacattgggatcatctgtcatacgatcttaaggaagacccaagcaagtggaggtttttgttctcctatttacaaccatagtgattaataagaatgacgaataatgctctcaatgaaagaaacaaaatgctaactttgaatttgagccaactaacaatggagccttatttattattgataatcaccatgtgtaaactataataacaaacattaaagtgacacattgatttatagaggttcagcgccctttattagatgtgtattttttgtaaatttgagaaggagacatctttgaatttcttctatcattgtattactatctgtggtattttgttcagaagtaggtgggggttgagaataaactgtctcaactggaacaaacctttgggttttggctgttggtagatcaacttatttgatcatgatctcaacctgtttgtagcttgtgtctgtgatgtggtttggaaatggcagaatgcaattgtgcacaagggtgttagataggactttgatgcaatatttgcaaactacattcaacgtttcgagaattttctgttgtgcattcactggaggggaagatttttttgccttcctcaattgaacctgcttctagttttcttatggatgagaatgtttcgtgccttcaggtggatgcttctatggtacaatcggaagctggctttgcaatgtttcaaaagagttgtgatcaagtggatgaagcggttgtgtaaagatatatatcgggggtactgaaaggtgaattttgtgctattgctcttgtctttgcaggtttcttgagacaagggtatcaatagactttgcaatgagatggactctaaagtagcggccactactttcaagattgtgttatattatttgatataatataatatnnnttaaaatatttaaatgtgacatattatatattaatatgagattaatatatatattatgtgttggaggttgtattatatcaattatagtataataatacacataaaagttataacatatgaggagttacaaatctgaaaatagattgtaacttaaggatcacatgtaattatgtgagttattacatatgaaggttatggaattaataggataagtttctagctgttagaaactgttacaatactcaattatatcatttaaatgggtattgggatgttggggaaagatttaatttggagaggagttacaaaaactcaattttgagttttttggaaacaattatttaatggttggttttatgttgtttcatcgttgttttacgaacacctggaacaagttttcgaaaacatccataaacgtacatgaattgattgagcatgtttccagctctcttgtccaacgtttttatc

SEQ ID NO: 36364 - DNA, 10384 bp, Cannabis sativa
ttacagttttacaaacattgggcacttatactgttaaaaataaacattgagtttatgcggcttacaaacataaaactttaggtacttacgctgctatttaccctataaaaaattatgttaaataaaattttattttctatatatttttaattattttttctcatactacaaatttatatacatttgatataaataatttataatatttttgaattatatttttatcacttttttttttctaagaacaaattatagtttataagataactctagatttatgtggtttgttaataataaaaacataaatacaaatataaaagattttttaaaacaaaataaaaaataaaaagtttaaatattatttattttaaatatatttccctcaaactaaaaaaattctctctaactctctcattcgtctctcttttgatttctctctttctctctctctctctctctcacacacacacacaagctcaaaacaaccatcaccattctcgccaccacaaagtccgaaggaccacactaccattccagccaccaccgaaatcgtaggaccacaccaccattccagccaccatcgaaaccgcaggaccacaccacattctaattgaaggttggaccacgtgagataatgggtaagtatttttttaagctattttgttaaacaattgtaaaaatatagtctatttttagtagatatatgtggttgttgtttgtattggtttggttttgatatatttttcgttgaaatcatgagatctagttttatggtgtattctctgtgttcgtattatttttgatgctttttcaattggttctcgacattaatgtcccaaggtcagagaagtcctttatcgacagttttgcgataggttctcgattatttctcgacatggctaatgatttttctattacaacctttcttgacatgttatcgatgtgttctcgattgtttgtcgattctttgtcgatggtgtggatagttgtcttttcaatattccttgtcccatgttatcgacaacttctcgactggttgtcaactgtttctcgatggttgcctatttattattttgaatggttattgacggtttttcgactggttcttaactatttgtcaactgtgtttcccattattgtaattttttgtgatttttgtaatttgattcagttgctttacgttggcattgaattgtaggatcacgtgtgtttttggtttttgtattgtatggtggtgtttagggtgttaagatttttaattgggtgtataaaagcgaaggaagaacaatgctggaagacgacgggaggaatgtttcccctccgttgataaaaaagtgatgttgcctcggaattgtggcaattttggcggttcaggccacaacagaactacatccgaagtccgtgtttgaggttgaatctgatataacatcactttttagtcaaatatggttatgtttttgttataaaagtaggtggtaaacaattgttattttaatttgattttaaaaaccatcattttttacgttatcaatggtttcaggatggtatatcgacatgttctcgatacctcatagtagagaaaatgtttttacttattcctattgagatcatattgataattgatcgataattagttactttcaccaactgctagtttcttgcattccttcatcaattttaattctttgtccatgtttgccatagttatcaaagtttgactttataccaaaatatgctctccaagtaatttaaagagatactttatgattacttggaacaaaatactttcattaaaatgaattattttttacatgaactggtaaatgaaatacagcagaatcagctactggtaatatggtgagtgctcgttgtttcaggtattttttgttagcgacccgttaagccatgtaatttataaacccccgttcctacaacaacttcaacaaaataaggaccttcccagtttgggttaaatactcttgctgcagggtctcgtgtattagcaaacacacgccgtaacaccaaatctctcactttaaacagtctttttcaaactttttttttattgaagtgtcttgttatttgatgttgctatacaacatataaaatttgcgaatcaatgctttttttgttgagcaaatccaaggatacctaagtagttcttagtcgtagaattcccgcatgtgtgtcacaatgttaacttctactagcaacatgacttccgagccgaatgctagcgaaaaaggagtatgttccgttgctacttttttctattatccgatgagcccagagtacttggggtagtttctctacccattttcccttagttgcgtcaagcttcttttcatagtgtctttcaaggttttattaacaatatcgacttgaccattggcttgtggccttgatactgaagagaagtttttaataatctttttccatttgcagaattcagtgaacaaatatccatcaaaccgagttttgttttctgacactatctttatgggtattccaaacctacaaatgatattcttaattacaaagtctaagactttttttgaggtgattgaaaatatccatcaaacctaccggtggtttgacttcaatccatttagtaaagaagtcgactgcgaccaccgcatactttgcacctcctcactcagctcgtaaagaaccaattaaagcaatctctcatattacaaatgggtaaggcaaagtggtggtatcctgagtaatgtgaaaatcgttggcacttgtcacattttttaacaaactcatgagtgtctttattgatggtaggctaaaaataaccttattagattatctttttagagaggctctgccatccaacatgagccccacaaaagctctcatgaatttctttaatgatactaccagcttctgctgggagtacacgtcgcaataagggcattgaatatcctatcctacaaagtttgccctcaataactgtatatctcgggatcacatacatgagcttctgtgcctcacttttatctgttggaagttcgtcgttgagcaagtactttataataggagtcatccatgtgggacttaaatcaattatttctatttcttgctcttcagcttcgcatatacttggctcgcataatacctctacttgaactaaattgaggttgtttgatttgaattacgatgccaactttgctaaagcgtcatcgttagagttttgttctcttggaacttgctcgattttataataatcgaacttcatcaagttcttccgaactttctctaagtatttggccatcctggtgccttttgccttgtattcacccaacacttgatttacgatcagttgtcaatcattgaagcattgaattgcttcggcctttaaggcttcaacaatctgtagtcctgctagcaaagcctcgtactttgccttgttatttgatgctttaaacttgaaccttaatgcataatgaaatatgaagtttttaggagatattattatgatacctgcccctaagccattatcatctgaggcaccatgtataaataatttccgaacctcttgatctatttcttctttgagtgctttgtcagagcttattccttccactaggaagtctgctaaatcttgacccttaatagcaactcgagaatagtatgttatttcaaagtgtcccaattcgatcgattattttattaatcttcccgatgtgtcgggttttgatagtacctgtcgcaaaggctagtttgtcaacactttgattgggtgtgcttgaaaatacactaggagctttctcgaggcgtgcaacaaactaagtgtgagtttttcaagtgggggatatctcaattcttcccccagtaatagtttacttacatagtaaactggttgctgggtttctccctcctctcgcaccaaagttgcacttatggcattctccgagacggctagatagacatataacacctctctagttattggttttgccaatatatgagatgtggacaagtgtttcttgatttcttggaaagcttactcgtatctctcagtccatttgaatttcttattgtctcacaaaacattaaagaacgggagacatttatcagttaattttgagatgaatctatttaagactgccattcttctgattagcgactgaacttcctttgacttttttggtgaaggcatgtcgagcaatgcctttatcttctcagggttagcttcaattcctctcacgttaactataaaaccaaggaatttccctaataaaactccgaacgaacatttcttagggttcaacttaatattgaatttttttcaatattgagaagcattctacgaggtcttctgcatggtcctcgcttctgattgactttactaacatatcgttcacatatactttcatgttccgacctatttggttttcgaacataccattcacgaggcgttggtatgttgcttcagcattctttagtccaaatggcataaccttgtaataacagtacaaccccatattagtaacgaagcttgtgtgttcttgatctgggacatacatatttatctagttatatctagagtatgcgttcataaaggtcatcagatcgtgttccgctattgcatcgactaaatcatcaatcattggcaatgaaaatgagtatttcgaacatgctttattcaggtcagagaagtttatgcaggttcgccacattccgtttggtttaggaacgagaacaagattcgagatccatgtaggataaaatgcttctctaatgaaattattagttaataatttatcaagctctccctttaaagcattttgtcgctcgatatctagatgaagtctttatggcgttttggtagataagataaatctatgttgagattgtgacagatcacatttgggtcgatcccaaccatgtctaaatggatccaggcaaattgatcctggtttgctttcagatgtgtgattaattgttattttagttcttccccctaaccttttccaatattaacacacttggttgggtcgtttgggtttaaattcacttctatcaacacttcaattggcttgagttggttgtgctcgtcttgaatcctgggatccaaatcttccatcttccatcttccatctcgcatatctcattctcttctattatagttaccatcaattagtgggttgctattcttttcttcaactcatcactataacattatttgctgttagctggtcgccttttctattccaactctagactgagttggaaattttaaggacatatgttttattgaacttactacccccattccagtatatgatggatgacccattagtatatcatatactgaaggaatatccaccacatggaactcctacatttgggttgttgatagtgaaggttctcccatggtaagtgggagttcaatgatcctcaggctcgctacactgtccccaatgaaaccacatatgtttaccatacatatttttaatttcacatcttcgaaccccattctctttaacatttctttataaagaatatttactgaactcctgttgtcaatgagaacccttttttatttttttgtcgcgagctgaactgtgatgacgaggggatctgtgtgtggggattgcacgtttgccacatcttcgttagtgaaggttattgaaggttccttgggtattctatgcttgagtggttcaggtgcaaaggctgactcttaatttttaacctgattaatgtacctcttttgagcactatttctagtctcggcgagatgtggccttccaaaaatgaccaaaatatcctcgccctcaactgggggaggttgtacattatggttttgattttagttgttggactggttttgctccccctgtttctcacatactacctgaaataaccttggcaaatgagtccttcaatcttgtctttcaattggtaacattccttggtattttgtccaatatccttgtgaaactcgaaatattatttggatctcgcttacttcttgagttctttatttattcggaccttcggaaagcgactcgattctcgtttgcgagaaagatattttcacaagtttcattcaattctgtataaacagaatatatgggaacatatttattgtgtttcttctgttttatcttattctttgatgaatcttttgactcatcttttctttttccattaaacccattcccactgctcgcatttcccaccttcgtcgttacagtacttgcagtagcggtacttgagctgggtttatcttctgagccagacttaagtatttttgttccattgcgtgcttcctcttttcgcacaaagattaatgcctatcattgaattcattcatcgacctgactgggcacccttgcaaatcatcccacaactcgcctcccacagttgacaagtcagtagttataccagcttggagtgtttttaactgaatagtcattcaattctctcactttcgttgatgccgtgctaagacaactcatataagcctttagtgaatccactaactgttgtttgatatttgttagcaatgacgcttctggccttttatcccttgcggcttggaattactttttgaattccttggataattactcccatgaagtaatgcaatgattcgtaaatttatcattccaactgcttgctgcccaagtcagggatgtcgggaacggtatgcaacataagttattggacatattccttgctcgcattatagcgttgaagttattcagatgtgcaactggtcggtggttttgtcgtattccgcgacatggggattcttaaatccttgaggaaatcgggagttgggtatgaatgggtggaaaggttttgtttcctcgttagaatcatatcctaacagtttctcatattctctatcccgatattgcttgaacttgtcctccaactgtataacccttagttgaatgggatccatgacaggttgctcggcttgttaatgctaatttgttgtgttctgatttaatcgttctcagaattctggaatattgcggctcagctgctcacgcaagtcaggctgtctgcagttcaaatattcagaaagattgggtttgcgttgcctttcatctctccggtcataattactgaccaatcttgtcgctaagaaactttcagactggaaactttgcaagttactcatgctctcttattcatcacaagaacgataacgagtacttccatctcttcatgtccgcctttcccttgcatgtgatatggtcgatctactctgaccatgtgttctcgacccactcgagacagtatttgattccatttattgggaatcttctcgagtaggcctatgcctttaaaagagattgagacacagtccttactcaagtaggtatacttgctatctcttttgttttggtttggcccttgcgggtgcctcggtgggtgtcatgacctaagttgtccccttggattcctcgcattacgatgggtaaatccttgatcatcctgtcgcttttgtctagtatccatgttcctacgagacacctctgagtttttaggttgtgtactcccatgatttagaataccgggagaagatcctagatcattggactgagtttgtctagtgttagtgtttcctagattctgtggacattccgtgtccactagaatatccctcgtattccctggttgatcatcctagggattcgtgggagttttgcggttattttctctagtaggggtttccttatttctcttggttctcggccttctgggtcttcccctatgtcgccttatggatgtgtttggttggttaggaggtgcatcactgtgtgccgctcttacagctacagcctcgcgttccaatttatcatttctccaattcgattctgccaatctctattgaagttatttattttttaattccacaaatggtacgtatcttgtgggatcgtatgcatcctgactacatctttcatggattttatcaccagtttgctcaaaacccccatcagtatttctccttcccgagtgtgggatcttagtcacatttgtcccttgggtaccctggggttctttcccagtacgcttagttgtttctctcgattgattgtcatcgttttgaggggtatgcctagacatggttggagaaaaagaaaagtttgaatattatttatggaaggtgtgttttttgagttttttttacaagtctctcaatgaaagtaccaaactattaacgctaattttcgttaaccaataaacaagtcttgatttaataaataaacttcaaataataaataataatagtaataatatatataaacaagaagatttttatgtggttttgaagttaagtttttatagtctacgagtccctcttattattgggattagacgagtttatgattcttaatttttgtcgtccctaattctgggaagtcttctcctatttatagatgtctgggataggcagttattctcttaaaatcctatcctcgtaactgctcctgaaacatgcacactttttcacatttcatatttataacacatgggataaatagataacctcacaaccactcttgtctttatttaaaaagcggttatgctgactaagattttacgcctcgcagtattaataatcactttctatacatattctttagtctttcaatatactcacaagtatgtggatcaatgacttgcaagctcttaaagaattcattatctatcatttccatctaactattgttttattgtttactctgtgtatcaatgacccttttttacatgtcgttcacctttggtcttacaagatagttgttattattcataattcatccttaaatgtttaaggagaagctcaaatgtctaccatttatatttttcgagacgagttattgaacgtatttattttcatatagcctgagttggtttatatcctagccttttttacatgttttaggatcatattagtgttcaaaataagtataacacttatattttacaacttgtctaccttaacaagcatttttaaaaatttaattattaaagatgctcttatgaggtatattaattttattgatataatttaataaaaattataaaaatttactaactaattataatgacaagacattatctcataatagcgcaaatagcaaatgctaatatccgtagtcatgttacatgtaacgtgtaacgtgtcacatatatggctagagaaaagccacgtgtcaattacattgcccacctcatcatccatctttacgtaaaaaaagaataataataataatgccacagattttgagattgagatttcccactcatataatccatatatattatatttatatataaagaaattgttaatataaaaatatcaaaagccaaggcagccaacccttgccgaggcgtgaggtcacagtgattggaaccgtacataaaaaggagaggaataacgacgtgtatggctaggattgattatgttcagacaaacttcgaggaaaccgaggaatgatccaacgctccaaatcctctcaacggctatttcttaatattgtcatatcatccaacggtcataaccgaatcggcggttgccgcccacccaacccaccatttgagtgtagtttagccgactgtaacggttgtcggtcaatttggattgacaatgacttctttttttctttaattattaataataaaaataattatttataaagtagccgttggaaaaggcaaagactctgcctttgcccatgcctgtggctgtggctccgatcgtttacttccatatataaatataaatagagcttagagagagagagaaagagtgcgttaagaagaagattctgttgttaagtttacaccatttttattgttaaattcatttccatgatcattgagattacgagaaatagaacgtctattaatctcatctttctttctttaattattattatcttataaatatttattgctagcgtttgatttgatcagctttttttttcaaggctattattgatcgtgttattagaaagatcatcggctaatttgtgtataatttttttgaattataattagttatggaagcagtgattaatgttgacaggtattactcttcatcaacaattgagtacaacaacaacaataacaagaagcaagtgatgatcaaaagaacaaccccaagaaagaacagccgaatttcttctggctattatatcaataaaccatctgaaaacatagctccggcaacggtcaacggttccggcatcatccaacaccttccttctatttacctgtttaataataataataataactcatatcatcaacgacaacaaaacccacctttgcttcctctaccaattctccccttctcttcttcatcatcgccaataaacagaggcctctcatgccc

SEQ ID NO: 36365 - DNA, 7004 bp, Cannabis sativa
tcttgaatgataatttgtttttttattattagtaacagttgtcacgtttgtggtgtactgaaagatgttctgtatttgcgtttagtattgcttcgaaacgtaagaaggaactatatcttaccaaataagtgcattgaccagagaaccttcgtatgaaattatttatcaaaaaagagtacgaagcatatacagagagatatagtgacagttataaagaatttaaatataaaatggctagtttataaccgtgaaagcatgtgcaacaatatattgaattattaatattattattatcccttattataataatgttatccttgtggaaattatatatgagttgttcataagtgcacaatgtgtaaccactatatcttcaactaatccccggtggcctctatctgtcgtctccagttttggtcctttaagattctataagcactgaatttctttcatgtgggcgctctatttcataatatccacactatgttttcccatttatttatgttgtccaatatcaaaggaaaaaaaaagcatttgtcaaaaaaagaaaaaaacaacataagactaaaggaaaagaaattgataatcacatacagtcaggtaagcaattgataaaactttctacgatggtattatatagccagtttgttacatgatgctacgtagataatatgaagagtagtagaattcatacgtcataatggaaaatattatatgtaattgacaacaacaatagcaagcaccctataaacaaattaggctaataagaaacttgctctgtgattctaattaagaacaatttataaacagagaatatcaagcaagacggacactttttactttctcctgttctgataatgagtaggagaattacgtgaaatctatgacccttagtagattaaaaggacaaaatatatctaacatataaactagttactcccaatagtattagctgtgacataggtaatatgttgtaaaaccttccgtgtgctaaattcactgcacctcagttcacatttttcttcctttggaaatgaaaatatctccgtacggaaccttttgttcgactcttagaacatccttactggctagaactgcagatatagttgctaattcttagattttagtatgtccaaagttctaaaagctcaaaagtgattatgtgcgcataaaagtagtatgcatagtaagaatatagcatatagatcttgaagcgaagtttgtaccacaagtttgatagaagagcaaagccgcttctttggggttcattccagtagctagattgttcaaggattctacttgaggtgcgcctggtgtatcaaaatgtgccttcatttgcctgtgaagtgaaattaccatgatgaaaagtttaatgaatctatggataaatagatataaaaaaataaaaaaaataaaaaaaagcatacatgcttatacagtcagttattctgtcaatccgttgattgtttactggtagctgggtctgtgtaggtccagtttccaccagtaattctgtcaacaaagcaaaaatgttgacgatgaaatctaatctctactgcatctttcgcaacaatatgatgttatataccataatctggagtggggccattattctcagacagtctttgtaatttgaaattgggatctgggttatcccatgcattctcttccgctacaggttcaagtccattgttgctgtttctggatgaagaataagtccttttcttgttggacctgtaacttttgatagtcaaaatactttacaccgtatttagacatagcataaaattcgaattgagcttcatatgtaaaaagttttctcttacattagaatatatattatactagcactactcaccgtcccgaattgacttctacattattcaaaataattgtatgtccagaaactgagcttggaatggatctcacgtcatcgcctgtaagcacatgaatgtaaacataacaaaaacattattgtatttttgttgggtttctgaaacattattgatataaaagatcattatacctaaaaactaacgtgtatatgacaatcattaacggaggcttatactacctgaatatacaggagtgcgcatgaaatttgcttcagtattcccagatccattcttcataagattagctcgtagttcgtccataagaattacagtatccgctcgttgtctttcgaaagaatttagtgactggcgagagccaactccactttgaaaatcttgaaactcctatatcattttaactcttattctcattaccaggtataagcttaagtttttgataaacaatttctcttgttgagtggcttacaaatcctgttggatcttgaaaatttattccttcaggtggtagagatactcttgcttcaggagacagagctggcgaggtcctcactgacgaaactacaagagttagttaaattacaaaatatcttaagaaaaataatttcccaacaaataacacagaccagatggtgatttttgaggaatttggacactttttatccacatctccatcagaggtcgcggataatagacctctctgattccggtcctaaataaatcatccataagtaccgtaggaggaagctccatgagatgagctatcttcatattggacactaaaccggtgcgctgcataacagaacggacaataaactatctgccattctattgtttgtattgagctagagccactttcaaacttacaccgtcaaaagttacactgctatagataatgtatattttcataaattaaattcaataaaaggcaaggaggtgttattctttatattttcaaggataataacgcttaagagcagggacaatacgaaccaaacactgttaatttctctatttattaaattaagctgggtagaattttcagctaaccttcgaagtcagttcaccaattgagctttgatctgctctaattatgaactgataaatggagttaagggggtatacctttctatttcttcctcttcctctttttaaagtgatatccgaaggattttgaagccaggattggtatacatgacctggaacaatagtttgttcattatccatgataacggcgcctaattttcttcttctcttgtttctgggcccctgattctgttgaacctgctttattcaaactactacattggtcaagtatatatgtgaagttttaaatcttcttactcctacgaaatgcacggctgatagcgtatatcatctaaccatcatgctactttgctacctggttaatttccttggattcatcgttctgataaagctcgggctctggattaatttcataagctgcaaggagatcagataaccatcattaagaggaggaagtgcaatcctctctcattacgaatttttatctcaataaaaggaactaagtggggataaaaaaaaaaagcaatttagttaaaatgcacttggtttcaaactaaattcaagtgacttgaaggaatttcaagattgctgacctctttcaggctcgtctggaaggggtggagagggaataggagtagtgtgaatttgggttcccgaagtgaggttgacctgtggctcatcatcaccttcaacatcaaatctggacacatgcatgacatattagaattttacagttcataagacatgaatgtttaacacaggtacaaagcctacaggaccgaagtatatatgcttatacgtacatacataatatattatatatgcaagcttgtaaactaaggaggacacctttcgtaaagattgtaggtagttgcatcagcctgaagtggatcaaatttctcaaatattgtgatattttctgggtcagctgaatgcaatagttacaagttagtagtaactaaatgtgatatgtacatatgtacaggcattcctgatacttactttcacatatctaacatttaataatacgaagtaatggaaagataagagtccacattataaccttgatggaagtgttcagattgatctccatctccggcattgccattaataaatgtcggatccacactgtcaagtcgctgcaaagttcaagcaaagataggtttagagccaaaatgtattattatcatacttacagttacagtgacttacggaagacatacatatggtccaatttttctttttgaaagaataaaccatacgaaacttgacaataggtaaatgaaattaagaaatcatactatggtttaatgtttcagtaaaacatattttatcactcatcaaatcatgattacaatgactctttgagccacctttttagcttctaactattacaaagcatataaaattatgataccttatatatgattatgaagaactgaagaaatttaacaatttgatgagttcggacaggaatttcctcaccataggaaaataggttgtttgatggaactccatgtcgactgtggtgctgaaagaattatgcatctgctgctccatatccccaacatctgtatctttgttctcaggcagggtcacagtttctttcctaaaacacaaagatatacacatgaacaaaattcttactaagtagtattagagttgagtttagatttctacttctcctctctttatctgttctctaccagccttttcatttattcaatgaaaactcattttcgttcctctccctccaaccccacaaatattaaaacaaaaaaaaataaaataaaataataacttaataaatagacctgcctattttctaattttagagaaagactataagaagaaaataatgactgacttggcttgagattttcctttggggagcagagtacggtctggtacagctttcactttccatgcttggttgatttcaacctgcattacgacaatcaaaagattaaaacaaacattaaataaagaaaatcagcatccacccttaaaaaatagagcgatgaaaacagagtacttggtaatgaagagagaaatgaaaattataaaaaaaatgaagtataattagttaccagaagacgagtcacatcatctgaacaaaaaaacagagtacaataatacgaaaacaaaagtatcgttagagatttgtttcagaaatcaaaaaactaacactgaaattcaacaaaattgcaaaataaaagactggaaggtaccatatagcagttttactttccgttcgtacacaatcactacaccacctgagtaaaacaaattgaagaaccactttctgtaatttcgttataataaaattaatgaagaaaacgtgagagattgtaatttgattacccataagaattccagagagcctaagggccatgggaaccgacggattcaatatctcatcactgaaaaagaaaaatccaaccgattagtttgatcatagagctttgtaactacgttagccaagtgaagaaaggcgaaacaattggaaccagatcttgatgatgtcgatcttgtgtagcttccttctattaatcttcccatgcatcgttgcagccatcctagcattatcaaaacaaacagaccaaaattcaacaaatgaatgtcaaattcaaaacgctagactaaaaagaaaaaatccatcacagaaacggaggaaaattcccggaaacaaacactcttaaaactacagattctacttcacgattttactcagaaaactcattggaagctatgtagtgagttcatatttaaaacttttgaaaaactatcttcaaagaactcccataagaaagagaaattctcaggaaacaaacagtctgctatcaaacaactcgaacaacagattagtcttcatcagaacttccaatggagaaagaaacactacgataaattcaattcaatgagaattgaaaaataaaaagaaaatagcatagaaagaataaaatctaagaaaattaaaaaatgcattggcagaaagaaaagagttcaggagtcaccagatttggcctagagcagctttacgagcaaggagctggtgcgagtagaacatttttccactgaaagttcgaagtgagagaaaatgaagttgaagaagggtgaatgtgattggtgaaggaatatcgtagcttaaggaggtcaatgagctctgtaagtgtagtgaaggacgttgttgtgaggctctgggttttaacttgtgcgcgccatgtattgtagctgagtaggggagcaaggagagggtgagactcgcaacgattgtaaatttgataaagttaccaacatgtataggttttgtctgtcaaggagctactaaaagaatgccatgtgtgtgattagaagaagagtaaaataggagtgttcatgaatcgtgaaggagtttagcgattacccttattacagcagcttctattgctataggtgggacccacagaatcacccgttcttcgctctcaacttttttatgcttttcaataacaaaattatagttacgattgcttcaaaaaaaaaaaaaaaaattatgttatataagaaacagggagacgctagtttttttatttatcactattttgttaagtacgagttttaataagaaattattacttagaaaatataaattgatattttatttacaaaaaatacttttataaggtaaagacaatatttatacctttgatgtgattttaattatcaaaatactacttacactatcatcacttacacaattagacgacggttgcaggatagttgttgcgtggttgcgcggtggttgcatcagacgaagatttcaatcagacgatagttgcaaagtagttactaggtggttggctgaaagttgcatcaaacgaaagtttctgagtaattgttgggtgattggccgaaggttgcatcaaacgaaggtttcaatcagacgaaataacggttagaaaaatatttatgcaactataatgcaactattgtaaagcattaaaaatcagaacaatgtttccacgtgcgtaactctatgtacatgtctctttgtgatttaatatgaacaaatacaccattagaattttggagaacaacaaaaatacaccaagataaatattt

SEQ ID NO: 36366 - DNA, 4548 bp, Cannabis sativa
atttacaattactcaatatagtcaataatttggcatgtttacaatacaacatttacatgcttcaccaataagaatagaataataaacaaagatcaaacttattaagctttgaattgatctctttatatgtttttggtgtttatcttgttactaacctggaaactcccatcaccaatgcaagcaattacacgtttgtcctttgcggcctgagcatacccaagggtcgcacctacagaccatccaattgatccatactgcatctggaattcatacctgattgaaaatattaccgagtaggggttggaaacatccttctaaatgaaaaacaaagaataaaattatacatagctatgcatttactaacaaaaaccacttacccgcagttctgtggaaggcggagtttctgacaattgaaccatgaatctccagtttcagctatcactgctgtatcaccacttagcatctcctgtatatatgtacatgatcaatgagagagaaaaaaaaactagaggacaataataacaaaagcagaaagcagatataagcatcactactagatgttatgaaggaatctcatgaaatttgtacatgtgaaaacttgatgaaaatatagatcagtagagggtcgctatgatcctagcaccaaaacttaagagggaaagagaaaaccagaaagttaagcatgttaaactctacaccattctgtgaggatagtaatgaatcttatgatcaaaacgaaattaaatattagttttcttttttttttttttttttttggactcacctgaatgtgtttgaagagaatattgactcttaaaacttcattattttcattccttagaggaacaccaggtggaacatatatccggcggtaattttctaaagcagtactatttttcttcagcttcttggacaatgcacttaaaaagtcagccatgaagacccagccaaatgatggaccatttccaatcgtcacacgattaggctctaccatgatagctttttccttcttgatcaataaagagtacccaacagagctataatcattaaagatgggcccagcaaagagatacgcatcagcagactcaacaatctctccacagaagctggtgctgacggcgccccaataagttccaatgaaatggggatggtgctctggcacctggcccttagcggagggcataacagcaacagggtaaccactagcatcaacaagctctacaaatgcttgttgagccttagccacccttagttttggtccacccacaagaacggccttaacagctttgtgtaggaaagcaacagcagcgtcaactgctgcttctaatcctaattgattgcttactctgcagaaaaaaggtaaatagtcatgtaaaatctaatgttgcttacaacaaaagaataaaattttactaaattacccaaagaaaataagttagtttcaaaattttcaccatgacaaaatattagagagcatggaatttgaggattcgtagtaaataacttgagatataacatcattttcgttaccattaattgatcagcattatgaaacaagattgtatgaaaggaacatgtcatgtaatgactgtaatcaagttataaatctgtgcactaaattgaacaaaaactaatgcttgtcctgtattcaaccttagaaaaatatcattattgttttgacgtaggagcaatttatagttgacatgatccaaattgtagaatgatgagtgcattatgcagccaaatacttccaaaataattaaacagagaaacaaatcttaggcagtatcaaaagaaaaagacatacttgggagcaaggaagaaaggaacagggtccctgccaaaagtgggatgtggaatcccaggcaaattacagcttatgctgatataaattggcttgctttctttcaatgcagttgaaatcgcagtgtctatctgctcgtgtgcatcatccaaattattaaccacaacctacattaaaagcaagcaaggaaaaaccacacatcaccgactgatatatttaatttggataattaatcacactaaagaaccactagattactaacctcaaagatgatttatttaagaataaaaaataaaataaaacaaaaatataaatataaatataaatatattatgtcctttcttctactaaaaagtttctttttttaacgaggacagagccacaggaccactaaatacttgaaattgctatttttgtaataatgataactatcaaagcttacctgagcacaagtaacggtttgaaagcacctaagttcttgactgaagtccggcaaaccgatcgtatgatggaggatccggttcgtcccgtagtcatttgagttcgggccgccaactatacagatcactggcaaattctcactgtacgctccggcgatggcattgagaacgctcagcccaccgactgtgaaagtcaccacacacgcacccacgcccctggacctggcgtacccgtcagcagcgtacccagcgttgagctcgttgcagcatccgaccaagttgagcttcggctcggcgatcaggtgatccaagagggtcagattgaagtcgcccggcacggaaaagacatcccaggcgccgatctcgacgagcctccgagcaaggtggcggcctagagtgccgctcgtggcagatggacagaacgccgagttgtgtcgaacggtagaacccaagttaattgtcgcttccatgttatcacttaagtcttaaaggttaaaaaacaattttggaagtgtttgatatgaataagtgtgagttaattgttgtctctttgggggtttttaaggtgttctcatactatataaatatatataactttatatctttcgagaaaagaaaagtaccaattttgggaaaccatgggcggtcagaggtcacggtagaacattcatattaaaaaagtcattggtcacaactaggagatgtggattattaaagtaaaacatgattttattttggattttggctgtggttggactacgtgagctggtttttcaaagtgggttttgctctttatattattaatattagctacaggatgatattgaagcttattataacataattataactcattgtgctggctttaatttgtttaattggaccaaagggaggatgtttagtgtggggatggaccacactaataggaaaaccactgctaatttttctgttttacatttcagcgtctacatgattacgtttttcattccctattgtattactttgggctaccaactttttacgtggtacaatatgttatatatttatgatcaactgggcaatactttatggtttatacacattcagtgttatttagcaaaaaaaaaatatatatattaatataacaaatgaaactctgtaatttatatctgttagaggtgcgcaatggacggattttatgcattttggatttcgggggtgtggtaattgtataccaaacttgtccattgcggactacaggttttcaagtgtgggtgggttgggctcgggttggaacggatacgggcaggataaaggttgagttcgggttgatccgagcaataaaaaaaggcttttctttataatattgaactagattttacataaaaaaacatgaatacccagaaatttgacttgatgatgcgaacatcatttttgacacgtggcatgaagaaaaacaccctaagctctacctctcgagattaaggtggtcaacttgtgtactaggaactatggcagtgccccaaatgacatttggggggcacctaagttggcatagatatctagcaaagtcatttctaggtgctatccttcgaaaagttcaagaaaacaggttgcaatgaccctaaaacaataatcgtgaggctaaggatgtctcctagatatcccagggctcaacctaggtccagtacaagtactgggctcctaggttgacacttgtgtgcccactcgcatcaattgtggttctgaaaaacttcttttgtgcaatctgcttagccattatactaggacacatgagaaatatgccactgccaagtttcaaactctgaatataggtctagaagaaattgtacccaggttctcagggaccctactcgacgccaaggttgacatataattgacctttgcaacacgatagctagggtttaggttttaaagaacttctttggacccctattcctcatatctaacaaggatcaacgctagggcatgaattttcataaatgacattccgaaggagcacatctcaaactataagcacccaacttgacattacaacttaagcactgattctctttcaccaagtaacgcccatctgaattagacaaacttaaatctggtgagtacctttaaccaaaaagaagactgaacatcaatgaggagaaatatggggactttcccccccacctgatcgcctagcgaaaaccctcatgctgctatgggcacccacatgttgacgtaaggaactctggtacacctttctggagaagtctcccaaaaaatttccttatttatgttgacgtgatgtgaactactataactgaa

SEQ ID NO: 36367 - DNA, 3472 bp, Cannabis sativa
tttttttttttttttaattatgagttttgagaatattatcatttcatgtgaaactcactgtttggtgtttgtttagtcagttttgagaatgcttatatataatatacttttctgttgtagcaataattaatgcctatttccatgtgaaactctcaatattatgcagctacctttttctgtgttgcgattgttcatgaaaagtttatcttccatcttgaatgagtgcaaaactggagcaaagctggtattcaggagcccattcatataccattcattcaggaatattgcattgtcctccacatctgttttggaggattcgtgcctattgtctgatgatttcatttcttgtgatgattctaaattgctggaggctaagcacagttcttttaaagccagagaagaatatggggttttttctggtggaaaagatgtggctgaggtttgtgaaaaggatgtgttgtatttcaatagtgaaaaaacagaggttcctgaggtgatggatatctttagaatacttacaaattgcggatggaacttgacatctcgaaatgggtacagtataaaactgaatgagttcaatatcataaggatcattgattatctgtttcaagagagttccagtgccaatcttgctttgtacttttttaagtggtcggagagcttcattggatcaaagcatactatacggtcagtatgtagaatgatacatgtattgacttctgggaacatgaagcataggacaatggatctactgctacgtcttgtgagagagaatgtggatgaggaatcacccagtttgttgctagcagtcctatatgaaacccattctgaaagaaatattttagagagtgtatgtagcatgcttgttaattgctatattaaagagaacatggtaaataaagctcttaagttaacatgtcaaatgaagaacctccttagtatctatccgtcagatagggtttatcatgcgttactgcgggggttgattggatctcagcagttggaattggcatgggaatggttggatgaaatccagagtagaggaatgggattaaatgcttctacaattagcttattcattcataattattgcaaggaaggtgatcttgaaagcggttggaaattgctttgccaaatgagaaaatatgggatgaaacctgatgttgttttgtatactattatcattgatacactttgcaaaatgtctcgtcctaatttagccacctccttgttgtttaagatgattcattttggtatctctccagattcagtgttactaagctcagttattgatggttactgtaaattgggacatatggaagaagcaattaatatattgaaggtttttaagcttcaacacaatattttcatgtacaatagctttatatctatgttatgtttggatggtgacattgtaaaagcttctagaatcttccatgagatgactgagtttggcttgttgccagattgttttagctacacaagtataattggaggatactgtaaagtaggggatatacagaaaggctttctatatcttgggaaaatgtttaaagttggaatcaaaccatcagttaccacatacacgacactcattgatgcttgttgcaagtttggaaccatggaaatggcagaatgtttgttttctaaactgatgacagatggtttgctacctgatgttgttgtatataatacattagtgtacggatatggaaagaagggacagttacagaaggtttttgagcttttggatatgatgaaatcttctaatgtatgtcctgatgttgtaacctataacactctcattcatagtcttgtgataagaggttacgtgaatgaggcgaaaagtgttttagatgagctcattcagaggggtttttccccagatgttgtaacattcaccaatttaatagatgggttctcaaaaagggggagctttgaagaggccttcctggtgtggttctacatgagtgagcaccaagtgaagcctgatgttgtgacttgcagtgctatcctcagtggatactgcaggcaacgccgtatggaagaagccaatgctttatttcagaagatgcttggaattggattgaatccagacctgaggctgtacaacattctcattcatggattttgtaatattgggaacatggatgatgcatgtaacttggtgtgtaggatggtgcagtgtagtattcttccaaataatgttactcatagatccctagtgcttggatttgagaagaagtgggttaagaagcctgtagaaagtgtaggttttatattgcaagaaatattgcagagatatggtactaatgttgatatagatgagtacttaaagatgatagagcaaccgggtcgctataaaacttcataaatggggtgaaagctgaaacaaacaatccaatgagtcagcataatcgagctaggcacctgtgattcttgggatcggaagaaaacaaacatctttttcatagaaagccacgaattctcatgtgcttacacctagaggtcatgctctagtctgttagttgactctcttctcttgtgaatccagtactaatttagtaagtgggatggcctataagatgttgctaaggtgctgtaacgtatcactgtttcatcatcatcattattttttttttttttgtaatttctgagcaccaatttagtctgatatatttataaattccaggtggttttgtcatttcactcgcaataaccttatccagctagtggtgccgacctcattaggaaacttaaagtgaaggcctagggtgttgagtcattttttcagtcaatgacctaggatgctgagtcatttcactcaatgatgatattaaaagatgctttccattgtgaaaatggcggtaagtttctagcttgaccccctcctcctgttttccatgccataataaacatatatagtagcattactcatatacagtgttttcaattttaatcatgtgtggtagttctgaagttgggtagaaaggttatttttaacaatgtgtttctatcaaatattacgaaacagagtgatttttgttacttctttactcagtcaaaatactacactcctctcctacattaacacataaaatatactgatacaacaaaaactatatttcagtacatgtgctcttaggcttctatttcaggttatgtgcattttggttttgttggtgcccactatatattctcacttgcaaaagtttcatacatgacaggtggcagggttggtcagttaattgctgtaatatttgacacataaataaaagcatttgtttatgaatatggtatatttttcattagttcactttgttgggaactgaagtttgtttcaccagtttgcgtttggctgattaaatctctgaaaattcaacttgcagagaagctgcagttaagttcaccaaattcaagctaaactttacttatgtatcctaacaaaggttgaggtgaagagctactattt

SEQ ID NO: 36368 - DNA, 11445 bp, Cannabis sativa
tataggatgtattctaatacaatttcagatgctagtgactgtttttgatttatgaatttcagatataagtttgttattttttttttattttcgtaataatctggtaggtttttagtgtctaaattttttgtttcatttattatttcaccagaattaatgggtattttccgggtgttttggtgttgctgggcaggttctatgcgtgagggacgaagatgaagtcattggtattaattttctgtgtctacagtataaaagaaaagaaaaaacccaatccagtataaaagtaatttctgacgtatagcagtatttttgtaaagattaagctaaaaatcagtatttttgtaagttcccctaacagaatatatagatagagagataatctctaaccaagaacaagtctcatccacccctaatacaaatttagcaaggccatgggctgctttatttgttaaacgattaacatgcgaaacatttacatcaggaaaactgaatttcaattgaagtataattggcaattattgttgaagaacccaattaagactgaaaaaaagtgctttggcctccatttcattacacttaaaattttcagaaaaacttgtttagttaatagacaaattaattaaacaaagtcaatagacaaaatacctaggcattatgcatatattttatattatatatataataatagacaaaattataaaattatgattataatgtgatataattgaaaatataggaaaatccaataagtaactggacccagcccagatgtaccgcgcttctcttcaacggtggggttggcggagtagactggccgtttggttacatggataactctattccggacacgaataacgcacccagagctgggaaagaatcactatcaatggaggatcacaggagttggaaagagtaagcaaaagagatagcttacctcgcatattgacctctcttccggctttccaatcttcaccaaaattttgtttttattttcagagttcaggattctctcaagaacaaactaattgcagaagatgatttctcatggaaaataccgatgtctggacccagaagaagcttaagcatggaagaagaagaagaggttgagcttggagaggttttggagtatgtgggtggggttgatataagcttttctaagaaggattcatctgtagcttgtggcatccttgtagttttagacctccatagccttgaagtagtctatgaagatttctcagttgttaccctccatgtcccttatgttcctggcttccttgctttcagagaggtactgtttgttccacatataatattgctttggcatctgtttggttgataggaaaattgaaagaagagaaaaacgattttcattatgtattttttttctcttttggtggtgtcagcttgtacttaccattggaagcttagcacttagagaacaaaaagtatttgtggatgtgatgctgggaaaatttcatttagttggttcagtactttttctttttatgaattatctgggttgcttatgcttctttttcttttgtctattatttgatgatcttgtgaatgatatttgtgactaattgcttaatgcatttgactcttgtatttgatttaggccccagtgcttctccagcttttggagaaaatgaaaaactgtgcaaatcctttctatccacaggtagatttcataatataagttaccaactactactgctactactatcattgttattattaattgttagagtagcaattagcatggaccagagatactaatagaaaaagtaaaagattacaggttgttttgctttatttactggaagtcttaggctttatatgctataggtcttgtttttattgtattgattttgtctgaccacggttttcctccgccacaagtgaggctcggtcagtctaagacatatgacctgtgtctttcttttgtaaataaaaagaaaagtaagttttaacagccttgttatggttttgatttattatttgtttgttaaatgatgcttactaagttggttacactttcctattactgtagttgctaatggtagatggaaatggagtactgcatcctcgaggtaattgttttagtagggacattaaatagctttaatatgtatcagagttaggaattattttttctgacattaagatttcattgtctaattttccagaacatctctttctcatattagtcgtaatattaatattatgactcatggattgactaagcatgctcttaggctagatgatgaactttcttggtcagaagaaactgttcttcttatttgtaactgtgttttgttgcaatctcaatcttattatgataaagtagtttctgaaaaaaaaaacatgcatagtgtagctaacaattacattgaatttagtaatgaatattaattctctctttctctctctgtgtctctctcaattaggttttggcttagcttgtcatttaggcgtggtggctaatattcctactattggtgtgggaaagaatgcaagtctcaactccatcaccctttaacacctccctataagattgttgaagctgcttgtttcggtttcataaatatttgtactatggttttattgttttgttcagctccagtttttttatttttcatgttttgattaacagaaaagaatttagctaccatcaagatctggatacctattttgttttctgctgctaatctgtagaatcaatgttacctaccactgttgcatgacacagtgaactaattcttaatgcttatgattttgggttaataacttaagtccttgactagttgtataatttgtcataacagctgcatcatgtggatggccttacactgtcaggagtgaaggaacttctcaaagcaagaaaaaatagttgcggagatttcattaatttgataggagactctggacatgtatggggagtggtaagagttttgagtaaatcttcttttctttaagaattatcaaaatcaccttgatgcgaaaatgctatgttgaaatctcttatggttggcatgagtactccaatggggttttcgagcttactgtttataaaatatgttgactgaggttgttagtgatttaactttcattgaatatctgagattgtttttagatatggtcactgagacttgttttttttttttttggtttttgttcatatacatgtttatgtttctaagcaagctgataagactccctctgatccttttatttttttgaattttcgctttttttttttaaggcaattagatcgacagaaaatttgttgaagcctatatttatatcaattggtcaccgtatatcacttgaagctgccatcaaaatagtaaaaatgacttgcaagtatcgtgtgccagagcctatccgccaggtgatatactactctctaaaaactttgaatgtctgctttgataattgttttcggctctatcaaatttagttaattttctcatcagctaattttcaatcatgttgatctcaatatttctgccttgaactttgaactagaaaataatcattttttcttgtttagttgtattttaaactatttaaatttcattccaattgattaatagttaaaacagttatttaaatttattctattctatccctcttattattctcatcttcattcctattactctgttttgctagaaaaatttgattaactttcagttctgtttttaaatgaaaatgtaggctgatataagatcaagagactatcttcgaaaacatgagctatgaattgttcttggattggatgataaaattccgcgagcctggtagacttactctcttctttctgtttgatatgtacaagttactatatttgtgcaatggcttgacaaaataaaaccacgaaaacaaataaaagtataaaaatgaaagtctcggagaattaatatagcaatctcactcactctgttgttccttccttttagaaattagtgagagatccttgtatattatattttagttttcataatatgagtattgagttgtatctgtaatgtaatatctgttgtcttatagaaaaaaacatctatatgttttagaatttgaacttaatgtgaatgttaacaaattgaatagcataaatgttagctggctgatcaatttgttgtccaatacaaacatagctgcagcttttgaaagtccaaactttaaacccaagctaccagtactaattctctataaacaacatcaactgggaagggaaagaaaaaactagtaataatgataatactaatacaagctcaaaaggccaagaatcacaataccattgtagtcagagacaacaacaacatcatcaccatcatcatcaaaccatggggctttttaagatagccagctccagctcctgctcctgctcctgatccgatattagctggtgattctgcttggatcatgatccgaaatttgcagttttcaactgatgggtcttggtcagtgatggcagaaagatttgggaatctacaggcactatctagctggttgcttatctgatagtaactgttgaatgcataggaaatgtttcctcgagcatccaagttttcacaagaagaaccatatccaagactggtgcaatcaccattttcacaagcatagctcacactcggtgccaattgtggatcctgcaagttagcggatgaagacaaaacacaccattttttagccaggtaacgcacattggttgctggtactaacccgtttgaattggaacctagcttcagctggtacttgggtgatccatcgaaataaaaaataccccaatggcgttcgaagttccctggcagaatgctcttgtgatcttcatcaatgagactaaacaagtagacatccatgggtccaggtctcattggggttcctgtctcggcattgaacctagacatgaacccttggttgaaccgctgagcaagctctacagttgcacttttgtcaccatcagtaggccagccaatctcaccgatgattatggacaagtttccaaatccatttttctgcagagcccataccagtgtgtcatggtttgcatccaagacattctggtagatttttccattgtcgtttatggcagcggaatagccatcaaagaatgcgaaatcaacagggaaattgggatcgttgtggaggctgataaaaggatagatgtttacagtaaaggaacctccattgtcgcttaagaacttaacgatggccaccatgagatcttttatgtctgttctgaagtcaccgtcggaaggtttctcactcgagctgccatatacatcagcgtttaaagggatagtgactttaacttggctgctcaaaccagctttaataagggctgattgaatgttttgaagagcaggataagttgtttggaggaaacttccattgtaggttgacaagaatggttcattcccaactgcaacataccttgcaaaaaatgatgtatgattttgaataagtactttacaaacaagaattaatttcagacagaaaaacaaaaacatgaaactccaagctgaactttgtaacaggtctacctcattcatgtatatatatattattatttacacatcacatgattgaaatagaaggaaattctatgagtttttacctaatgtccacaccgtttgagacgtgactggagacatttttagctacccaattctcagctgttttgacagtactagccatgctactaagcatgtcgtttgggatacccaccatgacttgaatcccagaattttttaaagcattcaatattgctgaatctgcatcaaagagcttagccttttggattccattatcctttagcaacttcaccactgttgcaggaggcaaacgatgagtcgcctgagttccccaattgactccaattcccaccactgagttcactaacaaagaaaccatgagaagcccacctagaaaatcgactgcttttacaaaccccatgagcctcttttttcccaaaacacagttgttgtttggtttggggtgaaagaaaagaaagtgaaaatgtttttcttttctttttcttgttcttttttgttgagtttgaagctagtatttagagattatagctttgaagaaacaaaataatttggagagtgaaattaagaagatgaaagaaaaattggcttcttttttagttttgggtatgaaacaaaatgctgatttagcagaagagctctaaaccagtatcagaaactgatgaaactcaaaacaagataacccagtttctgaattggaaaattaaagttaaagaaaagactaaattaaaagaagaacttgaacttgatttcagaaaatgaagctgcaacaaagagatttgactcagcttctaatgtaaccgtatgaagtgaaaaatactcacttggatcattcattcaagattcaagaaaacaccaagaactaagcaaataaagaaaaagggtaccggagttagtaaaagaaataagagagggaggtagatacataaaactcttaaaaaagttaaaagagttaacagaaaacaagcatgaaaatcataaaggcaaatgaattgatcaaagattaaaagcaacaaaccagaaatagaaattcttgctataaataagtatacatgtgattccaagttatgtacatgttgagaagatttgccatgaaagtgaaaaaagaaagaaaatagaaaagaagaagggtctaagagtttgattgagtatgatcaaaaaggtcaaggtagagagagaaagagagagatggacatgcaggaagaaggtgtcgagttttgaatgatcatgatttgatttcaagcttagtcatatctcataatataagttatatacaattatttctttaaattgattttaatttgagtatctagtggtttgattggttgacaagtttttataaaaaagctatacaacagtaaagtacacaaattccttaaacaaacattttaaaggataaagaaacaagggaaaaaacaagaaattaaaggaaagaatgtttctttgttggaatttttgtggagtccccatgcattgaatttggggtatttaaaaacaaaatatttatgtaaaaataagaaatttattaaaaaaaatatatgagattaatacaaattttgtttgtcaaaatactaattttattttcaaataaaagtatattgtaagtaaatagtttttattttttaaaaaaatatccagccaaatgatatttttctttgaattttgagcttattttatttgggcgttttagttactattgagtcaaaataataaaaaaaaagaatatttactaaaaaaaaaagagagagaaagaaaaatatgctctctatataaaaaagaaatagaatgatttcatgtatctaatccgtgaaaccataaatttcgaaaataacttgtataaacatttgagtgaaattttgcaaataattgatgtaatttttttgaaagggtaattgatgtaaatttagaaacaacacaaacatgtgatctcctatttttttttttctatacaatatgatattcttactatcattatgatatatatattttatacaatatgatataatcatgtgatctcttgtgtaattgacgtaattttttatacaatatgatattattactattttgtactgtgctatttgtcccaaattcagcaccaaaaagactaagtggtcattttttattggactatatgaaaacacaaattacatataatgaaaacaattaccctatataacatattatatatgctgcatatgtggtttggttgctcaatcaattccagacaaaatattttatttattttataatttaaagagtaactttagacatacacttacacacttgtacacacaacaatatattaaatgataagtcatatttttgaatgggaggcaccgcatcacattagatttaattatgtggctaagattaagttaattacacattattatgtgttaaaagtatatataatttaagtgtgtctcattgctcatatttaataaattataaatgattgtgtgatacacttaatttatacacactatttacacaccactaatgtgtaattaatttcaattacacaatcaaaattgatatggttccaagtatatatgataaaaaatatacatcattgtgtctaaaatgtgtatgtgtctccactctctaacagtattattattaatatttatattttatttatttgagtctagcattattattaaattactgtaactaatattatgtactgtaggcagtaaaaaaagcattgcaaaaaatgaagtctaactacttaagtttactacattatcctaaagaacatatatggaccaggaaatttcccggaatatttctttcttgtgttgacatggatgtatatattttttattttaaatttgttacatgtcacaattaataattaatggtctatacatacattacaataaatgtaaatttacagtcccacactctccaataaaaaaaaattgcggctgtacaatttctttagtttgatcttggttttgtaatgttagcagcaaaatatcaaattttaaagggacaaaaaatattatataaactagaagaaaaaaaaaatcaaatttttgtaactcaaaacttggactgagttattaaaacagaactttaaattattcatgttaaaaattaagagcattattgttcatgaactgaaaacacaatgcaacgatacatcttttttttttttaaaaaaagaaagaaattgaaagtaattcaaaccttatagatgaacaagtggtgttatgaatcgatgtgattaattgttggggtccaatgatcccattggatcctcacataactgatgtagttgggtctatacaatacagctcagctgatcacaaagtcatatatatccaaaaaccaagtaaaaatgctgccgactataaattccttccttaaaaaaatatgatacatttgacctcacttacctacgtttctaccaattaatgatattatattattatgctcatacattacataccactcattttaattttttttttttaatgtaacgtaatttcggtcaacattgaatttatcaaacatgttaatatatttttccttttaagaaaagaaaaaagaaaaaaaaaatcacatgtttatatatcaaaattttgagaggctaaaaaaagaaaagaaaaagggaccaagttcattagtaaaatttgtgaactgcgaagtgaaccacgtaaagaagctagctacaagttactttaattatttttttctttatcggaaagacttctgcaaaatgaaaatgtatcaattatttattggtttctaaattaaatatattttattgagaaattttagaagtaaatggatgtactaatttttaacattttgatagttataaatttaatattttcatacggcaatctattatattataaagttattttttaaaaattaaaataatttattacgctcatatttttattttattttttatatctactttaaaaagtacacagtatatataaatcattcaaacaaaaaatgttgaatgagaaaaagggcagtgtattcttaaaagtaataattataattataaaaaaatcttgagcagtgtatactgtgtacaatgcaattgcattaacggtccaagacaaatgaagttgaagcgaagtaaaggtatggccttaaggaaagggtatatatggtatggccttaagcaactttaggcataatagaacaaaaaattcacgacattccactattttatttaactttttggcacaatatcagcagcctaataaagaaggttaatttagagcatgatttttatatacaaaggaaaccccacaaaatattcccattgcaaactttataccaatcatatgttcattcattttaatattatttattattacaaaactattcatctgacagacaacagtgattgtgaaagagctaatatcgctatatttggcttccgtattatttttttattagctgagtatgatgatatatatcattcttggaaatatccaatattttatatatgtttattaagttatttcatattagtttgtgttagtttcagcttatcctaatgattcgccgcatgttcctagcctattgaattctaatcctttcgaattgcttacatatcaagacttaaatatattggattggttagttatgatagttagtactgttatgcctagttgttatgtctagtgctcacttataaaactaacaatttagatgtgttgttaggtgttggttagagctggttttgtgagtagagatagaaaagaggagtgagatttgtggtgagtttgagtgattgagagagaaagttcttttaattgtggtggctgcattgagcagcggagatcaagaagccatttctaaggcttgctcttagtttgtaattcatccgaaatatcatcaatggttaggaactgatccctgcagattcaatgagtttattagaacaaggatattagattcccaaggaaacttggaagaagtttaaccctctttaattgattgtgttcatttactattttatgttcttattatatttgatgatttgttctagacattgtgtgcaaagaaactcggttaagtagcattgtacaggttattacttgggattggaagttaggatcgagttcctaacagtggtatcagagcttaggttagagcaagattaatctcaagagtgtgatcaagattcatgaccaaggctatgtttggtaggaaggatggatagattagaaaaggatgggaaggggaggggaaggagagaatatttactccacttaatgttgtttggtattaggtatgaagtgggaaggatggagagagagttaagtagtaaaagtacaatattatcctttggaatatcaacatatattacgttttaagagataattttgtaatttacacattttgttttgtctttctctttaatcctcccaaaattgcagggatttaattttagaagtttaaagggagaatgtctccctccatctctcctctccttccctctctccttcttgccaaacaagtgattcaacaactctttccatcattttccctccactcctctccatctacccatctctccttcctaccaaacatagtgcaagagtttgccaagtagagtgtatctgagacaaaaattttatgggttcaaaatggatgaaaacaagtctctccatgacaatttgaatgagttctataagctagcttctgatttgaacatcttggaagtgaagatcgaggaagaagataaagcaatttatctattgaattcattacctggtcaatattaccaattcaaggtgtttatcgagatttttggaaaactaattatagaaattgaaaaaccatatttttgcaaatgtcaattatatatgagaaaatataaaactgtatgcgtctgcagaag

SEQ ID NO: 36369 - DNA, 7096 bp, Cannabis sativa
aatggtatttaccctttctaaaattgtacaaataagaccctaaactaattttttatcaaaataaaacttaataataatttgatttagagatgttatgataaatttagttacatttactgtaactgttcgtgttaaaattatcttaaagttagttttattaaaaaataaaattattgaaaattgaatttatagacttatttttaccattttaaaaaatataaaatctattttgtcatttaagacgttaataacttttacaaatattccccataagtaaacatgacgctagagaagtgtgtttagagttgtgatctcttctcaggaaagggatagtgtgtagtgagtagtgagagtgttatagtgttacaagaccaacccctcaaatcaaaatactagacttagtcgtatgatcagtcaactcttctggcccactacagtcaccattacttgggttttctttgtttgtttgatcttgatcttgaattgatgttgataggcatggagctttggactctacttatgctgagacagaattgagtgaagtgaaattctctcacatgggttgttttcactccaagaccacccactttcactccccagacgacccttcttctaactcccaccaaggtttttacttttcctcttcttttgcttcttcaggggtttttgagattacttgcttaatgggtttttgatttttgaagcaaatgggaatctagttgaggaggaagaggatcgatctccggtgtttaaagagtactctcttaacgaccttcgaaaggccacaaatgggttcagtaccgactttattgtctccgagagcggtgagaaagctcccaatgtggtttacagagggaaacttcagaacaatcgctttgttgctattaaacgcttctctaagcagtcatggcctgatgctcatcactttgtggtaataatttttgcttaattctctttggtttgtggtaaaggactagactttagtacttgggggctgttctagttatacatttgtcattatttttgtgttttcttagttggttttttagaatttttgttgctgttttgaactcaaatgggatattatgctattgattattttttctcagtttgttttctcgggaaacaaacaggtggggtttttgctttttgtttaaaggtgttgaattttgttgatcaggttgaggcagcaggagttggtaaggtgaggcataagagattagtgaatctgattggttgctgtgctgaaggagatgaacgactcttggttgctgagtacatgcccaatgatactttgtccaaacatctctttcattgtatgaattaacttgatcacttttctttccagccaaaaagaaaaacttatcacttcctttttttttgttttctgctacttttttggttaatttactcctaaagtttgttttttgcccccacttttatgtaaacaagatagacttttctttttctttctccttttgcttttcttttttctttcattctttttcaagtataatttaggacttccactgtggagaagaagtatatttaggaatgtttgaggcttattttagatacttgttttggtataaaatctactgttgctaagtatttgagtcttttttcaacttaacatgtattcttcaactgttatctttgtataaagtttttatttcatttcatgataacttattacatcttttgtcataggggacaagcaaccattgccatgggaaatgagagttagagttgcttactatattgctcgggcccttgaccattgcaatgcagtaaaccaaaagatttatcatgatttaaatgcgtatagaatcctatttgatgaggtacgtaacgaatgttttctgtgtttttattttactttatttctataaagtgttgttggatgattcttagttagtttcttttttgttgcattttcgaattattaactacatgtatgtgcaaatgactactgtgacctcaagggcgaacatgttgtaagctgtgattagaatataacaaatctatgcactttttccaggatggtgaccctcggttgtctagttttggcctcatgaaaaatagtcgagatggtaaaagctacagtactaatttagcttatactccacctgagtttgtacgcacaggtaaagtgtgttctcataatttgtgtactgtgtaatcaagtttgctgcacatattcatgtttaataatcaaactacacacatttaaagaagtggatggggacacgtacatcttaagaaattgacagttgctcttcagcaagatcagctatttgagttacctagaatgaatttagtcattactaaaattatatagtgttgatattgataccatagttattacttattttgttgaccaatatccactttaagttatagaatatgtagcgattgaaaattattttgcttctcttcatttatgttaagaaatatgtgaatgtagtttttgttttttttttctgtttatgcatactgaatcacatgaaattttacttaactgagttcaacaagtgtttacccagtagaaagatgacaatccttaactatgtctatgaaattgatcagtcaaatacatgcaggcagagtcatcccagagagtgtcatctacagttacggaactgttctgttagatcttttgagtggaaaacatattcctccaagccatgtatgttgcctttattttcttcttgttgcatttcctcacttcgtaagactaatttctatggattttgcaatcggctcgacatttctatttcatatatggaaataatagaaaagtgttgtctttgtaggcattggacataataagagggaaaagtgtactgtctttaatggattcatcgttggaagggcagtatgagaatgatgatgcgactaaattagttgagcttgcttcaaaatgtctccagtccgaggctagaaacagaccggatactaagtttcttctcacagcagtgggaccacttcaaaagcagaaagaggttgatttttgtgtttttttcgttctaccagcctgctaatttgttctatgaggatttatctgatcagtattattgctctgtcaaggtggcttctcgtgttctaatgggtctacctaaatatatggctgtgctgcaaacaatgctctctccccttgggcaggcttgcacgaagatggatctaactgctgttcatgatattttgctcaaaacaggctataaagatgaagaaggggcagaaaatgaggtatcctagactgtaatttttctgtgctttccccttttctggtatcgctacaactgaaacacgtatccaatttaacggtttagatcccagcaaaaggcaagggaaagagatagtagaatagagacaggaggagtgcttattagtgtgcataaatggcccaagctcattttaacaaacaatagatacaacaacttaaacctgacttgtgaattatgcactcgagccaatcaatgtgcagtaatttgtgaattaaagaaaacaaaaggattggattatgaggaatagatcgcttggtttatgttagatctagtagagtttctctattaacacttggcagtgtcatggtcttgtggcgtcggtaaaacatctgactataacaaatatgtccctgcagtgtgatttttgttattattattactttcgaataagagagagaactttatttaataaaaagggattacgatttacgaagaaggaaaggtagcttttgataatttgtttctagattatgttggtctccaatttcaatcatctttgctgatttcttcatgattggttgtttgtattcctgtcctgaataaatttcactgagttttgctcatacttttgttatcatatgtagctttcattccaagaatggacacaacaagtgcaagatatgctgaacaccaagaggtttggggatatagcttttagggacaaggatttcaagagtgcaattgagtattattcgaaggtagatgtttctttttctcatatcagacctggttatcttatatattttttggtttctacaaaaggggtatggaccataccgcatggtaaggttttgatatttagccgaaccaataatgaaaagtagtttgtatacttagcacccttgtgaagtgtaacattactattgatgcaactcaatatcgggtcccacttgttttactgtaataaatattataaaaaatcgcaaccaagtatagggtgacacttcatcgtgatgctaatgctctatcttgttagatgtgcttggagctttctgtgggctgattttttattcaatattatattcaattgccctatgcaaatgctgaaacttccatttcaatcttattggaataaacagttagtaggtatgatggctgcaccttcagctactgtctttgttagaagagctttctcatacttgatgaacgatcaagcagaacttgccttgagagacgccatgcaggcccaagtgtgcatacccgagtggccaactgcattctacttgcaggctctggcactatcgaagcttggaatggagactgatgctcaggatatgctcaacgatggagcagccttcgaaactaggaggcagaacagctggcgaagctaaacgcaagtcttttgaacaaacaaaacaggtcctttttttcattaactttgtcgatcgaaataggaagtgaagtagagaaaaatgaaatgcaagtaatagaggttagttctcttgagaaaattatgctaaatatcaggttgtctatatacttagtaaattagtcagtagtaacagaggcttgagctatgtataatagactcatctatagatgaagttgttaaatattatgtttttattagttgatttctttgaaataccagatgatcttgctcttgtgttatcgaaatgtcaaaggtggaaaaaattgacttagtaaaagtttcttgagctgttaataattttgaaaagttacaattatagcagattcatttttagctaaacatattaaaagagaagaaaataaacacagagaattacaagtatctgtaatctctgatctatccctgtaaatggtttgaacccttttggtggtggtggtgcaatcaaaggttgactttgattattagtgatgaagaatatgatcaatgaatcaggatttgttgctgggattaactcatctctatgaaaattaatatttttattagattaaacttaaggtgctaaattgttagattatttggttaaaagactttgttatgagcattgagcactgcgttttaatcaaatagaacatggcaatttgagataaaaaaaggttaataatttgtttggaacagaaaataattatagttgttcttagttttgaatgattttttagggtggagaattaactttgattgtcttcaaatcgtttccattgtcaaaatttaaattgttactacatgcatcatttatgcctatcttataaaaatttgggattctcccatatctgaatatggagagctaaactaaccctactactagagcaatagcagagtagtgttgcaacgccattattgcactactctaaaatggtatttttgcgtcggacaaggctagactttctaaacacttcaacccaccccacccatccaccaactacttcctaaacacctcaaccagccatgtctatatcaacagcccataacacaactctacaccacccaagccgagtcgaaaaaggaaaccccgtccccatcaaaggtcacctttgccaacaaacctagtccccggtccccaacactctctcatccttgcacccaaggagaacgactccaaagaagaaaatcacaacacgaaggaaaagttgggatagacaatcacatagatggcttggttggaaaagggttatagaaaaccctagcatagaagataagaatggttgttaaagattttttatgagaaaataaaaattaatatcatttcaaaataaataaataaaacatcataaataacaatatcaaccaaaaatattcaaaaggtgattaaaagatgatcttcatatataaatatatttatataaatttcaattcaaaaccctaaaaaaatttcaacctaaccctaaaacttcttttctcttaatagccctaatctatcagataagactaagaagatggatgaatcaaactaactatagtcgcatcttcttaaatagacattcaatggtgaccaaagaactagaattattagtggtacaattttcatgttccatcaatgtataactttttccagtaaatggtttaaattgatcactagattcactactacttgattcatcatgaattaatggtgtattggttattgggtttccatcgagacgataaccaattccagtaaaagccctaaagtaggaattatcttttttcatcttgttcttttttagagtattaatacaaataatttgatgacgattctcaatgatgtcagcttcttcattaacttcttttttctctatgttatcctttctattattcttcatatcaaaatttgaattgttggattgctttcttttcgtcatagtaatttttttttaataaaactaaaaataattataactatatatgtttacgtgatatatataaatatatataattatatataggtgatgataatcaatgtgagtgtatttagtatatggtaaaatctatatataggtaaggattcgttaaatcctattcttattattattataattattatctctatccgaaataatctctttaattatcatttagaattttttttcatattatatttttttttgagagaacttattataattatttgaatttattttagaaatttgattcatttttaattatttttttaatgaatgatatcgcttctatctttcaaatttgaaagaaaaaaatcgaaaatatattctgataagtttgttttaattttttttttaaatgataagttttgttagtattttggatatttaaataagaatatatatatatatttcaaaaataagtatgttattacttacgagcataaaatatttgaattgatatttttatggattttatttgatatatttgtatgtaaagataa

SEQ ID NO: 36370 - DNA, 14295 bp, Cannabis sativa
  modified_base (14229)..(14256): a, c, t, g, unknown or other
tttagatctgtgatttatatatttcttaagtgttttataaaccctaacataatttggtttcacatgtaatattttgtcttatttcattaatgataattgttattgggatactgataagcttagtgccttttttttatgataatattgttaatgctattctcagtgttcctattggtgactcttctagtgatgactgtctcataccatccttcgggtaatgtcactatttaaatttgcttattatttagctaagtctttctattttcctccttattcggatgcttctcatattaataactgctggaaagttctttggaattttaaattttctcttaaaattaaacatttttttgaacaagaggaaaaatttattcaaaaaacaaatcaattacaaaaatggttgagtaaaaaaccacagcacaaaacgagcagttgaacctgcaacaagcagcagcaggcatgaacagactaccaattcgtaattacttcaagtaaatacatgttctttttacaatctttaaaggaaccttactcaacattcttagccattttgaagatgcaatagtccctgttcttctagatctggtaaaaagttgtagcaaccacaacattaatcacccgattttggagatcatgaggcttggttttgagcctgttatgcaaatcagttactgaagttggccaagccaagaatttatgatttcgaacacttgcttagtgtagatgcaattaaagaaaacatgaacatgcgattcctccattgaatcacacacaaggcaatcgccattctgtaaaggtataaccctacacaaattgtcacgagttggcagctgggagttggcaattttccgataagcatttcgtttggaagactttccatcatattttaccttgttccctaaatctttttaagaaaaatgttttgcaaagtcctctttgttctcctcgtgctaatagaacagaatctgtgtcacataccttttagagtgtaccagagctaaaaatatttcgagggatagtgttttttgagaattctatgctagaaataaaagatgtgatattgaagagtatttgttaagagattttgaaaacttgaacaaaaataatttggggctattttttggtattctctagggatatttggaataaagaaattatgtcctatttaaaaatggcaagtacactcagtctaatgtcaatttgtaagtctcttcatttttgcaggattatccaaaagcccttaaaatagaaaatattaaaggttgttataacaatgatttagctaattcaagtgaagtaatggaaaataactctaatttaatggaagcttttccgagtcacagttccttcaaaattagtgtaaatacagctctagatgaaaagaggagaaatattggtgtgggagttatggttaaggctagctcatataggaaaagtagttgttacaaatttatcttcatcctttcatgccaaatattcccctttgtttgctgaagctgagactatgatgtgtaatagagttgcctttggcttttgagtgatagtaaggtccttgttcataaaaatagcaatagatggagtgttctgttgtgcatattattatggactgtaatatattataggaaagtattatgacagaatggagaggctctttgaaatggttgtattccaaaagaatacatattgtaacccctactggctactgctcgttgcttttattgaagttactgtaagttttttcaaaaaagataaaaaaaaaattggctggatgcgagaccaagccctactagaatattccaagactactgaaaccaaaagaggaaattttttatgtatatatttgtagtaattatcattgttattgtgaacaatgtggctctggcacgtcactatcaataataacatattcttaaataatgggatagcttatttatggggagaaaacaataataattcttatatgattatgagtcttaaatagtattaattgggatgtgttgcttgcctttggaatgacaaaaacttaacatgggatgtagaagtttagaaaccgatacatctaggatacagattaacctaggatttcacacaaataacatctgtctaacattgaaaattgcatctaccaataatatacgtcttcgtatatttgacttaaaaacaaaaatataaaaaatcgcatctaccataatatacgtattcgtctacttgactcaaagcaaaattattattaatacaattaacgaactaatcttagattgcttaaagaacattttgtgtcaaattagtgatagattgtttttatattttattatttttttaaaaaaattcaccaactttttttaaaccaaaaaacaactacaccattctagggctgcaaagattttttctctccctctccaactgggcatcactagcccatttttgggcttgacttgaggccatggtctgggggtaggttatgtgccaggattcagtttctctttggatggttcgagttgtggtttagaaggtgggtggtcgctgggagccttgtcgggttgctgttagtggtttggtctgctcgttaaggggtttttccatcggtggatgttctcagatctgactttttctcaatggtgcggtgggggcttctccaggtttgacggtggtggtggatcttgggttcgtgtctatggctggaacatttagggccatgggttgctctcaaggttctctcgaactctaactaaagagtgtgttgtcgtgttcagtgagggagtgggtgtggaggaagattctttggtgattaggtccattgcatttcgttctcatgtttgttttgttttacgtttcattgttatttgtttcattttaataacggtgggctttcacccctgtttgatctctagttctttttggatttggttgcacaggttatttcgggatctatctcggtgttgtttgacacctttttttatgattcttcgatgtttaatatcaaaaattttaaacatggtttatcatattcttctcctttattctgttttgaataaatgaggtgtttctacctaatttttattggaagatctttaataattgattgtcattaataaatgcaatttgacacatgttcctcaagttggaagtctagtttcattcacaatgttttgatgctttattgttggcagcttatggatcatttagttgaaggtgttgttaggattttcgtcatttctaacgtaaatagcttgattagcttaattttgttaatttcgttcggggtgcagtattttcatgtaatggactatgtcaggtttacctattaatggaatttttatttaactttcaaaaaaaaaaaaaaacaaatataccaagcttagccaatcagctaaaaacacataaacaacactaggtgaaaaatatgaaaacaagcataatcaccctttggtttggaggaatgaaatcatgtgattaggaatgagaataaaaatagaaataaaaataaaatcgaatataatttaaacacacgaagacaattatcataataactttagttttattatgatatatattttgtatgactataaatgtcatgtttatttactttcatgcgatttttattatttatttattttatgttatcttttttctcaacaactagatggagttgttgtttaaattttatttttatggattgagcattgactgcatccctttgatgctcttagcaacagtgttacttggtctactatataattctttttgtctcataatgaatttgtgacttttataaaaaaaaatatatatatttaatattacatttgttatcctaatttttatccacatgacgtggtaataggtgaaccaagtcatcaagcacaacttaccaattgacagagggatagaatgctcaaacaaaacgaggacacaataaactagccaactaggagggtcttgccagaccacccttgcccaacaaaggaagatgatgtgtcggccacccctatacaaagggtggatcgaccagattctgcaatgatagccagaaagtagcccaaatgattagtgttgtagccttcaccctgtatgcaccatgactcattctcagctatgaagccactacaacaacccacgaaaataggggttcaatttcaaatatctacctatcttttggaacaattaagtggttatttttgtatacttaaatatgtaaaaaagaggtaatatctccttattttaagggatattagtctattttgaactagatcttttgtaagctctaacctatataaacatcattaggccaaaccaaaaacctaagttccaagtcctgagttctgagttctaactctcgaaaccgtagctctctttctctcccacacgccatttgcactatacaagaaaccaagactatttttcatctcagtcattcgagatctgccttacattgctctcagtattgtaatattcatagagagccacactagaaattataagggaaaagcaagttttctgtgtggtattgtctctcaaattaatacaactaaaaaggagtaggccattactcgctaatcaagggagcccaacctttataaattgatgtgtctatttatttacttacttttattgttcacacatggtgattctaatcatacataaggctccgctgttagttgaccaaatttgaggtcaatattttggttcttttcattaagaacgttatttatcagttcaatcaatcatcatggatgtaacaaggagaactctggctacaacttctacttctttgcgtcttcctcaagaccccattactgttgatcctaatgttcgtgttccagccaccactgaatttcctcaaaccaaacagatgtagccaacccagttaacttgacaagcccaacaaacttgcgaccaacacaactagtcctgtcgactttgctaacccggttgatcctaatgaacggccattaccacccagagtagatccaccactggcacctctaatagaaggttttctcaatgtggaacagccccacgcaccacaactgactctgttcccaggtactatgcaagggaaataaggccaagaatcagtaaaccaactattggtgagcctcatgtagacctaggagaagacattgaatttgccaggcttagagagatcgtaggccgagtcgaccaaactgaagaatcacacgttgttggttgcgattcttttgcccagagacgtgaattcttgaggtagatggatgaacatgagccaatcctctaggcccatcaggcggacttggacaaccgtaatagggaagctagtaacctaataaggaggttcaatgagagaactaccgggagaggacaagatttgattagagatcctctgtaatgaaggctcatcgataaattgggcagagtctacagccaagtagacaacgggctaacagtccaaccaagttcctcgagagcaaggacagacttccccctgcctaaagatataaaattctaccgaacgaatcttatggttggaatagccagtcgctggcaccttgtggtataggggcccagccagatattgctagcttaataacaacaccattcggccagcctctggccgcccaacaaaatgatattcctctctgaaatatttaagagcaagtcgttctaaggcctatctttgacaggcccagcctgggaacaagtggatcacccaaaacaacatcaactcaaggagtgagaattgaagtgactttgttctaccaccgaacaataacttcagacagttagatccatcaaacccaagcaatcggtgtgattaaccccctttaaacacacgggccacatcggccaattaggggtgaacaatcggcaagaacggacccaacatagagttggctgaccatagccaattgcctgaattagggctagtcggccatggctatagttacctgatctagggttggctatccatggacaaaccctcacccagagtatgggtggccaagctctggccaacctagggttttagtccagccgagaaaggccactcggtcaagtccttattgcagcagattcttctctacaagcatagttagatcaaataagagatatgataaagggcctagctggccaaaaactataagaccttgaactatataggttaaggggatctccattctcagcatatatattaatgccttgcccttgactaagttcaagataccggtatggaagttgtatatcggaagagcagatcctcttgcacatatgaagtatttcgagatgcaaacggatctccaaaaagttactggtgatgtgcggtgtcagatcttttcagcaactttgtcagaaatagcctaaccattgtatttcaacctggctccaagaagattcaattcttggaattaattttctcaataattgttttcacaattcacatcctcaaggcagataacatcacaactggaagaccttgttgatgtaaaacaaagcaaggcagacctttgaatgattacattcaaaggcttatggctgaggccaccaaggtcaaaggcctaacaaaagaaggtcattatacatccatactagagggcatgctttcgatgagtaacttttggaaagatatcaggaggatctcagccaacaatatgaaagagttccttgaacgagcagacgaattcataaacttagaggaagccatttgacaagcccagataggagggcatgtcagtagtagacaatctcaaggtactatgaagcctcaagacctgccaaaaatgtaagcatgtacaatcagtgtcagccagccctctagtagcaagaatactggaagcaagcgcaacaataatagttctagctggaacggtggcaagaaagggaagtagaatacttcccctacgtcacgaaaccaaaagcagaaggaggagaagtacacatgccttaccctcctaaccaaaaaacctgagacaatttatatggccacttaggctactatcccatactagaagcctcctcctatcaagaaggatattagcaagagggacatgtcgatgttctgttgatttcacaatgatttcaaccatgacaccaatgagtgtcaacacttaaagagggagattgaattcctcataaggaaaaacaatccccacttgcatcattatatgaaaaatgaccaagcttagggacaagctacccagaacggagaccctatgccacaaccagtggcaggttattaaggggtcataataggcagaccccacataacaggcgagacaagaagggctagggagcgctattcttggactctccatcacgagccaaaaagtgacatcctagccatcgaggaaaaagactccaagcaactcaggcttggagagcctagcatctccttcataaaggttgatgctgcctatgtcaggttcacacacaatgaccatctagtcataactgcacaaatagggaacatgatagtggctaggtgcatggtggataacaaagcctcctctagcattcttttcaaatagacttatgaaaagatgtggctccaactaacagacctagcaccatcaactcaactaatgtatgacttcttaggccaaggcattgcacccttgggatacatctgactacctttgatagtcagagaaaatcccacaataagaacgttgatagcacaatttgtagtaatctatgtgccattagccttcaattcaatgataggccgacctgccctatacaacctgaagacagtaatgtccatctaccacctatgcctaaattttctaataaggcatggagtgggatgtttaagaagagacccaaagtctgcccaacactgttacaacctggctttgtccaaggctaaaaaagagaagatgcctgtcaagagctctcaccaagagtctagtagaaagtaatgaagtctagcccaaagttgggaagcagacatagatccttgctttggggatcctacagatagctctggacctgtggagaaattggaagaagtggagattgatcccactcttccaactagaaaattgaagattgggaaaagtttagtgccggaaataaaattagccttgataaaatttctacgggcaaacctagacctcttttcatggtcacatgaagacatggtaggaatacatccatccgtgatgtcccatgcactaaacatagatccaaactttcgacctctacaatagattagtaggttggtagataaagaacgtgcacaagcactgaaagatgaagtcgaaaatgtaagctccaataacttcattactgaagcattctatccgctttgggtatccaaccccatgattgtacccaaaccgaacaacaagtggacggtgtgcatagatttcactaacatgaataaggcatgtcaaaaggactgcttcccacttcctaggatcaaccagctagtagatgctacagctggtcacgagatcctaagcttcatggatgcctattcaggttacaaacaaatcaagattcacccaccgaactaagaacatacgagtttaatgacagacctaggcctatactactataaagtgatgccctttgggttaaaaaatgtagaggccaccaatcagagacttgtgaataaaatgttcaaagatctcattggccgaaaaatagaggtgtatgtggatgacatgttggtcaagtacaaaagggatgggggtgtgaaagagcattccaagagctgaaaaaccaattggctcaacctcctttcctatcaaaacctatggacaatgaggaactaggcatatacttggctatcacagaatatgttgtgagtgcagttctaataagagaagaagatagtacccaacatccaatttattacattactaaaagacttattgacactaagagtcgataccactcattcagaagctcacattttgcttgctcttggcatcaagaaagctaaggtcgtacttccaagctcacccaataagggtgtacactgaccagccattacaataagttttacagaaacctgaagcattttgctgattactcaagtgagccatcgagctcggctagtttgagatcacatacaaactaagaatgtccataaacggccaagctcttaccgactttatggttgaatgtatagacatatctcttgaaatatctcaagatttgggtaaaaagtaatagccagagaagaagtgagagcattatcagcagcaagagcacaaagattcagcctggaagttacatgttgacggaagttgtactgaccacttgtctgatgaagacattaccctcattacaacagggaaaaaaactgtacagggtaatcaaattttgtttcaaggcctccagcaatgaggctgaatatgaagctctaatcgttgacctcaagttagcacatgaagtacgggccgaccaccaagacatatacaatgactctcaactagttataaatcatgtcctaggtgagtatacagcgccgggtgaaagaatgatagcctatttgagcaaaatccaagacttattaagtcgactcaaaggctacacaataaggcaagtccccaaagaagacagtgcaacagctgatgcatttaatcgtctagcaagttgcaccatagccaacaaggcaaatttggtgcccatacatttattaaaagaaccaagctttaccatcctggatgaggttgagatgttggatgacagtctaacctggatgacactcaaagcagcatatctcaaaattggagccttgcctgacaaaaacaaggcaagaaaaatgagaagaagagctactaggtacctaatcctagatggagtaatgtacagacgaggcttttcaattccactcctaccgtgtgtcactaagaccgaagcagagtggttattaatagaagtgcgtgaaggcttctacgataatcatgctgggggaaaatcctattcaaaaagatactttgacaaggatattttagtctaccatgattgaggattaaatggactatgtcaaaaaatgtcacaaatgccaaatattctcaaagatcccgagagctccaccaaacaaactcacactgatgcaatctccttagccctttgatgtgtcgggaatagacctcattggtcaactctcaaaaggaaaaggaggtgtacaatatgcctagtcagagtcgactacttcactcagtggacaaaagctaaacccctagtgataataacttctaagaaagatctcaactttgttgtcaagaacgtcatatgtcagtttggactgtaatagaagattatgtcagacaacaggttacggtttgacagtgacatgttcaatgatttttgcaacaaacacgacatcatcaaaagcttctctaccgtttatcgccctcaaataaatgggcaggtggaagctatgaataagaacctcaaggacaccttgaaaaagcatctagaagaggaaaaaggcaattggcctgaattactcccagaggtactgtggtcataaaggacctctgagaagacagccacctgacaaacaccatttgcattagcctatggctatgaagcaatgttgcctgtagaattggagccaccttctcacaggaggataacctttgaccttgaagtaaacaacaccttgttggtagaatcccttgacaaaatagaagaaagaagaaaccaagccaacctcaagctacatgcctaccaacagaagattgccaggtacttcaacaaacatgtcaaggagaggaaattctttataggagacttagtactctgaagagtgttcctaaataccaaagatcccacagtagaagtgttcgtaccaaactaggaaggcccttatcaagttacaaaaataacgagtatgggtgcctacaagcttggctagtacaatgagaacatggagttagttctcctaccaagatattggaatggggaacatctcaaaaagtactatcaatgaccaacttgtaagaatgctactcttgagtattagttttgtcagctcatttataagagtaaatgtacaaagagctaagtatccatcacactttattgatgggccctgcctggcatgtcaggtaggggcagccatacgagttctagaagcagactttttattttgtaagcttttagaatcaataaaggtacgttgcacaacaaaaacacatattcaagaccaaatgatgaataaaaatggtgtttcaatttaatattgtgtcaaacaacttgcaaataagataactttttaaaattattctttatttttagttccacatgcgtgcaataggtccccacaagaaaaaacacaggtaaggtctataatactaaatgaattgtaagttcccaagagaccataagtctgcttgatcacttgggggggcacccacatcgtacaagcatcgaacaagcacagctaaacttatacaaaatttaaagctttttttaagaaaaaaagtaaaagctaagtatgtgcaaaatgcatacttcagattatatataaaaagtaaatctagatacttacatgtctaacaaaagaagataacaactaggattaaagaccgcttggcctatcatatgtccaaaataaaagcccttaaggccatatacaagtattgttcaaaagtaaaaggcccttaggccacacaagaacatgaaagtaatgcgaaataaaagcatgaacaactaacaaaaagtgtctaatcatctgcaggtgtaggtgagttcaaagtgtcttggccatagatggtagcctcagcttggacgagcagagcgtgagaggaaggctctatagcttggtctttaaaaggctagtcgactatagcctcagtaggttggcctgccattacctccataggctggctggccacaacctccttgagtttgccagacagtgctccctcagcctgggcggctacctagtctatcccctggacagcctgatctaccaacaccctgctctcatagagttctttccgccaacgaagtgatctcacgtggaagggagaccctatgaacctgagatcgacgttggggttatgtaaataaacctcgtacatgaccatgaccttagaggataagcccaaatatttatctttgatagcttgctggccatcaagagctagttacttctcccgaccctccttctccaacctggaggtctcagcagcaacccttatcagctcttgattccaaagaccaagcagccagtttaggccatcattcaggttctgagactctcttaggcgagttgacaactcacctgtatctaggcacacgcatccttctctaccttaagctcggcctccatggcatccaacttctttcagtgaacaccaaacgaaatcaaacgaaatcaaacgaaaaattacgttataagtgaaaccaacctggctagccaagcgagtctactggtcggccaacttctaatggtgttgctctggtcggccagaagattctataggccagccagccagcccctgtcaattcaacattgcgtgtaaaatcaaatatacaacttaaaaatgaaaagtccctgatggcattggatgttaagcacaataactcctcgacctctagctcctagagctccccgtcaacgctagcaaagttctactaatgtaattctgagcaaccttagtcatcctctcactagtgaatgaaccagctccccagctaaacctctgaaccccttgcccgaatgcctacgagagggtggagttctcctagaaggagggtccataatcacaggctggtcagccagaacaaggcctagaagagggggagacagtatagactgggtggcatcggaagacctagcagtccgggccaccttggcctgaggatggcctaaggaagggccaccaaaaggctctcctactaaatcactcatcctaaaagccatgtctgcaaaaactaaagtaacaaagttagaatacaagttatcagtattatatgcaagacaaagtaaaaaagtattgctatcaactaccatctaggggacaatcatcctcggaagatgaatcatctgaactactatcactaacggttcccttgcctttgtctctagagggaggcagtggacaagcaggcctggcagagccttggcctcatgtcctaatcagtaagaaggcattgtcagtagtacctccatttgccaaatgttgttggagggcccgatccctcctagtcgtagccttggcaagtctggcaagaggaacatcatcatctgactcaggtgcaagcctttcccccgggctagcctcctctatcattagagtctcatttgggcctctagaaggaccctcaactcccttaattccaaacacaagtggatataaaccatacctttaaaagttagcctcacaagccagcatgagtatgtccctcccctctataaggagggataagacgtgattagctcgatccctcaatttaataatgggaatagagcaagagtatgtcagcacactttgaaagcggtgactaacagaccgaacgttctaggaaatgaagtagtttcgcgagtaccgtctaacctttaacatgaccttactattggtgttacctaaccactagtagcccagctggcgaatatagaagtatccagataggcctttctttataacggacgtcaagttcaagaaatactcaatctcatagtgtgaaggctgaggccagcccaattctgtttaaagaggaaaaagtgtgggtacttgattcctttcagagttatcaaaatcagacacaagctgaagtatttggcaacgtccctaaaatacggatgcaagggtagtatagctccttgctccaagtgtggatttgacaaggccatccaattgaatcccaagcattgtgccaacttgtcccttgtgggcctctcatagcaaactcctctcatgagtccccaactcatgatctcatcagagttctcgaaagataaagaggatcgaggggttatccatctctgttgctcccctcgcttaggaatccaatgctcaggagcctcttccaagacatggtctatcctggcctttgacagacgaccaaagccattcaaaggccactcgacctcatcataagtacccaaagggttgcttgaaaatacgatacaagtcttgttcctcctcccagtaggcacaatatcctcgactttagatgcactgtctatcccagttgaagcctcttaatcctatgtagccacagttgttaagccataggttctttaacctggttggcccctagcttatctgttgggttttatgcccnnnnnnnnnnnnnnnnnnnnnnnnnnnnatttacttattaatatagatcataaataacatttaatgt

SEQ ID NO: 36371 - DNA, 2453 bp, Cannabis sativa
attgcagtttgggcttgtaacttgtaatgtttttaacacgaacactaacaatgaatgactatgaatttgagttaagctgactgatttatttcttttttattgatcactttattttgtttaacaagtctaagtgtatggcaaaaaaatcagagaccaaggtccaagacgcatcaattatcttccaaaataaaagctacacaaccagctatctttggcagtaggagattgtccactcgtaatgttgactgttgacccccattttgtacaaagacttctaagttctaagaacactacagtctacagccaggtgtttaatggtttttccagctgaaaatggacacagcttactatttgatccatcagcctattatgtttaaagtaaataaaataaaggctacaactttttcagcaacaaaaaacaaaacttacaacagcaatctatattaaaaataaaacactctaactagcagatccgatccatcttctaatcatctcttgctacaatcttgtactttccagtttgttgttgctgcaaacagataaataaaataaaataaataaataaaaacccatttagtaaaatctaacgttatattcataacataataaaataaaaaaccagaccttaatccacaaatcggtgtggggtttgcaaaaaccggcaacaatggcacccttcttcttcccttctctgtactctaaacaaagatcttcattcaatccacaggtcacatgaaaactcaaagggcatttgggctcagagcagttgatagcacatccattagtttgtttacagagataacatctttgctcccacctgcttttagggaccttcgaacaatcaatcccttctcgtccttccgggtcatgaaagaaaacttcaggaacgaacagagcgcaaacgacatgagcccacttgccgtcgttcatcggcttcatcgcccctcctttatttggacacaaacagcaagaaaacgacatgtcgttttgagaccctttcgataccgagcattgagaacagaaccaatccccatccggaataccctttacgagaggatcgccatagcaggaagcgtgaaccattagatcacatccatcacatagaacaatcggatcagaaggatccccatctgtactctggcaaacagcgcagataatgccatcgtcatcttccagaaaatatccatcgatttcagcttctttctttactgtactttcagagcctccattttcgtcatcttcaatctcccacgcgatttcgccttctctgaacaatggagcttttttaacatcacgatcttcttcatatttcacaacaatgtcctcctcctcgaatgctggattgtacacggcattaaggtcgaagctcgaaacccgtttctcgaggaatatatcaggcggaagtgcgcaaacccttttcttcgccggcaaggaataagcagagtcaccggcaacgtcgtaagaattgggaagaagatgaggtgggtcccgagtctccttgcgctttttggccgggagagataagggagcggccataatcagttgatctcgtagcttctgttgttggtgaatgagtctgaatcttttgtgtggaggcaagccatggagttctgaatccatttttggttgctgtagttgaggattggaaaggaagaggttggattagattgggattattagggctttggaaattaatgtgttctgtaagaaattttgaagggtttatttctggcggggaatgggagtgagaatgaaagtattagcaatagacatttttatcttattgggtgggaactagaaaaggaagggagttgaagaagcccgcaaaaaccaaaattttcaaaagtcagttttccaaaaatatttagaaaaattaaaaacgaaagtgaaaatgaaaatgaaaggaataggccccgcccttttttatgaagttggattatttaggcgggtggggagggcggggaatcttctttcgttttatttgttgccacatcggattggaggggtatcacagtttcagtggctcacttactgttttcattcattcatttttattttttaaatggcattccttcatttatttatttatttaacaataataaaaaaaaatagagataaatacatcctaacaacaaaatgaaaaaaaatattgatctactatgagcgtgttttttagaattgcctgctatattgtattattatttgaaaaatgttgcccctatttccctttttttttcgtccaatttttatagttatacaacatggtactctattacaataattacaatattacaaataatacagtatacaaccacaatgtgatacaaatattgacaactcatattatatgttgattctacaatgaactctcttaaaagggatgtactgatacatccttaacttgtttcggtattcagaaaaagtttttagtctaatttttttttcatattcat

SEQ ID NO: 36372 - DNA, 1414 bp, Cannabis sativa
agttgacattaataaattcagtgctcaaataattatatgatcctctttcaccattgggttgtttaggttcaagtgaaacaatcctagtctcttcctctttaggcttatcaccattcacatcgtgtacactttccaagctcgttttaaaccattggaaatgtttggtataaactggcatcaatagccaaacaaacatctgcaaagtgtgttaaaagtagactttgtcataaactatttaaatcaagaatatcaaattatgtttagttaactacacaatatgtaatcaagtattatctgtgccaagagatcgattaattaaggttcgaagaagaaaaagaaagaagaaaataaaaacatgtcacgcgtacacttgtgtacacgtaattaagtagtctaccgtggcaattgattgagatttttggatggaaagaatataaatagctaatagaaggaagatttaggtacttctgccactaaaaaatcaatttatgtaattaataattgttaaaaaaaatataaagtataagtgattttgccgctaatatcttatatattatataaaacttacttggtgtgcttgtgattcaagatgataaaaatagatttgaatggccgtcatccctttattgttaactgccgctttgtctagtagtgtaaacttacgttggaagacgatgaatgatgataccgttgtaaaacttccagtaagagcagcaagatgaaagcaagtatttccatctttgtctttccaattaataatgtacttacattcttcaaaacaaagcattctctttaccaaagatgtgtgtttactctccacagcaacatgtagagcggttcgattgttcttgtccaataactcgaacatcttgtaactatataatcccgatccattttttaatgactgtaatgcttccaaagaaccattcttggccgcaatgtgaagaggagacatgttttcattgtcttgaacacaacaaattaaggagggtttagacaaaaacttattcaccaaaccaaactcattcaagtgtgctgcataatgaagaggagtccatccatgatcatctttcccttttaaaatatcattgccatatttttctaacagcttctcaatcatcccatcacctatatatgtacagtttgttgtatttattagggaattaattcacaataataatataatttggggtgaatactattttagaaaagttaccgactagatcatttattttgttaaataactaaatggaccatgttcttttcaaaaataaaacttaatatataatataacttgatgtgttataacaaaattaactgattacattttttgcatctgttcgtgttaggaattatttttacaagttggttatatataaaaaaaatgaacttagagtcctatttgtattatttt

SEQ ID NO: 36373 - DNA, 4885 bp, Cannabis sativa
gggaaagacaatattttgatcacttttcaccgacaaaaattaatagctgtttcgttttctgagaatatgacatgatagaacataccttgtggtacataccgtctcgagagagagtgtatttttctaggcaagtacaccaatcaccgtgtcctggttcacaccaccactcatcggtcacctggacaccaaaaacatgcaaagttgcaattaacaacgactttcaaatcgggtaatttaaggttatattgaaatcaacctttttatatagccttgcataagcttcccaccgcctcatctgggatgaagatcttctatcagctactgcttcagaagctgctagtccaaagctcacggcaacaagcaactcctttccacccttttctactctgcatgatcatttcaaaagacgcgctactgttaaatgacatgtaaccgaaaactgtattcagttagatatacgatgaagtatcgtacctaataatgacagcagcaagaagatggcttccttcaactctaagtaccggatgcccagatttcagcaaactgtacttctgtaacaaattgccttctatggaattctgatcctctgaatcactggagaaatacggagcagcctccacttcggtatcatctgtgattggtgtggaagataactggttaccagtttctttataaagccaatgagcagctagtccatgttcggcatattcgtgcattctctgttaagatttgttactgacaatcgataaattaaaagatacaccctgagtttttaattgtttggtgaagtttggaacttacctgtgttcgtatttgaacttccaaaggtgatctttcggggccttgtactgcagtgtgcagagactataaacagaaatttatgtaattataaacccaaaggtatagttagaataaccggagaaaccttctaattcgtagtgaaagatctaacctgatagccactaggctttggattgacaatgtaatcatcaaattcgccgtcgatgggggtccaaagtctgcataataagccaaatattccattatcatgaattatacagttatgatgtctttatgccatatataaccaagaatgggaacaaaacgaaaggttcattttggagtacttgtgtacaatgttgagaaggctataacagcattgaacagcaggcccgtgaagagttccattcttgtctccaacaactacccttaaagcacaggcgtcgtacacttggtcaatgtcgatatcctttcttttcatctacagaaacatagataacaatgtcaaaatctctacgggaatgaagttctgtacaaggatcctttaaacaatgtttaaaagacgaagataaaatgatatgagcaaagtcaagtatcaatagaagcattaaattaacaaatagtaaatgtcagactttttttcgattgaaagaacagaatgcctttcaaacatcactccactatattaattaccttgctgtagatgctatacaaactctttaaacggctagacaaagttacttccattcctgggacatagctgcaagggaaaaagaaaataaagccgaatgattatgattttcattgttatcagcaaaatcagaatggtagacaattcttgtatattattaagtattaagtatgtaattaaagaaactacaagaaaaacagtgaaaagtgaaactggaacatacgaagttgaaataatcaactcccgttcaagtgcttcctcacaaactaccagagattgtaaagcaactgcagcatctcgcacaaccttcgggcttgtcgtctccagatcttttcctagagtactaagaaatctagaccgcttttttctgtctagcaagacatcaaacggcaatacagcttccaaaagatcctaaaattcaaaagaagaaaccacaatagattttacagccatcccatgtttcccaaagcggttttgccttggtaatttgcaaagtgtaatggcaaaaaaaactttactttcatgctcgtaatgtcttcatcaactgccatagtcccctcacaatcacattcagagattttcttgtccaagggttgcaaggtggctcttgcacataatctttttgtgtttcccgctttactactaggactccacaaagaagctagatcggctctcaatttctgaaagatttgaggctgcatagacatacaactttaacatgaattgcaaattctttatataaaaagtgcatgaaacttggagctaaagcaaatagatataagagacctcaagtacagcaaagcacaaatcttccagctcagctttcaatgcccacaaacccaatctggaagcaagtgaacaccaaacggcgagggtctcctttgcaacagcttgagccttttgcggtggcagagcataactgtaaacaagtgtcatatagtgtgaccaattgctactatttatacacaactgtagaagagtctcatatagtgtgagaatcagtacattgttctcatattgtgaagacggtcagcgagcttgataagaaccacacgtggatcatcaaccattcccaagagcatgacccgtaaattgtctgcctgaaatgcaaacaaagcaagtgtaagctaaggaaaaactgaacacctaagctctaattctcatatggtcatgtttcagaacgagctaataacatcagccagcacaaatacatatcctcaatacaataaatgcccattcaccgtatctttaaatgaaagttaataactttatacatgcacacacatagtaacatctcactgattattattaaccgagtacatatcgttgaggaattgaaaattgcctggtaagtacttgtgattataacagctcacctattaaactacgaggacattaggattagaagattatgtcttatatccaatgagattttagatttataatgaatagattaataactagttatcaccattaatcatggctacttactatcaaagcataaagaatacattgcatacctcttcttgcccaagggtaccagtgttcacatttattctccggtgtctccgcaagagctgcatagcagattaatagtcatttcatgtcatcaacttagtttggctaactataaataagatcaaatcgttcagtttctctccagtatagctagagtatgcaatgccacaattgtacgaatcaacaaaatctaaccttattaacatagaaatagacatttcttttaactgcctagaagaagaaacaaaaaaactctaccaacttttcataattggtattttctatgacttttgagtttacaatatgaagttatagatattctcacaaactattagtgttgggaaaaaaaagataagatggctgacttttttattagataagcaattgaaagaccaattacaactacatttatttctctcacaggctattagttatacctgattaatataactcagccttgaaacaccagcaaccaacctagctacatcctcaccaaaatcctcttctatgttttgcaaacttttacatgtgtcatcaacaacatcatgaagaattccagccacaacagtttcaacagcctgcaacagattttgggttaatgtgaagggatagtagttttattcaataaaaccacttcttgttgtatcaatacacaaagttgaatgaagtaaaacaagaaatggaaagggttttcctccctaaatcataataatatgttaggccttaatattagtctcactagtataactcattagaattatgtaggctttcagtgttagtaaatttgtgtgttctaatttggttggctagttaggattatttgttagtcttgcctataaatactgagagttgtcttgtgagagggagtgaatttttggtgtgaaatatttagagataatattactcagggagtttacccagcttctcgaataacttgagattttgcatttttttcttgctcttatcaataaactaccttttaatagttctttcaagaattgaattgtgcacaatgtaccaaatatatcattatggtggcttgctttatcaactatgttatgggagcgctatggctggaaaggaatatgagaatcatcgaaggacagtgcaggtggaaaatctttgggataagatgagattttgggtagccctttggctccataagatctgataattctgtttagcaactaaaatattgattagctacttctactaattacattaacagtaaccacggctttcctctgccacatatttgaaaagtcacattgaacattttaccttagtctcttttcaaaggaaataagaataacaatacatcactttgctcattgataaactaaaattaagagtaatgagaatgagaaaactaggtacccttttgccagtggcagggaccaacatagccaagattcttccagtatgaatgcaatgagtcaaatatgggtctccagttttgcgtaattggccatggtgagctaatttagcaaaggcaatagctttctgcacctgccttcacaaatggacaaattccagaggcatcagatgactaaaattaagcagtcgaaaataggattcaaacattcagtcggtctcacacatggttgttttattttacaagcttgcaacagactattttaaaatttattttcgacacggtaaagtatttgagaatttaccaaaagccggcagcatgcttattaatttacaactacaatatacaatgtcatacataaaaaaaaaaatgggatataatttcttaaatgcagaaaataaaaaacactcctaccgaaggagcaaaagtacatacttccttcacctaaactaaaactagatttagcagctctttccaaaaagcgtgaacgtaaataaaaaacatctccgagataagcttcg

SEQ ID NO: 36374 - DNA, 4239 bp, Cannabis sativa
  modified_base (1082)..(1083): a, c, t, g, unknown or other
  modified_base (3326)..(3344): a, c, t, g, unknown or other
cccactttggcaaatgatatggcaagccatccgataatgttaggaatcgcagcgatcatcaaagactgagattcaaacacgagagagttaaaaatgagtaatcaaattccgcaaaggcgaaatatttatttgaatttgcttcaaagagaaggataaattgaccaatgaccataccccttttcgaccaatatattcagatatttgaccgcttgctatggccccaaccatggcaccaacattggacaaagagccaaacagagaaaactgaccccaaggatctgttagagactaaaacagtagaaggccatgtattcatgtaaattctaaagcaaatgagatccaaacctctgacactgagagtccaagatccttggtgattgcagcttgggtaggagaagaaaaaccagactgaagaatttaaaaatataaataaacagcaaagaaaatggaaaattaaattagtgtgagcaaaatcaatctgaaaaattatggttaccgtgaatccaaattggataggacccaaagctacaataagaacacaggcgacgacggagatggagctgtcccgaatggcttgagttgagcccatcatactggattgccttgagcccatacgataccagctgccagtatggagaaagggctttctaagatcccttccatcgtcactatcatccctgaaactcattctgtagtcccgcttttgagatcaacgagaaagtgtttgagaagagagagttttgaagaagaattattatatgtttaaatagggagaaagcagcgtcttttcatgtttcgtcgtcggtaaatatatatatatataaatacatgtctgtaaatgtaaaattattgtccaacgcatgcgaagcgaagcagagcagagccgttttgttagtgtttgttttgtttaactcctcacctgaattcttaccttacctggctgcctctcaccagtcacgaccttaccgtgaccgtcaccgtcacccttagttggccctctgccacttgtaccatctaacaaacggctacaataacacaccaacccaaatatatcttcatcttcttctttctttctttctttnntttttttttttggatttttttttaaagataaaccaaatctaccatttaggaaaattcattggttggagcataatttttacttctattattgcttagtattttttttttagtataattaagtatcaagtctcatgtaatttaagaaaataatttgtagagaatattattaactaatcttagagtgtcatctataaaaaatgttgggcaccactatactaaataacaatgctctaaaaatataactatatagaaaaattgtaatcaataaaaatcccgttaataaaagttatttttagcctcttaaaacaaaacacataagcaagatgttattttttgttaaattttgcgaagcacctaattattatcgataattatattttaagaagtcctatcgataaaaacttttttcgcccattgaatagacagtacgtgtgttgattatttgaataattaatttatttaatgattttatgtttgttttcttactctaggacgtaatttatttttttttttatttagaaatattaacagtaaaactacttaaattatacatttatggttcgtttgatacgctgtattacaccgtattatattgtatagtattatactaaattatattttatgcaataattttatgtaaaattatatgtggtattaagttttatggatacctaaatatatgatattttagtataaattaaagtttaacacagtattatataaaaatatgacatataatccaattcaatataatacaatacaatacaatacgatctaatacgacgttccaaacaagcccttagtgtactaaatatacacgtgccatattttagtagtccacatctttccatacttgtatttttttaatgcctaagtaatatgttaacatcatttagtcaattcttagttttggtgaagtcaatcacaagttctcggagatgttgattttctacaaaattgggtagattcgaaacttctcgatttgcggctaatttgttgatattccacttcgctaaaaaggtaaaatatcaaagtgtaaattttacttgtcacaagttgtacctctcatttactacaaaaaaaatagtcagatgctcgagaaggaatcaaaattagataagcagaacccaatacaccaggctatatgtcaacttgggcgctaggtgcttttcgaggggtttcccagggctcgttttgatacttctatggcatttaagattgtgacgaggtctcttaccccgtttatgactaaaataagaagaatgcccggagtagaatttgtgtttgaggaccaaaaacatgcgaaccatgttgtacgtcaacttgggcgcaggactcagcacccatgtcaagttgggcgttggggccctccccgagatcacttgtttctttgttatatctaaaaacagaaaagatgtgtgaaacacttttttgagaaaacacttggaaagcacccatatcaacccaggtgttgggtctcagtttttcccatcatatgattccatttgattcttgaaaatactcgtatctcaattattggtgaaagcaaataatatgcctataatacttctgaagaaaaatatttagaaatgacccaggttgacaatatgttaacttgggccctgggtcctaattttggccttcaggttgatctgtttctttcttgaaagcacttgattcctcgtttttgatggagacaaataaaatactcgggatacttcttcaatattgcagttggaagcaccccaggttgacaatatctcaacttgggcattgggtgcatcaccaggtcgcccgggcaccgagtgcccgggtgctcttaacaggaaatgttttgattctgattctaatgcttccaacatgtttgtgacaggtcttactcatgtataagtacaaattttgagccattttccctgagacaggcctgagaactaaaaccatagtcgggaatgtcaacctggtcactaggtgaaaatccaaacacccattctggagttctcggagtcaacctgggtacagggctaaggacccatcgtaggtcgtctgctatgactcgggactactcaactccataaatgttttctttcttaccatgtgtcaaacattgatgttcacgtcaccaaggtcaattttcaagtaaacaccaatcaaattccaaccccggtgaagcctgaccccgactaaccaccacccattgcctctacctgtagagaaaagagcgagatagagagagagagagagannnnnnnnnnnnnnnnnnnagagagagagagagagagctaacatcagagaagaaaatcaactggagttgcatgatagtgcaagaacccgatgttatcgatgtggaggagttgatgaaagaccttgaagatgatgaagatatggatttcaatgaaggtatagacaacgaggagaacattggtttgaatatggctacgaagaactcgttttatcaaaagcctaatccagagtttcgataagagcataccaaggattaagatagaacatggttttgaaagattcaacacttttgacaccagaacgtaaaatcaacccccattattagagatcgacatcttgtctttctggcgacctaatttgaactcgcatagcccctttgatatgagaccgctcgatgctttcaagcagttttgaaacatatcaaaaagactgaagcagagagaagaaactaagttctggaaaataccgatgaaaagaagaagaagaagaatagaagccaccttgaagaattcgttaaatttttatatttttaatttcaaatttttgagaaataagaaagtaattgactaaatcgataaacctaatgagaaaacaatttttaaataataaattattcaaaaacagaaattatctgctacatcacattgcaagctgtataaaaaatgtgcacacgtgtcagtttattatttactaaaaaatgttctatatttaagttttgtttgtcttgtatgaatatttttttttataattatatatattatagttataataagcatctttctaaaaatccaatgaatccaataaaaagtcttgtctattgacatggttggtctttatccttagtatttccggtgactttcttttttggtttgtattaatcttttgctggctgaaggtggtgattgtgtcttattg

SEQ ID NO: 36375 - DNA, 3414 bp, Cannabis sativa
aaataggttgatactctttttctaattatgtatgatctgatgataatatacttgattctgtctaaaatgtacttgtttgtatgaattatagaatcacaaatcgagaagataagttcattcgaagagcttttagccggggattgcttcattcttacgcagtatgagttgcaatttcgaaagaacattgatacaaaaacactatgtgagaagactttgacagaggatgaagcaaggaaatttaggagtgctatcgaaagaaatcttatgtacgagatgagctacaacaaacatcttttccggggtatggtgggaaagattgtgtatgaggaaaatgggaaaaaactcacaaccccaaagtattttcttgttacacacattcatttctatgttaagtactggaggacccatgttaaagacattagtgttttgagcaattatagctcttctgtggacatagctgaacttgctgcaaataaagtcaagtttacctattctgtccgctgggttgaagaacccgaaaatcttggtcagtcctcgggtgacactttatttgatgaggagcttatgagggttagagaagctggtggtctgtggaattcgaaagtgttgtattggggaattgtcactcttgtttgggttgggctaatcctcacagtgactgtgccatacttgatcaattacttggatcggtatgatcacttgtactgcaggttctgttccagagatcaagaccattcagattgtcgagttaataatcagcatcccgtccatggtgataactgcaaatgtcctccttacacatcacttctcggtgctgttcttgggaatggaattcacctgcttgctatgtaattcaccatatttttatataaagtttcctaggaataatttctctttaccacacagttcttcaatattgctaatatgcttcaatctgcagggtctgtatcttcttcattttggcatacaggggttccttgaatttttgcaatttcaaatcactttcttctcaaataatgagaacatattgttttacctctttcattctggggtataaggctacttcatttcattctagattcacatcaattggttgggtaataattcctctgcctaatttcaaccacagtaatatcatttccatcttatgttttcatgcatgcaactgatatcttaatctcttatatacagaatgaatgtattttgcaagctggaactctatactttattccagcaatctcaacagttttgattgcatacggcttagtgataatggagtttgggatatccgaagttgcagaattgggtggtatctttcaaaacatagtcgattggggacttgtcacaagcgttgtggttattctaactggtatcattgctcggcattatttccagccagaatctcaaccaatatgtcccacaagaaatttacaaagagagactcgtcagcagccttggtacaccaagacagagtttcagttcctgtttggtggcctagtgccattcattgtaattttaccaaagatggacaacatctttgcaagcttgtggaatttcaagatttgcaacacgtttcaacctttgattacttcattcattacgcttgtcataaccaatgtgttcctggcaattggtttcactgctaggcagatatcctggaatgatcatcactggtggtggaggtaatattctttaatcatatttaaattattaatgcttgtgttaacaaatgtgattttgtgttttttatgtgtgtataacagatctgtattacgtgggggagcaccagccattttcatgttctgttatggcatctacttcttctcaaggataaacatggatgaatcattgatgctacgtattttgggataccatgtttgtatgtcctatgctttgttccttatactgggaaccataagctactatgcttcagcttttggcttttattgcaccttccaccaacagaagcatgagtagtctcctcaaatacaatgttgttctataataattgacactgaaatgtagttttttttttctcaatattgtttctataagtcaatacgttgtaatgtagataattgaaaatatgcatataaaatggcaggtgtactttttagtcaatcattttttgttaagacttctacactcattgtcattgtttgcttatataacctttgatagataacttcttttttctttctctttttaatatgaaacttgagtttatttatatgcttcaaaatatctaattttcacccaaaaaaaaaaaaaaaaaaaaaaagactacaacaaaaatatgtaaaattggaccatacttcctcttacataattaccactgctggtttctagtaaaacaccaactttggctgttaatgccattaactatgaacctaacttttaaagatattgttcaaaaaaaaaaaaatataaactcaaaaataaataaataaataaaaataacaaaaataattataaaacagtaatgtaaacatgttaaactcttttccgttttcattttttgttttcagatatggaaatatgaagtctacaaattttagataaattttattatgtatcgatccgagtccatgataaaaccttgattttggaaaataatttcaatgaaaaattgatgtctaattcaatagttcttttaaattttaatttttggagacaatttacattataaaattaactacacaatacaacattaacacatcccaatataatgaataatccaatttattatcatataaaaagatacaattcaatacaaattaacacattgcagttgatgaaagtttctttaaaaaaaaaaaaaaaagcttatgaaggtggaaaataataaaataaggggttaatgatatagaattggtaaggtatagtggggttagaatgcaaataaaattgtcgttttgtatagttgtgaacaaatgagaaccgttgcgctaaaaaagcaaaattgctaccatttgctccctttcacaggattatttgatgctttcgacatcattatcacaataaacccagtgagcttcctcaaaaatgctgtacactacctaattcagtgtccaaggccggcgcaactcaacaccatttcgatcctcttccctggctcactacccaaatgcttgcgccactctttcttgctcccatttggtagatatagataagcctctccaaatttctcaccactattctatttctctaaagcccgggtgatattttctattcccatctatacttttgatgcaattctaagaattatgtttgattaatttttgtggatcgcagttcagtgcttagttgggtagttcactgtatcaaatgcaatatatgcaccatcaatgaaaaccaatgcttggatcaaagggctgatttttctcaagtttctaaagccatttataatagttt

SEQ ID NO: 36376 - DNA, 11730 bp, Cannabis sativa
  modified_base (11148)..(11150): a, c, t, g, unknown or other
  modified_base (11579)..(11586): a, c, t, g, unknown or other
tagaaccttcggttgaaaagcgatttgggagaagaaaggtacaaatgttgggacgtggtagtaagaaaagtatcggtgtcactaataggtggtcagattcgcacacgtgtgaacaaaagaacaggtaaaaaagaataacaatctggagaggccattaaatgccgataaacacaatagaaagattgttttagtagtttggataattttacactagtttttagttttgagtcagagtaaatactgtacatttcatatatgtaatgttgtttcctaatgttaatttataaatagccttcagtttcatttgcaaatatctttatccccttaacaaattatataaataatttatatataaatagtatcagcataacaaatatttcatgacgtaaatgcttgtcaaattcgatacataattggttagtgagtaattttttttttttactttagtaaaaggacatgttcctagctaggtttttctttctattcaattaatagtgtccaagtgtcgaacttagattcaatgattcatcccctagtcgatctgattagctggtagttactttttcagattaagacaactctggcaaagaataatgtaacttagccaaaaactgagaaagattttctttagatttggatagaatgggatcctaccgaacgctaacttttacataaaaaacgaaattaaataattgtatttggtaactaatatctgtcgaattttatctctagttgtcttctagtttcagtaggtatgaagggcatatctattattggatttgttgtagaaacaaaacaagagaaaacacacctcgtacattgatcgaatatcatagcatgttcgttgctctctgagctttatccctcccatgcttaatataatctatcttcaaacttgtttcttgtgaaaagtaaaaataaaaactaggatatttaaaataagttgttaataaataagaatgttcaccaaacaataatcacagagcgcaagtgcaatgtcgaaaccgttaaatatatatatatatccttattcatctattaaaacaaatacatgaattgttaatctatggatacgaaataaaaattacaaattttattgtctgaaatactgtacaacaaattttgcaaatgccacaaataaagcaagaagggcatatgcattcatgttacatccccattatttccagtcaacttcgccaagatgtttattagctgggataaggtcaaattaagtcgattagtaaataaggtgttaaggacatacatacatacaagtaaatggcaataaacaaactgatttgcataaacaattttttacttaattccatttttttttcttccaaaaattatattttgatgataagaataattatagtttgaaaaagctaacgctatacccgggaagcttggcttgcactggcaacaaattataatgggggaaccagagatccatatgttcttgaaactttaaatgcactgaacttacctcattcgttttgcgtgattaaataaggtgaggaactcaatcattgtaagagctcaaagcagcaacaaccgatcctgttgttgtaaaagtcgatgcaacatctggatattctttccaagatgttgtcacttccagagatggataaagccagctttttatagaatctacaaaagagcttggttccaagttcagaatagcttcccaatccacctgtaagccttttgggatgcttcctgtgaacctcatattggcagcaagaaacaatccgagcataactacgaatccaacgacagcggatcctcgcgaaagtggcatgaaattgtacctgaaagcatttcagttttgcttacagataacaaattgtacgaaaaccaaagcaccctctccacccaagagtaagtaagataccagtaatatgtcatccttaaaatagcatctctgacagtttcaagcgcatcgaaatcagtagaaccaaaattttcaccgcaataagctttatatatagcctgccaatccattatttaaaagaaaatcaaatggtgcatgatggagcaaacaataaaggaaaaagatcacacattacttcatgaaaggcatgtaatgagagaatgcaaaggaaaataaactcataaaatattcagaacatctatatttcctactacgcagcccacgttatcggttcctacaccatcaacaaggctcactttgcccacaaagctgtcaaatctagcgtagattttaaagactactagtactacttgggtcgggaaaagagttgcggttcgtgctttgggtcatattgctagccatgacagaacctttgaagccattttttcaacaaggtatggaatagaggtcgtgaaattatcaatggagatagctttaacttgtattgatgaggtatacgacaagtttattggtataagttacaagaaaagattgaattgtcattctaatcttcttacaaaggggattggtggtatacgacaaggtatgaaacagaggtcgtgaaattatcaatggagatagctttgacttgtatatttgtttacacattctcaatgacagagcatgtctgaaatctacaacagcagtacagcaaaaaacatacctcccatgccatcgccatttcagcttcaaactcatcccatctataaggggtacaaggtgttctgatagcaaagtcaaatcctcgctcttccctagaagaatgaaattttttcaaagtaaatacaaagtgaaggttaagcaagatacaaatacataaatagatttgaagaagaaaagaggggtatacattttgaccaaggtaatccttgtcccttcaagccgcttcctgaaacaataataaacaactagtaacttggcatgacacactaagatactgccaggaaaaactaaattttaaattgtatgcattacccctcaaacgcagtactacaacaccacgtagcctgccaaaagtcctcaccaactgctctataaagatcagagcaagaattcgcatccataatctacaagtgaggtcaataataaaaaatgaatgagcagaagtccacctactatgatcatctatagcccaactaacaaaaaagtgtcattgcaacataatcttaaaaataactaaaatatttaaaatactgcctgaatcacataaaaaataacaagagccataataattttaactgatactagtaatttaactttactttgaatataagacacaatgtaatataaatgacacctaaactattgcatattacacaagccccagttgtaattctcaattcgtccaggctatggagacatgtcagaaaaccactggaaattattttcaataccacaagtacaaaagaatatacctaatattaaaggtagagactgattgaaagtaaatattagatgtaatacttagtaggatatgtataaaatatatataaatatctataaaagtgataactcttcacaaattttcctgatatttctcagcatagaaataactcacatcttgcaacttctcatctccagaaagataaatgacctcatctgctttgttatacacatgttttttctcttttatgaccctctttgcaacctctaatgttctgcagcataaaaaaaaagaaaaaataatgagcaatggttttgcataaggaaaagtcacttgaatttcactaaactaaaatagaaccgttacctttcgaaatttgggaagtagcggacaacttttgcttgcccaagaaccattggtgtatgagatccaaatccagaattgaactcttcgctgaaagcacaaaggttaattgtgttaaatagttaattagggttatttaagtcttttccattatttaagtcttttatgttagttgcttatataaccctaatctctctattttctctgcatctttttttctttatttgttattctcctcaaataattaacaaataggtacatacacaatttgacttttgtcacacaaaagcacgagcaaaatcaagatgaaaatgaagtaccttaatttgttaatccacacaacaggatcacaaggttcagaaatttgtctccatttgacagccaatgagtaaacatcttgccaagacatcattgtattgccaaatgatttgtcttctagagtaccataggtagtactggtctctgagtagccacttgtactacagccagctccgcctctattctggctgggcatattaactttctcccttcttcgtgctttcttactatttcttgatgtgcttctattcaaatatttgcgccaagcttttgaaaccttttgtgcaatttcaatagctgccaagcccgccattcgatgctggtaaatacaaacacacacaaagccttaaaaaaagtaaggcatgaacaatgatgttctatataggaattactgaaaattattcattcagaatcaagctattaaggggagagaaatgaataacagaaaagatggacgtgacattagttgcaactatctgaaactaaatgctcaattgatgttctcatttcctattttagtgaagaaaataaaatgcctaagtgatgtgaagttgtagcactaaagtaaagcacaccatgaggcagctagattctaaattttataacagaaagcaaaaaatctagttacaatataacaaagtgaaatcttatctgatttctgggataaaaagatacctgtcgcctatttggtaagaaaccagagcaatcatattgaattttctccccaattgaatcagcagcctggagaagcgtagtcttatgcttattgaaaacaagatcttgctttctaggtttgcacttcttcaaagattcacgaagaggaggctgtctataaactttttcacatacatttttgggatgcaatcttttacaccagtactcctgaaaattcatataatatttgtcagtccgcataaaattggataaagcaagataaaactaactcaacgtagtgacaaggaagccctgcatgatcataaagctacatgaaaacctatgtagctaagttcattaacggatcaatatcaccattaaaataaaaagataagaataatgatgaaataaaaacatcagcccatattaccttgaaaagtggatcaatatcaccatcgatatcaaactcattaaattcgctgtttatcttggatgctgtgtacaaagctaattctttctggagaagaaaagaagaagaaaaaaaaaataagagaattatcattccaggtatcatgtcatcaggtagatgaattgtcaatacccctttcttatataactaattctgaagagatgttttttttttcctttgaataatgaagagatgaatgttactcattcaaaaaaaaaaaatcattttataaatcaattacagaaaatatcattaaataaaaactaatactacaataatttaacctgataaaaggctaggcattgcagtacaaacttatccatcgagtctagttccaaatctagtgcagcatcataatccttaacctgccatatgaacaaatcaaggtcactgctgaacatgcatactgtaaaagaaacaggggggaaaagaacttgtattaccgcctctttataatctcctacagcatggtagcaggaagctcgcaaataaaaacactcaatatttgcactgtcaatgcttaactcagttgacaaatccttaatagccttcctgaaattttttaagttggctatgaaacattgaaagtgatatgacttgtctttaccataacaaatacaaaaaaacaaaaggataaaattcaggcaaacaccgatatggtacattaagtaatattccaagtgtactactagaacaatttgtcccttcattttaaacatgttcactatgaagtcctaaataaagtttttggatcactcctatcagttattaaagttgttattaatcttttatgtttctctgtccttattcatcaatataccttctccctatgcatattgaaaaagcagtcctctcacactttccagagtgagttttgtttcttatccaaactaagaatgagagcaaggtttccatcaaaagatcagcatatcaaagattctcatccaaaataactaaattagcatttcaagttataaagcctatcactaacccaagcagtcactggatcccatactacaaaaaacaattctgaatcctccaaatattgcttataattactcattctatctaaaatagcaatgcttttatggagaacttacctatgctctcccattccatggagcaaaagaccacgcaaatgatatcccttggaaaacctagcaaatggaattaatattactgagcaagcttcaaccatactttcatccatcaataattaggcatattgggcatagcaaatgatacatggattatttaaattatatcaacaacactcaccttccatcaacttgtagagcttgatgaagacattccaaagccttggttgagtttgccaaatcttgatagaactgcaacaaaatcacatactgaaatttacatataccctcactacacaaaaacttatcattactctttagaactttaaatggccaactaaaaccacataacactgtaatggtacagaaaataatgcaggcattgagtgaagactagacatttactccaaacagaaagaatgcaattatagagtcagatgaaaatcagtccaaatggtaaacaaagtggaaattcatacctgagttagatgaccccatgcttcaagaaaattctgatccagttgaatggatgtcaaatgtgcctcctctgccttcttatattcaccaattgaagacaaggccaaaccctgaaaaaaaaccaaagttgcaagcaatttcatacaaaggttgggtcaaagctacacctacatgaacatctatcatgctccaaaatcagtataatttccctttccgaaacagcaacaacaataataatcagtatataatacacaccagttgtgtatcaaagataaaagaagcaaaattaggaaattgggaagaaactttgttgaataatagcaaagatcaattccaggatattcgagagacctggtttctcaccaaaacagtgttcaattacataaaatctgactccccttcccaatgtttcattcccttttatctcccaataccaacccaatattaagacactaaaaagagaaatacgctaaatgcagaaaccaaataaaataatatcataacttagtttcccaaattatatttgccaccccattctcatcaattcttacggtatcttcttgcttaagtataccggattggaggtttatcagtatagtagtaaactcaccaagtatgtatatgctgatgtattattcttatcaagtttcacacatgtggacaaatcttccacagcagcatagaaatccttgaacttgaaattaacaatacctgcaaaaagaccactttattcttttattgatttgcactctaaagcctcaaacaatgctattgtccttttcatacacgcacttcatcagttcaattaacaattaaaaagtgaattggagtgatatgcttggccatgtttactatgctttggatgcaaaaactcagcagccaagtaatatagtgacgtattggcaactaaaaagattaccctacacctacaccaaacttgcattcttcattgttttcaggcaatcagtaacaacttatagcagactacgctacatcttcgtaatattacatcaaccaatgatgccatcgaatgaagatgctcagatgcccatacacataattattgacgttcattgtttcaataaaaatgtacataaaacccaccataaaagctgaaccacaactgcgaagacaaggtttgtgaaagttacccctttcatgtagaatatcagctgagtttggttcaaactctaatgcattggacaaatcttcaatggcctggaagaaatttaatatgcaaagctttgtcaaaaccagagaagtagaaaaatagaaacaacaataatattcttataatttattcagaaatgattaaaataactaaatttgttcttatgagtacaagtcgcttggtcatgaaaacatcatcccaattctcctagaagttctctttgaagagctcatttaaatttgaattaaaagattcataagagcaaaaaagtccataagggtaaacccatgacatctcaccgcaagaaattcccccaacgcagctcgggcttgtcctctccgcttccatgcctcacatgctgctggatttatttctatggcctagaatacaaattgaaccaaatgttatgcgaagagtactaaatgtttttagatcttccggatattggttgtcaaagtaccttagtaaaatcagctattgcagcctcaagttctcgttggaaagcaaatgctgttcccctccctattagagcctcgggatagctaggatcctctttcaatagctgtgtatatcatagtaggaaagttaaatgtgtatattgcttacttataggcttaccacattaacatcccgagtcattgctcccaacatttcaactcaggaaggagaataaaaaatgtacaagtagaaaccaaagaagcgtaagtgaagttcttaacagtgaatttctgctgaaaaacatagattacttgaggccctgaattattacctgatcaaagatagatatagcacgagcatagtttccctcattcacctgttaatgaaaaattgtttaaaagaagtacagaacatatgttcctaacacagaatgttcttacctaatagtaattgtattccagacaagcattacgatacataattacatacctctgctatacctctcgatagacgaaaatccacacttattgacttggtctttgatattctagtaacacggaactttttatttttgttggactcgtcactatgtggtatctctaatttactagtactcactgttgaagaagtttgagttaaagcacttgagttgcttgaaatttttgataattcactacaattatcaccagagtcatcacatgattcagactcgcagcacaatttattgggagcatcatgattcccattcatttggctaccaaaatgtcctgcccttgtgtccttctcacttataccattgcagacattatcattgttcgtagatgtactgtacacctcagaaacttctctagaatggttacatgagttagactggtcatccaaatgattttgatttgcagaagtttcaattgcattctcactaatcagatgtcctgattctgatacaaccatagatgactctgactctattgcatgattttcatgtagagaacatttctcctgtttggcaacttttaaaagctcttccagttctagcaactgttttagatcagcagaatgatggacagcatgttcgtaaccttgctcccacaccaaaactgcatcttctttccttcccaaagcagaaaatgcacgacctagataacagaacgcaccagattgccaaaccagtaaagaccaataaattttcaaattgaacacaatgtaagaaattcttgtgagcctaaacttgggcaacaaaataatatgagcctaaacttttatagcaaacacagaagtagaaagaaaagtaattgaaatcattgaatcggattaatcccccatttcatcactaccaacaaacacagagcaacctcttagatttggaacagctatcaaaactcacttgtaagtcatatatttaacgcatgaaaaggaaatttagttaaagtttcttctctaaatgtatcgtattttataaattacgatattattaacaaaccaaatttctcagtaaccaagcttcatttcactttccaatcattacagtctttaaagctcttcaccaattatacacataagttaatcaatggtagtgagccttacaatttaaactaaacataagtggtacataaacataaagtgactaaattcaactgttaaaatacctgattatccaataatcatattcaaaagagaaggattacaaaaaacaagtgtcatattcgaattgagctcaaaactttacataaatatgtcaaagaatcagacacacaaataaataagcgtgattaaaaaaagaaaaggaaggtacctttgagaatgtaagcttgaagaagtgcggggtcaagcttcagcgccctgtcgcaatctttaatcacatgcttgtgcaactccaattgactatagcaaaatgctcgattactgaaagacacagtgcaacattcaaagttaaaaaatcaatcgaagaccattttcatcgagtaggagatcggaagaaagaaaaaaggtagaagaaaacaaaccagaggtcttggatagcacaagactgagaaagcaacgagtcaagcaatctgatggccttggaccagtcacgagaggtacaaagcttggctagctccattctctccgacatagctgaaaccagagatagcaactcggccgagtcactcataaaatcgatcggaatgcgatttgggcgattcagtaattggactcatacatctaaaaattcctttcttggtttctacggctgtggtaaagtggtgcactggggatggtgaggggtaataatggaaaaataattaattaaaattaagagtcgaaactgtctgggcagtagggattggcaaggggaaagagataggaacagcgtgttgtaaaagtcggagtgcgctcatggtgttcagtgttcacacgactttgtcacacgtgtgagtcaacatttcacttcctttctttcgtatgtgtttttgggccttatcgcccagcccaagcctgtggagtaccttaaatggatattttcataaatactttgaaaaaatataaaaaaaaaaataaataattaagactaatttaaggtaaagatatttaattttaatttttcggttgtaaatcaatactaaatttaatttttaacggtaataatacttaagttataattttagaactctataagtaactgaatcattaaatgttaagtcattatctacgtgttatttttctcttagtatatttaaactaattttaaaaaaaaaaaattaatgacttggattgtcacgtggtaatttacttaacacttaacagctaactacttacaaacaaaagttctagaattatagcttaagtattattaccgctaaaaannnaacttaaatatttatttgtaactagactcatatttttctagatgacaaatcatttatatcctgatttggagttctccagatccataatggcatctcgccaaggcgaataagcttctctgaaagcattttagatgagcagaaggatgggcttcacacctatttgagtcccatgatatttacatccgagatcgaaccttgctaatttggaaaggcattctcccagaatacgaaggagcaattgagaccctctcgatgagcatctgggatacatccagaaggacattacaagaggcactttgacttaggggtgttcatcaaactgcctgcactgcaccacaccgcaaaaaaaatacggtttgaaattctttgcggtgcggtcgcagtttgaatttttcataaaccgcgcggtgcggtgcggtgcggtttgcnnnnnnnnattgttaatatgcggttcaaatcacaccgcacttcacattataaaaatactaatttttatatttatttatgtccaatatatgaatgttcaactcaaagtccactaattattgtactgttgacacttaatttttttttttttcat

SEQ ID NO: 36377 - DNA, 3103 bp, Cannabis sativa
aacatgattgttagagattatcaacaatattttcaccttcaatttcagttatgtaactttattgttaaaagaggctagaaaatttgtctgtgtagttaatcctgtaaaattctaattgcagcatttctttcactaagcaacattcataagcaggcactgtcctggtttgaatttaatatcaagctcgttagagaatagtggattttctacgggctgtcttcaaatgaacaaaccaaatattctcattttctaattgaaagtctcaaacatgttttcttgtttctttttcaagtttctattcttaacttgaaatattatcatgttcagttccaatgtatttttggtaattcatatgttcatgttttggtctgtgcaggattttcacttgtagatcttcaactccaggccttttactgtgggaaatatatacttccctatagtgttgtgcattattgactatcaacgagtttgtttttgctgtttacaatggctgagacagagcaagttgttgctggttcttgctctctgatagaacagcttagtaaggcagtgcatgagctggaagatcacaagaatgcttctgagaacagagttcagtggatggaaattgaggagcactttcgcaatcttgagacaacgctgagaatgaaactagaagaatttgaatccaaagagaaggaatttatagaaaaagaagctcaaacccataaaagtattgtagatagagaggcagctgtcactgccaaagagcaagatctgttggatcgagtgcaggagctaaaagatgctgctgttgctgtcattgctgaagcacaattaaatcaccaacatacagtttcagagtcagttgacaatggagataacaaaaatagcaaggtaagtagctctcttggtgacacaacttgtcctgatgatttacctcataatatgggtgaaaattctgaagacgcagctttagattttaagccacatccaaaacttgtagaattttgcaagcagatggatgcaaaagggctattgaaatataccatggagaatcttaataaacttcatgttgtttgtgaagaactttctattgcactagaaactgcaaatgagccagcccatttggtgctggattcactggaggggttttaccctccagatgaaactaacaaaccgggggatgagagtcttgctgcccttaagggcatgcgcaaatcttgttgtatttttctggaagccatggctgccttattggcaagggctgacccaggtgctgatcaccttttgaaccctgagaccaagcagcatgccaaggcaattgctgatgagtggaaacctaagttggctagtggtagcattgatgctgccaatgggatatcattggaagcagaggcgtttttgcagctcctcgctacttttaggattgcttctgattttgatgaagaagaactctgcaagcttgttcttgcagttgctcaacacaggcaagcacctgagctctgccgctctcttgggttaacacacaaagtgccaggttggtgctattttaattaactgacaccattagcatgtggaggctgaagcattgtttcggcttaggctctggtagtatattgaaattttgagaggcaaggactgatgctagattactggctgatttggggatagtcctttatccttgtgaaaatgcaccatttccaaccctcttttttagaatcacaatgtcagaagcttatttcttgtgcaggtcttattgaattgttggtcaacagtgggaaacagattgatgccgtacgttttattcatgccttccaacttactgaaagcttccttcctgtgcctctcctcaagacatacttgaaagacttgaggagaaattcacaagggaagggtgaaaacacgggcaatgccagtggtggtcaggtacaaagtgtggtttgacaggaaaaaaaaaattgttcgtaggatttaatactgatgaaatattctctaagtgcaggaagatgtaaatgcacaagaacttgctgctctaaaggctgtaatcaggtgtgtccaagagtataaacttgaagctgactacccacttgatccacttcagaaaagggttgtccaactggacagatcccaagctgataagaaaaagaggggcagtgagcatggtaaacggcaacagccaaaaaaacagaagtccggtggaagatttcgaggatataatcgtccaggtccttctcctgctactggtagacagggtcctcattacagcaacagggcagtgcacgcaggaattccagaacgatatcctcgtactgatttgcacgcctatgattaccaagttcctagtcaggctgcttatgctcagcaacctactgatcatagattatactattatccccaggatggaaatgttttaccaagcccatataatgctgctccaccaaattacgcaggcggtggattactgccttcaaaccagccatatctgtagtctatgctagtaatttgaaaatcattctatagctgtgatgtgagtcatagttgatgaatattcttttatgtgaggcatagtctatgcttatgtcgtttttgtagcatatgatttttgtttttaataactcgtagtctcctataatgaaatgatgctttgagagtagaaaattgggttattttgcatttatgttagatggtggatttgtaaaaaaaatggaatatgctgtaaaagacgggtttttttttttagttctttgtaattgagactgcaaaatgtacccactaatcataaggaaatggaatgaaattgaagaaaacaatgtcatttttccatctattatcaggttgtaccaaaattttcacttgtgttagacaattgtttttttaaaaaaaatgttacataaagtactatttttttttttgtaaaaaaattacatttttacgtttgaagaatttttttttacatttttacggatttttatagtaataacacgaaaacaataaaaaaattacatggaagtaacatgaaaataacatttaaataatatcaaaacatcaacaaaaaataatatacaaataacaaaaaattaacaataaattaacaagagtacaacataaaaagactatattt

SEQ ID NO: 36378 - DNA, 5396 bp, Cannabis sativa
aattaatcagaaaagtatctgatttgctcgctttatgggctctactctaccataaacaagaaatgtgtctcaaagggatgacttttatcaataaatattttgcattttttaaagcacgagtaaaagtcatattatgttgaaaaacagttgaattgaattcttgactgacctaactagcaagatacataccgtgatgcgtgttaaggattgatattgctcatatccattgataataattagagtataataaatcaaagagaaaggatgggaaaacatccatctaaactagttcatcatccactctgagtgcacgaactacttattcatatgcaacaataatagtcgaacaaagaaaatgaattagagatgcttcagaaaaattgaacagcaaactagcaataccctctagagaacgcagaaatcaaaacaaagttgtcacactcaaaaagaactaagaggcagccaaagtgcactgcaaccattaaaactatagtttctgcttggatcctcctaagaatgggattcataatttaccacaagctttttaagcgtgaagacagtgaaactggtctagcctctatgttcctgtgtccgagaaaggttatcaccttcttagtctaacttaggttactcatccactgtttatccatatcactaaattagtttagaactatcatatctaatgagaaaagttgcctccaatatgagtcatttaacatgccatagatttggcctcaagatcgtatccaaccttcctagttatgtaatgattactgctcaaaatgaactaaagactgctactaactcaggaggaatagaactagcagttcatctttgcaatgccaccagtttgttcataagtgttatctcaagttatgagaccaaggaaaagaacctggatcatcttaaacaaggtttcaaaacactgagagcggaaaaaacatttacttcaaaagtgccctatcatgaagtcttgaatccacttcctgggttgaattgaccatgctcaaggaagttatactgaccctagcaagattacggctataagaaaatgacttgagttatagactttcgactgatgcccatttcccactgtctaactcatgtttacaagagatttattaaaggaataaacacactccataagcctaaaataaaattaaagaaatctccctcaaccgttggcttgtgaggtagaaaaataaaattaagactctacgggccacactcacggttagatgcagaggttttttttaaaaaaagtttgatgcagaggtattagttcaccagtgctgaccaaccacgagaccaatcaaagtggacaatgacaactagagtaaggacaatagctaacgataactatctgttgattctctttcaaagttattgcaaatcaaataaattaaaatgtaaaagaagaaaaagcaaaaagataagaaaaattagccacagaagtcagtacataatacaaagcaacacgtatgacttgcaaaacagccatacctcggacacttctttttttgccaagcctttaccccctgcacaaaagatgtaaacaaatttttcaaaatgagatttttgcatatagctttaaaagagtgaaacaaacgcacgagttcacatgacaggggaaaactcgacaaacaattactgtaatagagaacctgagcatacagatttgttgcatgtaggcacatattacaaacgaataaagtacttgtgcaaaatctaacaaacatggtgatgtagaaatgacaacaaaagagaatatgaagatagataagaacagatagagaggaatttagagagatcagagagaaaactacacaaaaacatgaaaccaatattattagagactagcatctctaaacttgagaggcaaagaagtaaagggagcaaaccggcatttttgttgttggtcacttttgcctttttcttaggtacttcatcctgcaacaaccaaaacaacaatttacaaccgagaagcatgcagatccatcaaccagttatcattgttgtcataagtaaatactgaacatgatgaattttacaagaggaagaggtaagggatgggagaaagacaagaaaaaggctaacctgactggtcttcctttttgaatcaacgcgctttgccttctgattagaacctggaaacgacaaaccttgtttttctgaatattctcatctcaatagctccttttggataagaaatttctgtctgaatattcaaatgattaacttaaaaaaaggaaattttattaccatttagcgatgagagtttccctgaatttcttggcgtcttctgaaaaatgaattattatttctgtcaatatgtaagaaatgtaatagaatgtcatattagagtgttttttccactccagagatgcagttgaacactgagaaattcaaaacaatatcaaaaaagaattacaagcaaatgccacaaaatggtcaatatttaacatacaatgtgcgcaattgaatgtaaacaaagttaagatttcatcagtgatttagtatccacttttccaaaaatgagcttgagtatcagttttaagttgaccataacttagttctgatttagcacagcaagttcaaagtgtacatgaaagaaaagtgccaaaattatatgctgttgccatgaaatgattcataacttctcctcaccatcaacaatcaaaatgcatcttcgaaaaatgacacaatttcacagaatagttaaagctgtcaaatttgcaaacaatttgcacaaaatcaacaaaagtaatcaggacttatatgctaattaacaaagatgcaaatatcaaaaggaaaaaaaaaatgttggatctcagactcttaaagaattttcatcaagcaaaagtttgaagacaaccttttcctccactctcttgaacaatgtagatatagtggcctgaacaagaggaccgtgtgattcctccccagatttagtcttcttgctggaaacagaagactgctttttagacttggttcctgatggatcagacccttgattatgtgatggacttggaactgaagttttctccacatcatcttcattctcattgtcaatgtcaataactacagaacttacattttctttctgtatccagtagttaagggaattatgaagtataaatgaaaacagagagactaatgtaattgaaggtacaataacaaaactacccaatcaggaaaaagaaattctgaagtacgctaattgaggatatttctacttgtataattttgggtagatgaatctattgttacatcttttttatcttcttcatcctcttcagcatctgcatcacttgcaatagaatcatctccagaagaatcttccaaaaacctgaagaaagttatatatttataaggtattgcagataaaacgtcagaactttttcagcatatagagtttactagttgtaataacatcaaatgatgattcttttttttttttttgaaaaaagaaagagggagacagaggtcacttgtcctagactgaccccctcccaaactcatcaaaagacaattagttgagaaaaagaaagtttactcggtttaaaactactattgaaataacttaaaatcaaatcatgattactattcaagaaaggatcaaaaggaattataatatgcaagaacataaaagctagagaaatatattgagatagcaacctaattccaacctaataaataggagatgtaactatgcccagaagctacattggaattcaaatgtatccaacagttacttgaaccttctaaacacatgtactgtttttaatttttattttgctgaagaaataaaaatggacagaatatgtgggagttttaagcattgacgccttatgttacagggaaggctaggaagaaaatacgaagattagccccatgaaaatatgagggacaatgttctattttttattttacaaacagtttcatatccttaaagaactaagttaatcagaatgcagtgagtaaagtcaatctagaagaactgtacttgtatctcttcccggcagtccgtgatgactgccgaactggagttgatttcatcaaatctttgttttcaccctctgatatcgataaatcatcatcactgctgggttctggggtttcttctctattggtgattacagttttatgaccaacttgtttattagcacatggtgcaccaccagcaccacctttaaagtcatattcagcaggttgaccctgaaaccaatatatgtgaggaatggatcaccaataaacaaatgatatgaaatttaaccacccaaaaaactattgttggataactgacatcattcagttccttgggaaaatcaagtcgggcttcttctggattctcagtttcactcccaatccaccatgcatcagaaaatacaatctgcagtggtcaggaaacccattcagatcataagaaaagttgagggattaacatatgcttcttatctagctgatatattatctccaatcactaacgtaaaaatttacaggataagtttacaaattcatcttaaagcatagaatgaagggaaagcctttaagaaactttgctggtggagcaagggaagaaactttgctggtggagcaagggaagaaacttagccagcgaaaaaccatatttttaaggacattttcgtttccataacccaaaaatactgtttcttaaggcctttacgacataacaatttcaccatttttctagttctgttctgaacgatccagtgtattattagctacatttatacaattcaaactcgttttattgataattgttcgatcttcaccttgagaattgcaaaagttaatgatcatcatcaacccaatttgggttgaaaccatataaacacttcaaaattaccaccaaaaatgaagaacacataaataaaaataaaatagtaacacaaaaagaaagtaaaaatatacaaaccatattatcaaagtaatcttcacacataacattctttccacctctggggaattgcacagtcaaatacctattcttcggatacacaatagtcccaaacaatttcatccgaccctgaaataatcaaaagatgtcacttacccacaaaataccaacaaaaaacagttccagcattttccgagtataagagaaaagggacgaaacctgagggaaatcaacatagagaatagggttcttagtgcccaaatctttgagctcgccaatctttccaccaccgatcggagcgagaagaccagggaaagagaagaggaatctgttcttccgctgggatttcttgacgatatctctaccgtggtgcttgattagcatttttgatggggaaagaagagagttgggcttggcaggtgtatcggagagcatgttgttggagaaggcgagattttgaagcctcttacgctct

SEQ ID NO: 36379 - DNA, 6831 bp, Cannabis sativa
ttgggcggtttacgaaaatttttgtacacccctagttcagataatgctttttattaatttgttatcctgaagtggatataaaagtctttgtaggagagaaaacccgcttggattaaagttatgcctttaactttgagttattatggaactcaaaattttaaacacttttctctcttctggcatatttaaactgaagcatgtagattccaaagtatcttcccgttgttctgcttcaatcagttcttgacagattttgtagattcatagttttgagttgttgtcatgcacttctgcctcattctatgtctgatgactggcattaaccacgtcgatgattcattgttgatgttgatatttagttcacattccatatggactcgtaatagaatatgcaattaggttgtgtaccatctttgatatttgacaaggagaggcgcacatagcatgttatcaacccttatggccttagccaaggttcagtgagtgtactgaaagttaaaaaaaaatgatcagcaggattgtaaacaacatattccagtaacagaaaaattactcttgagtacgtatgtattttaaaaattatgtgaaatttgttaatgattggaaaacatatatttttaattaagtagtaaaagggattggattgtaattattttgtctttctaattattgctgattgatattaattcactgagatatctggctatttcttcatcaatggtaagattttgattaaatgaattttctgtggttcttctcctgccccctctctctttttctgagaactttctatttgtggaaccgtggtttttgttgtagttgctataccaccatctctttaagtttctgactatctttttgtgtagggatacacccatggattatgatgacaatgattttcacagccaaaattttcatctagctggagaagggagttctaaatttcctcctgttttgcgaccttatcctcttcccaagtttgattttgatgatagccttcagaaccatttgaggtttgataatttggttgaaactgaggtttttcttggcattgaaagtaatcaagataaccattggattgaggatttctctcgtggaagtagtgggatagagttcaattcaagtgctgcagaatcttgctctatttctagacataacaatgtctggtcagaggccacttcttctgaatctgttgaaatgctattgaagtctgttgggcaggaagaaactattgtcacgccaaccatcattgaggaattagatgcctgtgatgaattgggttgcttaacaaagcaaatggagcatagtttgaaacatgatgacaataatattctttcaaagactgaggatggtacaaacttaaatactacctcatctccagatgggatagttggaaactcttctagctcgaagagggatgtaggtgtagaccaacctcttattgaggatacttcacaaattcagagtgatgaaattgcaaaaaatagtagtttgcatgattctcataaaaaagctgataatggagagagtgttttacttgtaaatgatggggatatcttggtgaatgaaaaatttgatgatgtgagcaaaagtgcagttgataccttggctgatgaacagctggatgtccaaatacaagaagactcttttgcttcaaggttgcaagttgataattcagtgaccactgtgcaaagtgttgtctcaagcagtactggaattagtaggttgcaagttgataattcggtgaccactgtgcaaagtgttgtctcaagcagtactggaattagtggtattgatattgaacatcagatgaatgctgtgagtaatgataatactggaagtcaggtttcaagcaaagaggaaatttctgtggtttcagcttctaaggtcgaagctgtttcagatattaaagaggttagcaaaagtaatgtagatgaatctttaagtgaagtagagaagggagattctgagctgcctatagtgtctgaaagcaatgaaggtgagttttctggtaaacctattgaggtcagtaatcatgaaaatgtggtgctgtgtaaaaacacagttgatggtgatcaggaagaagttaatacgattaatgtaatatcagaacctgtcaaaagtgaaactcagtttgagagacctgtagttgaggtcagcaatataagttcagaagttcgatctactctggaaccaacaaaggattttgtagaaaacagtcgcaaggaagatgtgttcgaaagtagtcagcagttagatggtgaaactttagttcacagttctgaggtatatttgtcccctattgaggacgctaaggtttcagaacatgaaggtcttgcaagtagcaacagtcaaatgggaggtatttccagtatgagtggtacttgctcttcagttgaattacatagcgaaaccaatgtcactggagttttgaagggtgttcacgattcccttgaaacttccacagaagatttgagttctgctagccatgtttcacttgccattctaactgaatccacacaaatatctgagaagaaccatgcatatggagaggctgatgtttatatatctaatcaacatgtttctgttgttgacaaagataatttaaagttgcataatgattgcaatgtagataatgaaactataaataaagaaggtgcctcctcatcgattggtgatgataaatgtgctactgctgctggcagtgaaccaggtacattataaactcatcaaatttagttagaaagtcaaacattatgtattgatgttctaacttcacctcctttaaccctattttgattttgtagtgtcagatagtagtgttgtgccaaatccttatttggctccccatgagattagtgatagttctttgcctactaaagatgtattgaagatagatgatcacaaggacattcaagtatcggctgttcctgttgtggggtcaactctcttagaaggaaaagaagaagcaaggacagaagcttttgcagaatcaagtgtggcggcttctttggtgtcttgtcaagtagttgctgcaccagactctgctgaaaaaggtgcttcttgtgttactgctgggggcctcttacacaagcctcccgatctttatctgccaacagaaaataaacctgaagttgaaacaaattctaaggatccagcagctgtggaagttagcaaggagtgcactaaggagatgaacattccccttcacgaatctacagtgagagagggtggtcatgtcatggaaccggtgattgtccctgaaaattcgaagcaattcattattgaaaaacatgtgttgcaggatgctgcaagtatcagcagaaccggtaaatctctctctctctctctcttccctaaaaaattctggtttgaagctatatgagatgttacctgcgcagtctaaattaagtgggtttgtgttttgttgccatatggtgaataaaattttgtaatgtcttttctgatgcagaacttactacgaataaagataagatgctctcacctggtggccctctaccattggtagaatcaggcattagtcaaaaagttcaggatggtaatggggcagctatgctgacagttggagataaaacttttgcacagcctaacaccaaaagtgcgttttacttagttgcattagtttatgatgtgagcttggactattgttttatcttagtattcttattaatttttttttttttttttattgtttgtataaatcattccaggttttaatgaattctggtttgtagtctctatacgttctttttttaagatgtcataccccaactaaatgccaccttgagtgtgaatgggatgttgacaagatgcttgtgttggctgagagctatttagtctttcactttttttttgcagttgaaaaggttatcttgtttcattggtggtgttaaattacagggtcagctagtgatgtaggatttgtatatgcacatgcatttcatgacctatttattatttattggagtgttcgtcttctaaatcttaaaattctttatgtgtatctgatgctgtgtttcttttttcctctagataatgtaggcagttctggtgatcacagcgtacctactcctggttccaatcagctgtctcagaataaacatggggtggcaaagggtggtaagaggaaggcctcagtttctaaggtgattgatagtgacactggaattgttgtatccaacacgatcggtcaaaaaggattggattccgtgaaggaggggaaagcaagcattgttggtttgtctgcagatttgttcaaaggagatgttggaaagaacttgcagtgccttcctgctagcccagctcccagagtaccaatcataccactttccattttgttgctattatttatactaagatatttaatagtatatcttttatgcttttttacgaatttcttctctcacacctttttctgttgcggcaagggatacatgatgtgtgcattttcatacaagaaattatttttatgaagatttctgagggttttccttcaaattcagctttaggccgaatagaggctaattatgctcaaaatacttttcaggcaagtccacaagtatctgatggagaacatgtccgtggtcgttctaaaggtacttcagagcgtaaacctagacgatcatctgctaaggcagcaggaaaagacagtggaaagaaaggagtttctgtgaaagaaacaactcctgctagacaatcagaaaaaggtgataaattaagtaatgtgtcgctaagtccatctgggattttccatattatgcaatcaaatgagatgcagcattatggacatgttgaaggcaataataataaaccgtacttagttcttgcttcttcaacttccggtctaccagatttaaattcttcagctccaccttctactgcctttcaacagccttttacagacttccaacaagtgcaattaagagctcagatctttgtatatggagcattgatgtaagttcttttgtttatcacggattagtaaacattacatgaatgagtgacagttcactcctcaagtcatgaggtgcacacatctctttatatatatatttaaaatataatgagtagttgaaccttcacttcatcaaactattggagccaaaacactaaatttttggaaaagtttaaggaaagtagtaggactgcgataggagaatgctatgctgagggtgtaattttgctgttccagtttttcatttattacttcttttttgggtggttggagacttcaattttcgtaactggcatgtactccccttctaccaaatccaccaataataggaatattagtaacccaaggagtctgaaatgctttacttctagtagaattaatccatttttatgagaataaaagagtgcaatgctttattttcatagtttaccatgtgactttttgtttttcatttttatttttggggccattgggaggtctcccggtccactgccacggccaaaagaaaaaaaaataaattaccatgtgagttgtggtaattatgctaagaatgggaggaaaacatcttttcttgtgttaattgattttctttttccttcagccaagggacaccacctgaagaaggacatatgctgtcagcatttgggggatctggttggtcttttaattttttatttacttaatgttttttaatatgaaaaataatcttatttctattacatttttcaattgtatagtaattatttgcaattttataagtatagatggtggaaggagcatgtgggggaatctcttgcaagcatgcattgagaggctacaaaatcaaaagactaatgttgttaatcaagaaactccattgcattcacgtcatactacctctgccactgctagaactattgaccattccagcaaacagagtgctcttcaaagtaaagttatctctacgcctgttggtcgatcaagtgccaagggctctcaagctattgtaagccccatgataccactttcatcgccactttggagtgtttccactccagtcggtgatgcaatgcaatctagtgccattccaagaggttcggttatggactatcagcaaacacttactcctttgcatcattttcaaacaccacctatgaggagccttcttggacccaacacttcatggatgcctcagacttctttccgtggtccctgggtttctcctccacaaccttctctaccagaggccagtactcgcttgacaacatatccgggtacagaagccattcagttgacttctgttaaggaaacagctatgcctcattcaactggtacaaaacatgtcttgtccagtccaatggttcaaactggagctcctgcaagtgtattgactgcagtctctcccatgcaggatttcaaaaaggtgacatcatcatctgggcaacattcctttgaccccaggcctagaaaaagaaaaaagaatccagttcctgaggaaattggccagatcgttttgcaatctctaccccagagtgaaccagttttagcaccagtactttctggtagtctgtctacatctgttgccatcacaacccccgcttctacttcagagaagttagttatgtctgcatctcctacatcttccgcttctcttagaaagacagacaatgtgatgcagagagcttccttgtcagaggatactcttagtaaaattaaggaggctagtaagcatgcagaggacgcagcttctcttgctgctgcagctgttggtcatagccaggaaatatggagtcagctggagaaccagaaaaattctggattggtatctgatgttgaagctaaattagcttctgcagctgttgcagtagcagcagctg

SEQ ID NO: 36380 - DNA, 4076 bp, Cannabis sativa
gtataaagatgtcaaatttgaaaagaataaaggtttttgcaaattgggtcagtcattcgaataattttagtttcatactactgtcaataaaagaagggaattttcatttttatgattttgagagtataagtttagaaaattttagaaaaaagtaaaaaaaaaatatagaaaaatagcatacgatacctgattacctcttattgtaactggttacccctctggttacctgaatgtatctaattacccttacttgattttctaatatttttataaaaaacgtataaaaactcataaaatttataatttttttataaaaaataaaaagaaacaaataaataataatgagaattttattactttttcgtttcattacctcaaaccaatgagagcctaaaggtttttgccagttcagttagtgataagagtaagtgagtactcaatccatgtatgtacctgtacatatttctataataaagtttcggtttttacaagagaatttcgcatcaacgaggaagacgggggttgttgtgatggagatgagtggttgaggcggcagcagcagcagcagccatgttatggaactgagctactgaaacagtttgaaacattgcagttggaggaggaggaggcatcatattcatgttatgtaattgtgtaggtactaccacattttgtaactgttgcatcatgtttgatccagaaaactcctgcttttcaaacaaaaggaaaatcaaaactcacataatttcggtttttattaaatgatttacgttcgaatgttcataccgtttggtgaaagctcccttgatgagtgacaacacttgcagcttctgttgtctgatgtaactgcacacacacacaaacatattttaagaatgtctttagctctactttcgataattttgttagaatatttgtccagtcttgtcgtaacacttctagatcgagttattattaagttttattttaatattttcgaaaatccaatcaataacttttgcaaaaacataagtttcaaaagagtatttactcaaaagcaaaatcaaaactcactcacctttccttttttacttgaggtctctttcccaggctcgggtctctcactgtgcgttggggtcactttaacgtcggatacctcgtaagtagaggcattgctgcattgattctctgcatcgacggtgcaaacaccaccaactacagctgaggtatcgggtcttgtgttgttgtctaacgagtttgtcaaatttgcacattgcttcaaagcttcttttatggcacttaaagctgcattgtaactctgttcggacaaagatccttcctcgcccaatattatggctcgtctacataaatcattgtaacgacgaacctttcgttgaacattatctagcttttcaccaatgggatgtctactcatagcagcatttgtccatcgctgcagcacatacttagacgggatgctgaacacacccgacatttgaagaacaacaatagcgtgtctacaaagataacctttatactcaaatgattgacataaacaaaaaatatctgattttgattcgttccattcaactatgtaattctgactatcctcgaaatctttaacagcataagttgtgcttgtcccgtcttcattttctttcttaagatggcaagcagccgctcccaaaatcaacttgaaacttcttaaaaatttcgtgagtatatacaagagacatttgtttctcaaatggtgatggagattttaactcgggtgtttcatgccaagcatcgaaattcgctttagcttcttcttcatacctatcttcaagaatttccctgtaccgttccatgaaatccctcaacgatgtttcccgttgaacatatttgtcaaacaaagaattcaaactttctaatcgagaagttgtagacaaacctgcaaacgatatgtccctcacgaatgtaggcacccaatacattcgatcttcatacaaggactgaatccattcaacttgtctaagattaaatttctctatcagtttccaccacctcttttcgaattgtccttctgaccaagacttaaagatacatttactaaacttcttcataacactatcatgccacatacccaaaaactcgagttgtctcggtaccttctccattacatgccacaaacaaaaataatgtcgggtgctcgggaaaacagctgcaacagctgttttgatggcattgttctgatcagttaggataactcttggagcttgttcacccattgctataaaccatgtttgcattaaccaaacaaaagtataaagactctcatctgcaatcaaagcacatccaagtaaagtaggctgaatatgatgattcactccaataaagagtgccaaaggaattttatacttgttggagaaatatgttgtgtcaaaagatataacatcattaaagttagaataatcttccattcctttagcatcaacccaaaaaacattcctcagtcgatgctcttcgttcaaatcaacagcgtagaagaatttcgggttatcaacctgcatttgcatgaaatgttcaagcaacatttcagcatcacctgattctaacaccaagtatcgtcctttatcgtgttgattccttaaataactctctaaacattcaacattttgataagcactgaataatttagacacattagctaagttctttcgtctgcgaatcctaacatcattcttcattgtatcagcagcatttctatggcttctaaaaaaatgagcttgagcaggtaaaagatcatgattatgctcctttacaaaactataaatataccacttaccatcttgttttctcttcacatgcatacttgctttacaaccgattttcggggaaggtcttggattaatagcatcatcagattgttgtttgttcccatatcttatacacgaaaatttcgcatcaataaactccttagaagccctggatcgacggctgctcaacttagctgtaccgaatccaacagacttagcatactccttgtaaaatgtatatgcatcctcatgagattcgaattcgataccatcatgaggctcaacaatggggtttggtattatgacattagtattatccattgatgatgacattgtgggaatattcaaatcaactttgcatccaccaagcacttgattttcaactgaactagaaatcaatctgcaccttttcatatgctccataaacattgtaatgaatctcttcccacaaataaagtataagcttttgtctaattgagcccataacgatggaaaccttatactacacaacaaaaccaaacacaaaatttctaagaatctttccaagaaaacaaaccaatgaaattatttctttctttacttaccaaagttgcaaatacaaaatggagaaatttgccaaataaacaatatgaaatactaaaatttacaaaataatctcacttaatttactagtataaatttatggccgtttaggggaccctacaagattattttgctaataaaaattttaagctatttttacaaaacactctacaaaatgttgataattacaaattaccattgactaaaattttgcataatctctcatttggcttaaattaaaagccctaataataaaaaagacagaaaatttgatgcataaagtgaatttcttgatacatatatttatgtattaagtcatattaaaaaaagggttcaacaaaaactaaagcaaagatatgaatttttactaataagaaagaatctttgggttgtcaagaaatggagaaaagtctttacctttgaaataaaaatcaaattttgatatgtgggagttgttggtggaagagagtggaagacaaaaagctaagccgatccgagaatgtttccttcctacggttttttgagctttgtcggagattttaagaaatcagagagctgagggaggaggctgaggcctgtgaagttggaactggtctggttgggttttgggacttgggaggagttttgatgatgttgataaatgataatcattaacaatcttaaaatgtctttaagacctttttttttcttctcctcaaaactaagaactcagaaaag

SEQ ID NO: 36381 - DNA, 11692 bp, Cannabis sativa
  modified_base (51)..(71): a, c, t, g, unknown or other
ttcaggaggaatttttaacggcaaacaaagttcagggggcacgatttagtnnnnnnnnnnnnnnnnnnnnnaaaattactaattagcctataaattattacagagctccatatcaattctctattatagataaccatttttttatatgattgaagttcattcttttaagtctcactccatatcttagctattacattaaggctaattagaatttttaccccttaaattttgatatgtatcaaatcatgccccttaaatttttctagccgttaaaaattctctctgaactattgagattgttggatttaaagacttttatccaattttactaattcaatgattgtttatgtactaaatcatgctccctaactcttatatctaccaaatcatgtctctcaaactataacatataccaaatcatgttctttgaactttgatctatgttagacttttcttactcaaattagacaaaaatctataaatccaacaatcttaataatttttagtgaccttaaaaattcagagtcataatttagtacatgttaaaatttaaaaactaaaaattctaatttattttacattaaattataagacatcacatacttaattacactttgtatgacacctagagggtggtggtgccttttagcaatccacatagagtaagcctaaaatgtcgaaccacttgaagctagctcaagtaccagaggagagtgcgtgtgttggaggtcctgggttcgagtcccaaattatgtattgtaatatataaacgcttaattaaaataataaaaaaaaaagcctaaaatgtcgaacatacccctgaagattttgccaacctcgaagcaaaaagcccacaaagccatgactgtgtgtgtgtatagcaatatgaactggctcaccttttcttctcttaacaaaaacaccaatcaatggagcttgagcatgacctttggtactcatctaaagccaccaaataaatactcacttcactctccataattaatttattattatttattttttcactcatataaataccttcatcgaaaaccagttccccaatctcaatgtcatcaggttattcaaccttcactcttcttcttcttcatcttcttcttcttcagctctgatccttatcttctttccctaagttgcagttcggagattaatggctactttatctagctcttcttcttctctatggaaaaacggtctttctcttcgctccactcaatctacctcaatcgttcgctctcctgctttgcttggatatagaagaaccttccgcagaagcttcgtcgtcgcatcttccagtttcgataacgataatcgagagtaagatatatatatagattgagtttttgaattggtgatttttctttttgtgtgtttgaattttagtgttttgtttcaggtttgttatcgttggtggaggaaatgctgctggttatgctgctaggactttcgtcgaacacggcatggccgatggtcgactctgtattgtctccaaagaggttttggaatttttttttctttcttttcaatccaattttagcaatgaaaatgcaaattttttgatttgtttattgaattattaggcgtatgcaccttatgagcgtcctgcattgacaaaagcttacttgtttcctctagacaagaagccagctcgtttacctgtaagatttttgtgatttcattactttacatttttattatagtgagttacaaatgtgtacatttgcaattgtcatttgtaattgtgtgttgtttagtgtttacactgttgctgtttgttattctgtgtagtgttttagttaatgtattagtatgattgtaggggtttcatacatgtgttggatctggtggggaaagacagacacctgagtggtatcaggagaaaggaattgaggtaatttgttgttgtgctgaaatgttttcttttctttctctgaggtctaaataagctttcagtttgtaattaccagagaaaggttacactttttcaatgcttggtgaaaaatgaaaacataactgaaaatgaagatggaaacttttagtattaaataagaatccgtgttgtaaaattgcctggctggagtcgtatcatttttcttaatcgaataatataattgtatagatagatcatagtgcatcctgaaaagcttatcttgttctcagtcaatatgttttctatcattcctggatatttttttttttttttggatagagttttgtagagaacgagatgaaaagatcaaggtatagattagattgtaatgaaccagaaaagttagaatggacaaccctaggaattcgagtgcctggactctccctgagctaaagctctacaaaattctctagacagtttagtcctcaaattcagctctcatgttctattccttctcagccataaccacaaactaccctccagacctctacacaatgtaacattagcaataataacatagcatgaaatcaacaaaaccgcaactcagctaaaagtcaaaaacaaaatacaacagcatcccaatctttgtccaatatggcagattcaccatgccgctctcctgttatcctaaatatgcctaacgtaagtaaatctgatgagatgcttatcaaaattgtcactaaattatattgaagtgatgtcaaattttattcagtctttttggtggtagaaaatagaaatgctgaacttgttgctgcttattcaatctcatttctagactatatataatgaaccagtgacaagcattgatatagaaaaacgtatgtaaatttgatgagaggcttatccaaattgtcactaaattaatggaagtgatgtcaaattttacagtctttttggtggttgaattgctaaaatttttgctgttttgtcaatctcgtttctagacgatctataatgaaccagtgacaagcattgatatagaaaagcataccttaacaacaaattctggaaagctgctcaagtatggatctctaatagttgccacagggtgtacagcttcaaggtgcgctttatttatctttggaaaataagatttcatattagatgatcttatctatcaactattgtgatttggttctggattagtgtcaacacactactatatgcatccatattaaaagctgtagccaatgttctttcttgactacaaatttacaggtttccagaaaaaattggaggaaacctgcctggtgttcactatatccgcgatgttgcagatgctgatgcgcttatatcatctttggtaaatcatttttaattatgtattatctgttgttttctactatgtgttagaaatttccatgctatggaatgaatagagaagatatcccccctccttccattaataagcaaactgggaatatgatactgaatttttacctgcattttcttttgttcggggggaatcgaattcttttacctgcatagttacttaggggtgttttgagcttaatatgatctggtacataaaattaaagttcaaattattaataaacttgttgccgtaggactattgattttaaaagagtgtacatgctatattgttgaaattttgcatcttgttgattttgatactatttgggtgcttgaaacttttcagtagaaatttgtaataacagtgcctttgttttagtaaaccaaacttgagcttgagataatatctttgcgatattttttgcccatgtttcaaaagctttgctgcaaacaccaaacttacaaattctattcctttattgataaattatttggcctccaactccacaaacacaaacaacagaaagattaatgctgttttgttgcatgagcaatttgtactacaattcctttcagaatgtgggcttgttatgttaatcactggataactatatggaacttttgtgcttagcttttcctttcatacttttccgtttccttttctcccttttctaggagaaggcaaagaaggtagttattgttggtggtggttacattggtatggaagttgctgcagcagccgttgcttggaaacttgatactacggtatgaagaatcattccttcaattggctattattgactacataaggctagcacaacgagatatatagatatatttacgtaatgttatatctgaatcccgtattgctaccttagtcgttttgacatgttctattgctgactatgtgctggttcccttttttgttattaattcaaattccggcaaagtaggaagatatacagattattaaataaataaaacgggcatcaatattacctacaattgtattgcaacatacatatagtatgtaacagaacatcaatacttactattcattatttcagaaataaagaataaagtataattattttctcttgaaaaatctgaacaaacatttatcctttttttttcccttggaaaaaagattgtatttccagagaatcatctgttgcaaagactatttactccttcactcgctcagagatatgaagaactttacaaagaaaatggtgttaaattcttgaaggtgctctctctctctctctctctctctatatatatatatataaaaatgtatatatataaatccttgtatataatgaaaaccccaaagaagatcctttattccttaattgttttgtagggtgccatgattaaaaacttggaagcaggtgctgatgggagtgtagctgctattaaacttgaggatgggtctacaattgaagcagacactgtaattttttacacttaaaaaatcgctttatcatgttgcaccaattttgtatacttacatattcaaacatgttttctccctttttctttttgtgtgcaggtgattataggcatcggagcaaaacctgctgtcggcccctttgaaagtgtgggtttgaataccactgttggtggcatacaggtacttgttatactaatggcactaattatttcagcattctgcatataaattcttgaaaagagcatctaagtacacactttgagtttattcctctatttacttaattctggtagctgacattacttatgtatatactttgagtttattcctctatttacttacaattaaaattacatctgcgctttcaaaacccaggttgatggtcagtttagaaccaatatacccggaatctttgcagttggagatgtagcagcattcccattgaaggcatgtttttcttcatttgacaaaaagatcactttacttgctctgaattctgtaatgaaacgtggtttaacaattggcagttgtatgatcgtattgcaagagttgaacatgtagaccatgctcgtcgatcagcacaacactgtgttaagggattgttgagtgcacaaactcacaagtaaattggactaatcttttttataaattatttcattgaatgtcaagcacaattatattggtgttgacttgttttactgtatgattttcagctacgactatcttccctacttctactcgagggtatttgagtacgaaggaagttccaggaaagtttggtggcaatttttcggggacaatggtaataatctgaaactcatactttttcattttccttttcctcttcagttgtttatcatcttcttaaaaccaccataaccaaaccttacactatactcattctctaacagttggagaagcaattgaagttggaaactttgatccaaagatcgcgacattctggatagaatctggtaccaaagtccatcaaaattactatctttctctacacataagtatgtatatatgcaattatgcatcatcatcttcggttcaaatctaacacaacatttaattcgctacaggtaaattgaaaggtgttcttctagagagcggaagccctgaggtacttctaattactcacataccgaatgacttccaaatgtactcttactattcctttgatgttactacatgaaaagaaagctgatattgatttgtttcgaatgaaggaatttcaacttcttcccgaactggcaaggagccagcccatagttgataaagacaagcttgagaatgcatcgtcggtagaggaggccttagatattgctcggtcatctttacaggttaaagcttcagtctagggacccgatgatggagccagcttttaatgtaatgctaatcacatccctatctcacttaccttttttttatcacaaccacttcccaataatgattttaaagcaaaaataaatacctcattatctctcattatgcaccatgccctccttgagcagctctataaaaaatgtttaagataagagtttaatagttgtgcagctcctaaacaagacaacgagtacgaatcgcatcggttttttttttttttttttggtgtaataaatttgattttgatcttaattaagttttcttcttattatgctctgatttgtttgtttgtttacttattttctttcattttgtctttctttgctttgctttggctgctatgcttctttggctataagtttttttaacacactaatgcctatggaactttattcaaattaaaattagggaagttatcatgatcactgcaaactcttgttttttatttattcacaactaatatatgtatgtatttatagtgaaaaatttattctattaggttaatggtatttttttgattttttatgttaactttatcttaaactcttatttttggttttttatattctatataaaatttattctacatttaaaagttagccgcaatagttaaaaaaaatttgaaagatcaaaattttaaattctatctcaaatttttttaaaaaatatattatttaatgaaagaaattagatatacatgtattgcactaaaaaaaattaattatacatagattattctgttttatttacatataaatatattgtagctaagagattcggagaaaaaattgaaggataatatcttgaagaattggaaaattacatttattaatacaaccatgaaatccaattcataatgataaatctactaaaaatgattattgtaaattttgccctatacttttttttatttgatgcggttattggtcataggtataatttgttgagtatattagttttaaacatgtacatattagttctaacgagatatattatattatcgaaatttattattaaactactatttatacatatatttttgtttgaatttttaccaaattagtgctacattaattctacatcaataaattattttgataaaatgaacaaaatacaattgagtagacacatttatatagtgatttactattccacatttattgtgaattgagtattctaaaaataaaaaattaaatagaaattctgttaatgtagggtctgtactgcacataaagtcaagaagtgagtttattaatttctacttcatttgatgataggtttaaatacaatagcatcaccatttattcaccattaaataattgagcagttatatgacatcaagagggccaagggtcataattagacactgaaagcaaaggtttaagaggcttccatgtttggcatttattaaataattttgtattaagtaatcaacctctctccacacacacaatacaaataatttaaaataaagcattataattagacattagtatcacctaaagtcacattttatggttagttagcgatattttttaaaagttattaacttaagttatataagactcgatacgcactaataacgatatgacacccagtgacagggtgtaatttttttaaaagcaagacggtaaaagtaaacttaaaaggaaaaaaatgctcttaatagaatttgaactctgagtctatcactctaatctatatgtaatctaacttctagctaaatcattacatcaaagctgatattatgtttataaatatcattttttattacaaatatatgacgtaactaactaaattatataagagaatgactgactcgtctcgcttctatatgggttcgtccttgacttcgatgagagagtgctacacaatactaatacattttagtattctaaaattaattaattaattaggggaagaattattatgtctatttatatgaaagtaacgttccaatttggagagttgtgtttgcaaatggggttacgttaattaattatgtgaaagaggcatttcaatcaaaaatgaccttcttcatgcccaagtccaactaactatttaaatacttgtattgtttttttaagcaacacctaacctaatacaaaaggatatatgtacttttctttttagagtttttggtattttctatgccaagtttattatgaactagctagctagtcatgggttgacaaagtgatcatttttattttgacagaaacttgtgctacaaaacagaacaaaagcacaagctaaatggaaggtagagaaccattccagattaactcactatctaatcttagacccatcctagccactttatgaacatttgtttttttaattatgtttattttgtttttattttttttagcaatcctatattgaaaaatagttaaaaatgatatcaattataatacaatatcaaattttcaaacatctttatctattatgcccaattggctgaatttaagattttagtcgaaggagacaattttttttttttttaaaaaaaaagtaagggaggtacttttttttttttttacatgttatagcatgttaaagattagtctaaatctaaaaataaatttttacaatattaaatatagtttaaaataataataataaaaacaataaaaatattggcttaaaaaaatttggtagaggttcaaaaaactttaaatattatcaaataaaaatactactatattacgatttaaactcttgacataaatgtaaaataaatactatgttagtatataacacatttcattacaagtatgtattacaattaactaaaatatatagacattttttcccattttttaaggaggtgactactctctcgactgtatgttgatccgccaaccagggacatttttcttttataaaaaaaaaaagagaaaaatgataataatataccaacacttataaacataacaaaattgtatatctaagctctattcacaaaatatattatttggtagaattcataaggattaataaataattataaattaataaatttttgtatgttggtaaaataattgctatgggagttttcatgctaaaattatggttgaagaactcttacaaatttatgataaactaactatcgtaataggaaattattgtcttgattactataattgtttttttttttggcattaccactagttgatgcattcgtggaagaaattttattttaatttttttccccattaaaaaaaaaagcattgttattgaatatttttagtgcttaacaccttctagatgtgttactttacaattagttaacgatattaaattatacgagacttgatacttaattgtactaatagtggttttgacatgtaagaggatgatagacactactgccaagggtatcctaggtgttcaaaataatttgattatagggaatattatgaaggagaatatgattgtaggaaaatatgtaaactgtattgagttgtgtagtgtaatatgtaaactattatgcttgattttttttaattcttttattttttccttggaaaatggtaccaataattagtttttataaactaaactatatattatgctagtagaacattttagtggtcagaaatattgtactttggcttatataaataaaacgaattaagtaaacttcaacctcaaattaatacgaacctcaattgattaatgtctagctacctaatacaaacaaatactactactatttttttttttttccaaataagaagtatagttttagaagccatctaaatatgatttcatcttttttttttttgagaagaatataatttgattaataataatataggaagtattgtgatattgtgaaatttaataatatggtccccatttgaataatattcaatagaacctcctagaaacgtatagtgccttctaagccacacttgaaaataaactataagaacaccactcctatcaacataaagaaaccattaatttttgatttaggacatcctaatatatattttgttcaccaaattaaatactattatatataagaaggacactcctatcaacataaagaaaccatagtttatgcataaaaatttgtgttgcaagtctctcttttaaaacactagcacaattttataacttatgaaaagtaatacttattacaagaaaatttaaatcgtaactctatctctaagtgtataatattatttatgtgatcatatgttatttttttttaaagaaaaaagtgtcaaaaaaaagtatcttaaaactacaaatatatagtagtatgatttttttttcttatgaaaattacattaaggaggtacatgaatgaaaaggtatcaaatgatgcgcattaagagtagatgttccatatactaaaatccatttttctaatgatcaagtgacttgtcaattatatccttatattcaattttataatttagttgttgataaaacatgagataataattttgttcagttgagaaagtgacaatttatttgtcactatatatattatcctattatatcatcaataaatatataaaaaaaaatatatgattttctatagtaaattttctaaatagtcgttttagtagattttttttatctgttttgacatctaaaaaagttttttagtctattttttttatgattaaatacgttatagctatttaagactatttataaatttttagaacattctgaatagttcacagtatcgaacataaggtttgaacagttactaaccacacgtataagaaaaatatttgcgcatgcaacaaaatatgtaaatcttattttcagtatgtaaactactcagaattttatgaaaatttatatgtgatcttaaataactataatgtatatgatcatgaaaaaaattagattgaaaaactttttttgataccgaaagagataggaggtctattgaaacacccctttaggggtgcactataaacttacccaaaaaatatgaattgcttttacaatgcaccccccataaaagggatgcactgatgcatcctttacccatttcgacatccaaaagaatttttagtcaatttctttttatattcgtgtacgttaaaattatttaagatatcttacaaaattttaagaaattcggaataatttacaatatagaaaattgtgtttaaattaaccgtctatttcacatgcgtataaaatagtcacgcatgtaactcacagtttgaatctatttttcggcgtgttaattttttctgattttttaaaattttgtaggatgttttaaataagtataacgtacatgaatatgaaaaaaattcgactagaaaactattttaaataccaaaacaaataaaaagtatagatatatccctttgaatggtttgtaaaacttttcaaaaaatgtatatttaggcaagtaaagcacacttacaaataaaaataaataaatgaagagtccaaattaataatatagaaagaataagaatcaatttgagtgttttcatgtctccgaataaattagttggtgttacgaaaaagcatagcatagtactattggttgctccaaattattaatattactattattatttttttttttt

SEQ ID NO: 36382 - DNA, 12416 bp, Cannabis sativa
gggggggggagccatgtctatgaagaagttcacgagccaaagcttgaagatcaccgctgcccccgcccacgcctccaccagtggcgccaccaaattgacgtggatccagttgttgacgctgctgcatgggccaaggctgcagaatgggctcgaaaagagttgagagatcgtaagtggcgggtactgtggagactgagggaaggtctgagattgtgagtggtggaggagatatgagcgtcggttgatgcggtggagccggtggcggtgatggaagctccaatgttgctagatgagcttgtaagtaggatagctccgtttgtaaactcaccacctgaacagtacacagttcaattatagatctctactagtacacgtctttatacaacagttacatgatgttatttcatgttaaatcttcaggaacattgcattctctgacaattgaattaaatatgcaatagttatatttataataaaggacttaattaagtaacttattaaatcaactttttggtagaaagcatatgttacatgtatttcaatgtcattttcatacagtatatatattgctacagtacacacaacttgaatgtcttctagtacaggcaaacatttatttgatagacaaatcaaagactatttgtctttgtttttacaataagggtgcttaaactactagcattagaacaaggggttaccagcatttaaaggtttctcgtggcagataatttatataactattatttaacaaattcttacaaaacaatcataaataatattatttaaaacactaatttcagccgatcatcaggctggccgttaaactaaaaggatttattgttttatatatgtacatatttatacgaatatatattttaagttaaatagctagaattagaagtggtcttgattaaaaagcattcacatgatatctccctttaaaaaaaaagaccttataataataatccgtattttcacatcaaaattcttctttacaaattatagacaaacaattataaatagaaaatatatacaagtaatactttcaattataaatgtattacaatagtctttttagtcgtgtttttgaaaaatgagactgattagctacccagtaacgtacgtgtgaaattaaaagcaattaattatatgtatatacataaaaagaattttactctccgaaaatcgtacatcatattttgaaaggaaaaaaaagctagtacaacctctattatgcattatattttatgatcagtaacctagtttgacttataaagaaagacaagattaattatcaatgaattgttaatagcaaatagaaaagtgatttgactgtttttcctaaccaaaagcctgaattccgagaagtataaaaccgaccatttccttaataccagcaaaaacctacaagtttgcacttaaaaatggcatcaaaccatagataggctcataccatcctggtaaccgccgaccatattttttcttaatcaaataaaaaaacgttctagatttcagtaaagcacaaaaactgtcccctaactagctaacccaccttatattattattcttcttctctgcccatagaataaatttattaattattaatatataataataaaaattatagctaatacggtcatatatctaaattttagtttatcatttgggaccctttggtccttaaacgtaagacactttccctacaagtaaggtttatagctatatatagcgataggttaatgtgggtagctatagcttcttgttttacacgaaaaattcacaggtcaaatacacagtaactaccaaaacaagtttaactcatcgaaacgtacgttacgaaaaaagttgttacaattttttgttattttttttcaaaatttagaaagaaaaataaatatcgatcaagaaacaaaagggcactaaaaaacaaattaatgaaggaaattggatgtggaaatgaaaggaattttagatcatacatttatagacaatacagtgaataattcaatatttaattaaagctatatagcattattattgtattacctgttgttgtagagcaaaaatatgagcaacacagccgtaaactgggtctctaagacgggcttgagcctcgtaacagacggtaacaacggcgtcgagccttttgtggaccggaatatgtaggagaagtttggacacgttactggctccgaacactttatggacagccgcgaaatgagccgcgccttgctcagaatcgaaatacggcgcgaatatgcaacccgccacgcactttcgccgaagaaacttacacgcgccgcagggtccaccgccaccactgctactcccactgtttccacccccaccaccaccgctacctcctccgccgctacttgtactactactagggttcgcgttcatgtcttgaggtatctttttaatctctcgacccttttccctgaatgattatcttctttgataaatatatacttgagaaaataaccaaagcagagaaaaagaaaggagatagagagttagggtttttttttgtttgtttcttttcttggtgggtatatacttgaaggagtatcaggagagaaaagggtgtggggttttctggtttggtagatgatggtggattttattttattattaattatatattttttgtatttttattttaaatatatatatgtataattttcaaatgaggaattaagtgggtcgattaaaatgctagctaagaaagaaagaagagtctttaaagccacgcgagagagcaaaagccttaataatatccacatttagctgtttgcgtgaagcaaacatgggataagccctaacaattgtgatctctctcacacaatcgatctgtgcttttcttcactctctctctcttttgttttcgtttctcatataaatatcactttacaaattcctctccctagcaaaactcatgctccatctctttctatctcttccacttttttaagctctatatatattaatgccaacttttttgacatgtatatctgaatatataattaatacatttttggctatttagtgaattaaaataaatgaatgaataggattttagaaagtcgaaacgtgtcaaggggactgtctacatttgccactgcgtgttttaagctgcgtggagggcaaaagacgccaactcttttctctctctctctctctcaacgttgaaaatgacttagttttttgttttttaatttatttatgaaaaatctttactttctcattccttttctgcataaaaaccaaaaagaagccctgtgcttgaaaatgacagcaatacacacctttatctcgagaatgttaattagttttaactatttttagttgttgctaaatgaatgttgcccaataagtattgccttttttaatctatatatataacttgtaagcattattaacttagcctagttgagtaaagatatttaactttcaagtactaatattacactacctggcccaaaaaaatatatttattatataatgagaaagagatttctctagttagctatataagcttagcgctcaagtactatatatagtaatatcatgattgtgctgtgtaagtatagttatatataacattgccatatatatatatatattaggggtattcattggataacatctaatgttttaaagcctattcagaatattggatgttagattttaccatttcaaccgttctaatcaatttcagtcatccaatcgatccaacattcattggatgttggatttgatcggttctttctattggatgcattttaaaaatatttattgatttatgttaagtttatctaatattttagatagagtattttttgaatcagattggatccgtccaatattttaagtctagaatatattggattggattggactggactgaatctatccaattcaagaaaaaaatagtaaaattttattgttaatttttataaatacatatacattttacgtataatcatataaaatctaattacttatttaaattaaatgaaaatactaattaattcaattggatgttggatgtattagatttttggatatcccatccaccatctgattcgaatcaatttgatatttaaaaataacatccatccgatttgatcacaattagatattcaatgtttgacggtcggttctcattagattttagatcaatttatgcacacccctatatataactaagcattgatattttgcaccttaaggtgcttaatatcgagatgtcatgagcttctagtagttcccgattcatttcgaataaaaatttgtgagccatagtatattatatgtgacatatgagagagataattaaaagatttttaaataggcgtgccccttgatatttttaatttaaaaaacaaaaaaatatatatactttttttttatttatttctcattcatataagatttgatatattttgttacaaaaattactcaaatagttgaatctcaaaaattacccaccatagtccactagtacactttttaataagagaattgctattgggtaccataattggcgttacacaattatatatagtaatatttcttaaattattttttaaatatataagattctatacttaattaaatcaatactaatacaattcagaaacaagtacctagacaattgtattgcattttaacagttctcttttaataaatgagttgataattttttttggttaaaataggtaactttttctaaaaaataaaagaaattgacacatggccatggtcttaaatgggcaattatattataaagttggtataaaaagttaaaccacattatacatgtgtgaagacaactctaattaatgagcaatcagattagagatactcttagcatttctctatataactaaataattaagaaacaattaacacaaccttaattgttgaaaatataatttaaataattacttaccacagattttttttcccatagatacggtttatttagataaaaacttaataacttatatatattgcatatgatcatgatgcagtttaaactatagatgattagtgatttttttattttgagagggacaaattaattcttgtaataaattaatttatgaaatctttatataagcaggtgtaattaatagctgttttgataaaatatatctatggtcctttcagatagatacgtatgagtcatatgtgcgtaagcatattatatgtagtgaccaggctataaatacacaatatatataataaaattattatgtttaaatatgctaaaaaaattgaaggctaaagtttatttcatatatacctacgtgcattgatttgtaaatcactctaaaaataataacagcaaaaatagatttcaaaattcatatcctatggggatctcgaaattcgtactattcttgaccgtaaataatggcaaggccataacattcgctgtgtaagatttgatttcaaaacattcacatcaataaacaagtatatattgcatatcatatcagaaacattcactgaacatcgaaagtttccaataaattaataagaaaatgaagcaattaaaatcacgtaatgtaataaatatacgtgagcagtgatccagagctttatatataggaaaaagataattaagattgagtaagactatatatcagttgaaaaagatcctactatattatactttaaatagattctagatgagatttattgtgtgaatatatatatacgacgccctttttcctaattggatcaatgttcaccatttattttcagatttggttttcaaagctttgtcatccataaaaataaataaaaaataaaataaaatcctcgttaattaataatattatgttgaccattgtatgactcaattgcatgtgtacattaatagtactcagtctacttataggggctacttttgtttatatagtgtgtggccaggtacatttggattagctatagccaaacatggtcatataggcctagctaatagaaatcacaaaaattgatttgatgcgatccacgtatattgctttccatgcaggtgtacatatataaatttatatttgatcagatcgaagccacaatcactaacaaagtaactctctcaaacaattattttactctattgaaactgcattttatttatttaattatctctaacttttttattttttcattaattatttaatattatatttttaatacattttattcattaaataaaaataaaatataaatatatatataaaataaagttacaattaaaataaaatatttttaacttaataaatagtcgttgatctctatatttaactaaacacaatattcataaaggtaaaaaaatatacaaaatatatatatatatatgtatataaaaaaaaaagaacaaaaaaacgaaacaacaaaaaaaaacacaaaaatagctaaaattaagcccactcaatgaaagcccaatttctaatttttttcttaatcatatttcttaattcctttttctttgtcgctacttcttcaaattttatatcttaaggaaactgaaattaaaatttgagaaaatacacgtgctgtacgtataaaaaattatcatatctcgacttttacattttgttggttcgatttagctaattaattagcaatttgttttcctttaagattttccgcgtgaaagggttattaataactaatatgtataataacagttagtttaattatcatattttttttttgagcaagttagtttaatcatattaattagcatatagtgacattgacatatataatgagcattaatacaagacactaatataattaatgggacgtcttataattgattatatattaacaatatttataataattattaatataaattaagtgaaaccgatatcacaccaccatagtgctaccactagttacttttaacatttttcttatataattcataaaattaagtgttgaggtgaaattgatatctagtaatattgctatggggcgcactaataaggtgcctatgaaatgttgctctattaataatttacgtgtttttataattattattaaaataaaataggtggaactcaatattaaattatacaataacaatattataccatatacaaaaatactagataatatgggtgtccttcgagtattgttattagacattttatggtgcctatccagcaccgtcttaaatattttggaggttctgttctaattttaaaaattgaacactaacagaaaagaaaagagcaatttataagtaatattttttttgcatgaccaaccacaagttgttagccccttaaaaagttgggtgcacacaaaaaattcctaaaaaacattaaagaaaaaaatatattggactttttatttagctcttctagcatacttataggggaggaaattgtattttatacctactttattttatttattttaatttgtacatttatttttttattctttaagatacacccacttttatagatgatgttcctattatatgtcttaggttaatgaaaattatgtgctggacttaagtagaaagtgggagtatattaggcaaatcactcacaaaagtgggtagattttaataaaatataatatgatcgtatttttgattaatagatgcaaaaaagtgatattcctagctcaatttatctccttataagatcaattatttcctaacaccatactaatactaatatgatatattgcaaatagttaacaaatattatttattaaatcaaaatatttagaatttaatattaatttgtagcaacatcgatatgccactattatttctcaataataataagaattcaaacgacttagttaattatgttaggtaaaagtaattaataaggtcactatgatagtaatattctttgaaagtaaaaaaaaaataaaataaaataaaacagtattattattgtgcagtgtaacattctaaacatattatttagtactttttaaacgtgttatttattttgtgattagcgaataattctttttaaaaattattatatcaaactatataaaatttaatacttaattaattagacaaatattatgtatattaacacatgagagaatagtaaaccccgcttcctcttataccttttagcatttttcaaaataaaataggaaagataacaacatatgcatgagcaagggaggtgttgcagtgtaattacaataatccaatgtagaggtcaaagccatgttcggcgttcaaagccaaaaaatgtaagatcgccacgtatgaatcagtgactaagaacgcaacggccctgtaagaagctgacctcatctttcaaaccggggcccacacgccgttcacttgtaaagaaagtaacgtttcagttttcctttcctaactcatcaaaatacaaaattaaataacaattttatcttttacttttctcttttggaaatgtttatcttttcatttttaaataaataaaggtacgtagtagtatgcacacaactttttcattaaaagggttcaaaagattaaatggtaatgaaataaataaataaaaaatcgtcacaggtcgtaacggcgtgtcaccgcgccgtccggtaaatgtccaatcagtggtgtgaagaggaagcatgtatagacagaagcaattaagtcccaccaattgactcacacgtgtcacttttccacacagagtaatgttgtgatgaccggttgcttacgtttcaacagttaaattggataccttttgtttatatccatctgaccctctttttctacgtacgtaaagtttttgttataaataaaaaccttatccaacagtaaaatattagactaaatcatatttagttaaataattaatcatttaataagaaaattaaataatccactggctctttaagtcctccaaattaatatatttagccgtattaaaatcaaaataccaaagagaaagatttgtggtggtttaaatatttaccagagttgtaaattaataattctagacatacagtactcactgtactattccaaatctaaaaccgattctttatctcaaaaaataaaataaaaaacggattgtttctataaaattaaaaggaaaatcaatcacaatccatttgaaggaatatgtgtgattctgtcacataattaatacatcacatctagtcacgtgtattataatacacataaaaaaattataatagagagagagacattatttttatcttaattggtatagacgtttctactttcagtacaaaattgaaattaattatgattttgtttattttttatgtaatgatgtatatataataatatatagttataccaccacacacttcataatttttttaaaaaataaaataattgaagatgttgaaaatagagataaaataaacaaaggtatatatccttaatttctaaaaagtatataaacacgctagtatattgaacgttcttaatttaatactgtaaacataccagtaatattcaaaaattaataaaatgcatacagatgctaggtaaccaatgtcacgggaataatgcctttgtatcaagggaagggattatatgaatttatacctccttaaatcccaccttattttaattcataaacaaactaatggttcttacaaaaggaaaataataggatatatcatatatgtatatagtatgctataattataatatgcatataataaaaagaattagattttattgctacacatatatacccaaaaaaaaaattgtccttgctgtgataaggaccaaaataatgttcctaataatctaatatatatagtctttagttatatatatatatgtaatggcgtgtacgtagctttgagcaatatatatctacttatatgatcatcaccctgatcaataacttcatttttcaattactctgttgaaaggtctgttgaaatcagttctagttctttacgttatatgtattcatacatgaaataaatgaataaataaaattacggttaaattatgtttatattgtgagaaattaatattgttaaaagcattatgggtctctagttagcacttcctttagtatcatatatatgctatattattagtttaaatttgtgctcttacattatttaatttctcactaaattatttatacatacgtcaatgtatgtgtcaacatattaaatttcagctgcatcaaaatttattatttcaggtatatataatataaaagtatattatctctattattattactttgtaaatacttataataatacataattcttattataaacttatggaattttttttaatcaaaaagttatgtaaattttgaattaacaacaaggaatcaacaatacataaagatttattgaagcataaaattattcaaaaattaataatattattatatgatcaataaaaattacatttttcatttattattatataaattaaagcatcaacataataatattctatcatttcgaaggggaacaatattaaatttcaaattttttattttgtatacattgaaaaacccttttgaatttattatatttatattttaaaaaaatttaaaattctacgatatatatttatagtctgataattattttaggaaaatacatgaatataacactaaacataactaatgtcttcttttattattaatttaaaattacgagttcaatgtcatataacgtaccgctcgatcgaattcgatcaaaacaaagtaaaagatatgttaattaagtaatttgttttttcttctccttctcttaatacattcggaaacatattggtcaagattctcaagaatatgaatttgtaagatattaataaaattcatttctaatgtacattttcttaaaaaaaaaattaaaaatttaagctttattaaaattattttatatatgctaatagtttccaataagttgattatactttcaccatactttagtgttttgggcatcatttgctttagctcaataatattgtaaatattaatgtgtggtcattagttaataatatatatatggtccacttgtatggcaaaatgaagccatatttttattatataggttataataaagagataaaacatagtatagatgacagtttagtaaataagtagttgagtgtgagcctggcaattaggcttgcctacccttttgtcaacagcaatgcatacgtttgcttaatcagtttcccataattgaataagcaaatatatataatactcccaacacttccccacccgtacgtgcggtcaaaatactcaaacacaaatcgtttctttattatacttttatacatccatacattattaaacaagtcctaaaggatatatatataatatatatatgaattgtatttgcttttgcgatatttaggctgaaggaatgtgttttatattagtgactgttacctaaactagaggcattggagctatacttaatgttgttaaataaaccaattataaagagagcagatcagataatatttcaaaggaaaggagaagaaaaaaaaatggtcaatgatgaaatcttacgagctatttttcattaattattaattataaatatatatagttttatatttaaacttgcgaaaagaaaaatataattatgtatatacaacattactaggttttaatttatagggtatatattataatacatttgactggtaaatttgctgtctagatcttcctgatgatcaatgatcttaagatttatttacgtagaatattatgtaataatgcaataaagttgtatgttatacgtttttggaaaatggatcgttattatattacatgcagcaaaattgtcgtagtggggaaaataatattggttactaacttaattattaatatttagtaatgtatctatgcttgataatgttattatagtcctgctaaatgataattaataattaataatattaagcatgtttgaatgcctctccaaaaataaataaataaataaataatgcatgttaagtaatttgtaattaaatctgcgtctaaatatatgaattaatattatatttttatagtagtgagggcatgacctattggcactaaaaaaaacttatttttagttacaacaaaatttttgattaaaagtaaaaaaaattatgactaattattataaattgtcactcttacgttacaaaaaagttcgtgactaaaagtattagttacaaatcaaattttgttgtgactaaatgtgtttttagtcacacattatcacattaaaaaatattgacacaccaagtagttcataacatgtaaatttcatataagtgtaatctcaaatgatagaataaaaaactctcactaacccaaaggagcaaaagattataaaatatccatatcaacaacatgtttattaaacaacaagacacttaatcctttggttagaaa

SEQ ID NO: 36383 - DNA, 5208 bp, Cannabis sativa
tactgttgaacctcatcaatgtctcgtatgaaaattgtaaacaatttgtgaaaagaacattggaatattcttcgtgctcgagcggaacacgaagaaacttggcgtataagacaacgctaaaccaacgattttcttctatttctattgggatgggtgcattataaggtactatatggtaatagggatcaccaataatttttggagaagtcataattaagcacttacacaaataattaatttgggaaaaaaagtgtatgaaagaaaaagttaattatatctatatatagcttaattaaggcggtaaattattataaagcgatactttatcgtaagaagtatcttataacaatgctcaaaaaagtcttgtcttttgacatggtttagttgtcttcatctttttgctattctttgtttatgtattttggtgtttcatagccgttcgattacgtttctggctatcatggggtctcgacaacagtatacaggtgacttgggtagacagtatgactctatgagtttaggggaagaagatgatgagttcttgatgtatgaggagaatccagaggatgtgtttgaaatagatgatcggtggtgtctagtaggaaggttccttacggatagaaccattgattaccaagcaatgcaacataaaatggcgtcactctggcgcccagtccggggaatgtttgtgaaggagttagaccctaatagatttttatttcagttctatcatgaaatggatatcgaacgggttatggagggaagtccgtggacttttgatcgaataccattggtctttgaaaggctgaaagaaggggaagatccaagcaatgttgttcttaatcggttggagtactgggtacagttacatggtatgatttcgggcttcagatcggaacatgttatacgtgatctggggaattatattggacagtttgtgaggtcggatcctaacaacttcgctggcgtgtttagagatatgctacgggttcgtgttgctgtccgggtggatttaccgttgaagaaaggacgaaagctccaactgaagaatggcccatcatgccaagtgaaatttaaatatgaagacttatctacgttttgttttgtgtgtggtgtacttggacattcggaacgtttctgcgagaaagcttttgatacaccaccgcatcttcttacaaaaccttatggccttgaactaaaggccgctccaaggcggcgaacccacactatcggaacacggtggctaaaaactgaaatggcaacaaaacaaggtggtcaaggtgcatcaagctccggtgacatagctggcacacgaccaacgatagctgttaatcccatgattttggggagcaatatcagcgtagataatcatgggattattggaaataatctgagggaggaaaattcgggaaataatagcaacatggctataacggatagcttgggagaggatattatgggatcccgaaatgataaagggattggtgaatctgttagtaataaaaaaggaaagtcaaaagaagatgtcactgaagatgaggtggaagatgataatgtggtcattattggggatcaaaaaaggagaaggctatctttggaaagtcttaatgggcctgcaatagtggatgtggatatgggccaggataaccaatttgtaaatgaagttggtattttggacgaagacaataatagtggtattttacaaaaaaacttgaatggggcgggttctggtgtacaggcccgccaatcattatgaatgttctaagctggaattgccgtgggcttgggaactaacggacctttcaattcctaaaagagattgtatctcaaaagaagcctgactttattttcttgtgtgaaacaaagtgtttgaaaagtaggattgattgggttgggaggaatttgaattttgagggaaggttttgtgttgaggcccaaggtagagggggaggcttggccttattctggaaggaagataatttgggccgtataacaggtttttcacaaaaccacatagactttcttgttacggtggaaggacaacagaattggaggctaacaggattttatggtgaaccgaagagggagctgcgagttcgaacctggaatttgattcaggagcttcatgaaatggcgtccttaccttggtgcatcatcggagacatcaacaacgttagcggttatggcgataaaaaggggggcaacccgtacccaagaagtttggtggaaggttttcaacaagtattgtgtaattgcgatctgacggatatggatatcattgggcatcaatatacctgggagaaaaaccgagggggagcaaattgggttgaagtccgtctcgataaagcgcttgtcaactcaggttggtttcaaagttttcctaatgcacaattattcaatcttcagcattctacttcggaccacagtcctatcttgcttgttccagttgttgttaactatggcaggggcaataagcgatttcgctttgaaaacgcttggctgaaagagcccatgtgccatcaaatagttagagattgttgggaaagtagtgtggatgatggtttatttgggaaaatctctttgtgtactgagaagctttcggcctggggaaaaactatcacgggaaacttcaaaaaaagaattaatgactgcagaagagagttagattggctaaagagtagaagagacaatgattcgatccaccggtataacgaagtgaagaaacagttgctagaagtactggaacaaaaagaaatcttctggaaacaacgtgcgaaacagttctggctaaaggaaggagatcaaaatactataagttctttcacgctgcggcaaacactcgtcggaggatgaattttattcaaagattgctagatgagcaggggaactgggtagattgggagactggattagataaggttattgttgattattttaacaatctgtttagttcttccatgtcaaacccgaatggtgttcttgattgtgttgaagaggtggtaacaagtgatatgaacgctgagctctcgcaacctgtaactgaggaggaagttcgaaaggcagtgttcgatatgcatcccgataaaagcccgggacctgatggtatgaccccggctttttatcaaaagtgctggtctattgtgggtgctgatattattgatatggtgcaatggtttttctgtactggctgttttgaaaataacagtcacaaagccaatgtagtactcattccaaaaaagaaaaatccggataaaatgggggatttgagacctattgcactctgtaacgtgctttataaggtgattacaaaggtcatggcgaaccgtttgaagccactcatggacaagattgtttcggatacgcaaagcgcttttattccaggacgcctaatcacagataacatcatggtctcctttgaagtccttcattacttgaaaagaaaaagaaaagggaaggaaggatacatggcattgaaattagacatgagtaaagcttacgataggatcgaatgggagtatcttgaagcaattttgaagaagttgggtttttctgattcttggactaatcttgtgatgagctgcatcaattcggcttcttatacaatcattcatggcacacatgagatggggccgattcttccgaagcggggcattagacaaggggaccctctatctccttatattttcattatctgtgcggaggggttatctgcgcttattaaaaagtatgagggcagaggttggattcacgggtgcaaagtggctaatggggcgcctcgagtttcacacatgctattcgcagatgacagctatctctactgcaaagctacaatgtctgaagctagtcgagttttggagttactgcatctctttgaatatgcttcgggccaacaagtgaacttaggcaaatcctcaatttttttcagctccaatactgaagactcaatgcgactttcattatgtaatttcctccacatggtcatggctgatgaaaataggaaatacttgggcttaccaagcaccatgggaagaaataagaactccgtgttgggatatcttaaagatagagttcgtaaaagagtgttgaattgggattctaagtttctttcaaaagcgggaaaggagctgctcattaaaactgtggctcaggccttaccgagctatgccatgagcgtcttccttcttcccattgaggttagtagagatatggagcaaaatatggcaaagttctggtggaaatcgtctaattcaaaagataaaggcatacattggatgagttgggataagttgtgcaagcataaaagtgtgggaggcatgagttttaggagccttagagatcataacattgcacttcttggtaaacaagggtggagattactagtcaggcctaattctctagtttccaaaattttcaaagctcgatattttccacgaggaacctatcttacagcaccgctaggaaacaacccgagttttgtgtggagaagtatatgggaggctcaaagtgtggtgaagcaaggagctcgaaggagggttggggatgggaaagatctagctattatgggagaaccgtggctgcctattgaagaaaatcccttcatctcaaccattaatcacattcttaataattccatggtggatagcctcatgcacccagggggcggttcttggaatgttgatctgctctcttctttgttcaatgacagagacaaagatgccatactaagtattccacttagtgaaaactcatctgacagctcctattactggttttttgaaagagatggttcttactctgtcaagagctcatataatttgttgcaaaagttgaatggcttttggtatgttgctgaaacttcagacttttggaatgaactgtggagactgaaaattcccccgaaaatcaaaaatctgatgtggcgaagctgtgtaaattgccttcctacgatggttatgctcttaacgaagaaggtggctgtcaatagactctgtccactctgcggtatgcatgatgaaacaactttacacttgctagtttcatgtcctttggcaaaacaatgttggacactagcaggagttcaaactaatactactgcagacatgagttttttagactggtgcgtggcttcttttaaggttgttaatggcgaaaagcgcgacctaatcgcaactctgtgctgggcgatatggggggctaggaatgataagg

SEQ ID NO: 36384 - DNA, 7729 bp, Cannabis sativa
gcacttagtgcggattggatgttgtttgaccaaaaaagtacggattggatcggatgaacacccctaccaaagattgaaagaatctcacaaagcatctccggctccccacccgacccgacccgacccgaacaaaaacgggtctctgtgcaccctaaattcactccttctcttctcttcaaattacttctccggtggtctaatggtctcttactgtttgtgctcacaattcacaagtaagtctccaactccaacactctctctatatatgtgaatatctcacttgaattgaattgaattcaattgaactgaaaccatgaccattttcatatttttatcttgatttgtttcaatttaaagctacctctttttgtttgataattaagtgcacaaagcaaaatgactgaacatatttatttacattgatgaaattattatgataatgggatttacaggcatcaattacatttaattcattcatgcccttcccactgccactgatttagttgaagaagatagctatgagtctttacatgcccttattcaggtcctgcaccaccataagaacacttgtccaacttcatgcccacctctttgtttctggtctacacaaagacccacaagcttcaaccaagctaattcagtcctatgctcaaatgggttcccttcaatcctccaaacaagtctttcaaaccttccccaacccagattttttcatgtggggtgtgcttattaaatgctatgtatggaaccacttatttaaagaagccattgctttgtaccataaaatgttgtaccttagaatccatgtcaatagatttatattcccctcagttttaagagccttttccagttttggtgatgtggactgtggtggtaagctccatgggagagcaatcaaatgtggatttgataatgatggtattgttcagacttcgttgctccttatgtatggggactttgggtgcttagataatgctcggaaggtgtttgatgcaatgtcggtgagagatttagttgcgtggagtgccatgattgaatcttgcgtggagaacggaatggcaaatgaagccttggacttgttttgttggatggtgtttgaaggtgttaacccggattcggtcacaatgcttagtgtggttgatgcttgtggtgatttgcggtcttcaaggctagtcaaatcggtccatggttacattgtgagaaggaacatgaaaactgatgggtccttggatagttctctaattaccatgtatggcaaatgtggagatttacatggtgcagagattcttttccgaaatgttactcatccaactacttcttcttggactgcaatgctttcctgctataatcaatctggttgcttctacaaagctattgatattttcgtgaaaatgcagttgatgatagttgagccgaattcagtaaccatgatgagtgttctacgttcttgtgccaatttaggtctgctcaaagaagggaaatcaatccattgctttgctattagaaaagctgtagactttgatattctaaagccaacattactagagttatatgctgattgcaggagactaagtgactgtgagaagattcttcttacaactggggagaagaatattgtgcagtggaatacacttatttcgattcttgctcgcaagggtcttttggaggaggcattattagtttttaaacagatgataacagaaggactaatgccagactcgtatagccttgcaagttccctctcagcttgtggaaatgtgggccaattacatcttggacatcagatacatagtcatatcttaaaaagaagctattttgacgagtttgtccagaattcgttaattgacatgtactgcaaatgtggtattatggattcatcatacaaggtatttgataaacttaaacagaaaagtgtagtggcatggaattgtatgatctgtggattttcccagaacggttactcatatgaagcaatcagtctttttgatcaaatgtactttgaccgtcttcaaatgaatgaagtgactttcttgttagtaatccaagcttgctccgaatcaggttacttagaaaaggggaaatggcttcaccacaagctcataacatgtggtatgaaccaagatacgtatattggtactgctctaactgacatgtatgctaagtgcggggacctcaaaactgctcgcagagtttttgatagcatctccgaaaggagtattgtgtcatggagcgtcatgattgccgggtatggcatgcatggtgagatcaatgaggccataacactctttgatcagatgatggaatcgggaattaaaccgaatgatgttacatttatgaatgttttatcagcttgcagtcatgcaggctctgtcgaacaaggaaaactatatttcaagatgatgaaaaatttcggtattgagccaaacactgagcattttgcttgtatggtcgatcttatgagtcgagctggtgatctttatggagcatatggtgttatcaagtccatgccagtgtttgtggaagctagcatctggagttccttgcttaatggttgtcgaattcaccaaagaatggatatgcttaataatattcaaaaagacatttcggacataagtagtgatgatcctggatactatactttgttatctaacatatatgctgaagaaggaaactgggatgaatttgggaaggtgagatcaaggatgaaacatattggcctgaagaagattccgggatacagtacaattgagcttgaaaacagaacttatcgatttggagctggagatgttcctcatccagacatcaaggaaatctgtagttttttagacaacttcaagtgtctggcacagggacaagattttgtagcatagaatacaatggcacatcatcttacatttacatattctcttaggacaatatagctatgaagtttttaaagctgcctaatacattccagcaataaaccattcacatactcgaaaccttcacgctctgaagcttttctctaccttgactgccaccgcctgaagattgcaacccctgagattttttctttctttctcctatatagagtccggatcagatctaacccctccttcctcctctagcagcccacttatccatgtatttttttttgttttcagtctctctctctctgttaaattgttaataacttagtaatgcattgttgctgtttgtaatgtgtatatctggtttggaatcaaaatagggtagaattttgtttttgttgttaaaaaatggcatgattgaaaaaaaagagagaaaaaaacatggaaacatatatcacatccttgaatgaaatggttattttattacataagaaaatcctcaataataatacagtactattgatactttatgagttgtgtttccttaattaaactagataggtcctgatctcatgtattcaaatataagatgatactaataatcatttgattgttttctctactaggattattcttctcattctgaagatgtcaaagtatttaaagatgttaaatcattacatgaagaataaagattgttgtaagttttttgtttctctagctattaattttcttcttctttttcatgtatcaattgttctaatatcagtccttatcttaatttaaggatcattctttaaacctcatattcagaaccattatagtcttttatttgttctttgcataattgtcagtgtatcattaaagctaaagaaacaaaagtcactctcaaccaagttggccagcattgttttctttgtttgatcaaaatatttggttattctagtcttgttgagatttaagagaataagaagctaagctagaattgttaagtatttaacattgatgtgtggagactgtttgttgttttttttaattttatatatatttactaattgttgcagaaaattttgaaaaaggagagaagaaataagagtatgaagaagcttggctttgctttatgcttgaacatattcaacctcaacaatggaggtgtattccaaaggaggactctcactaattcaacatattcagaactgcctcagttttctcaaaccatagcttcggtacagtccatcttctccaatccctatttttctcttctgggtatctgcagaaacattgactccctcaagaaaattcatgctttgctcatattaaatggcttaaccgaagatattatatgcaacaataaattggttagtttgtatggttcctttgggtatattcgatatgcacgacaactcttcaatcaaatgcctaacccggatttttattcatggaaagcgatgcttaggtggtatttcttgaatgagttttattttgaggttttaaggtttcataatcacatgagaccgcgcgtgaaagagaatgataatattgttttctcgatcgtgttgaaggcatgcagtgagttgcgtaatgttgaagaagggaggaaggtgcattgcctaattgagaaggcgggaaatcctgatagctttgtgttgacgggattggttgatatgtatgcgcgatgtggatggattgagaattctcgagctgttttcgatggaattcttgatcgaaatgtggtctcttggactacaatgattgtcgggtatgtgcagaatgactgtgccaaagaaggtttggctttgtttaataggatgagagagggttttgttgaatgcaatgaggtcacattagggagcttaatcaaagcctgtacgaaaataggatctttgcatcaaggaaaatggtttcatggatatgttagtaaaagcggctttgaacttaattatgtcttaggtacagctcttctagacatgtacgtcaagtgtgacagcattggagatgctcgttgtgtgtttgatgagctatcaacagttgaccttgtgtcatggacggcaatgattgtcggctactgtcagactggtcatccggacaaggctttgaatttatttactaacagtaaatgggttggttttcaaccaaattcaatcaccacagccagtttgctttcatcatgtgcacagttgagtaatttgagtttggggatggcaattcatggtcttggggttaaacttggtttggaagactcgatagttagaaatgctctggtggacatgtatgcaaaatgccatatgctcggtgatgcccgttatgtctttgaaatggttttggacaagaatgtgatagcatggaattcaatcatttctggatactcgcaaaatcggtatgcatacaaagctcttcaaatgttccatcgaatgagatcagagtcatttgtgcccgatgctatcacactagtcagtgtcctttcagcttgtgctttccttggttatcttcgagttggttcatcgctccacgcttactctataaagaggggcttaatgacaaacaatgtggttgtggggactgcactgctgaacttttacgccaaatctggggacactgaatctgcacgtatagttttcgatggaatggaagagaagaatagtataacttggagcacaatggttgatggttatgggatacaaggcgacaacaatgaatgttttacactcttcgatgaaatgttgaagaacgatattcaacccgatgaagaaaccttcacaactattctatcagcatgtagtcattcaggaaaggttcaggagggttggaggtatttcaatctaatgtgtcaacactataagtttgtgccttccatgaagcattacacatgtatggtcgatatgttggctcgtgatggaaaacttgaggaggccatggagttcattaaaaatttacccgttcaaccagatgtgagtttgttgggagcttttcttcatggatgtgaattctattcgaggttagatcttggagaaatcgttatcaggaaaatgctggagctcaaccctcagaaggcttgttattatgtgctcatgtctaacctttatgcctcggttggaaggtggagtgaggttaatcaggtgagagagatgttgaaggagagaggattcagtaagtgtcctgcgagtagcatggtggagatgaataatgatatttcggttgcaagagtggcatgttttgcttagttatgtggtctcttttcgggatgagatcctcacacgacacaaggacatttcggcgaggcatgagataagacttcaatcactcagagttggattgatgaattgagaaagacaatgtactataaatagtgttgggtagagtggacagaatcactgtgaagacctgtagagtagacaccctcaaagaccgttcatatgcgtagaaaatattggcatatgagatgagatgatatgattttgtgaaaagcagtcatattgtgctaatgaaaagactccaaatatgtactgttatattctgccctttcggaagcttggtgttttgcgttttattatacataaaagtaaggaatctgaactattataatgtttttcccttatcacaagtatgatattatggatacttttttttgagactctttctttctgttttaagggccacatggcaccgtcttcatctgattctggcttatctgggaatatcataattgatttctattgggcaagtgtgattcttcagtgatttctgtttttctattaactaaagttgggatgtagtaaattaggagaaaactgtgatgggtaaagattaagaaggtgcatgcatattcaggaatgttgatgccatgttccgatataacttcatctaagtttactcaataggataggttttttggagtgtgacattctttgtaagcatattgaactgtctaaatactaattataaatagcaatagttcattgcttgatttattcatttgtctcttctttaatttaaaatcaagaataaaattagcactagtcttggcaccaactgtcaaaatgactttgagtggaattgtggtggtggtggtggttgttaagtttttttcattgtcatttttactatttcaatttgctggagaatatgagccttgtagcatcttaagctctgctggattaccaactatatgtaattgttgtcattattgaaaacttcccgaaccataactacctgacacctttctttgactttcactccttgttaatatccttttaaatttaattgcctttctgcagggtatggaactctatcatcgcattggtaaaaactttgacattaaagtttttacaaattccagattcggaatgatgtcttgggcagttttagttgtaacctattgcataaagtaggtagcgtctatgaatggtgcctatttatgtcagtaattattcatcactttgtttatgtctagtgttggttgatgtaccaatatgttttagggccaaaagtttgttggcttacaatttgaaatatgtgggagcgagtagtcatctgatattgtgatcttatactgctaaaattttattgctttgcaacaaaatctctacaatccatttccagtggccgatcattttccctcttgttcaaggattgtttctctgtataatttatttggtcaaaaagaacatttaatcttactttactgagtgcctgtgcagttggtttggtggttatttcttacctctaaatcagactcgaccttcctgtttaaaactttcacaatcagattgctatatggacacactgtacgtttcttttgctagtatttaacttatttcttttttctttttttccagtatgaagtgaatggtaaagttgctgattcgatgcttgttaatact

SEQ ID NO: 36385 - DNA, 7217 bp, Cannabis sativa
tttttgctagtttgctttccaattttcctaaggcatccctagttcatgttcgtttttaatgaattagttgtgcatgcacttaggatggatggtgaaatagcttagattgaagattattctttttttttatatgtattaaactcttggttgttgctaataataagagtttaattttaaaaaaaataaataaataaataaaataaactgagacacggaaactagaaagactccgaaagactaatggagaaatataaggcaaaagctaaagcaatgtgacaattttgtactttctaatcatatgacataataatatgtacaacgatttctctacaataatctcattcccaaaaactacattctgcactgtgtcgacgactgactagccaaaaacatcatcaacacaagccactccttttttccctttctattctcatcttttttctatatccaaagcccatcttaaaatcctgtctaagctaacaaataacttcctactgaaaccaacaatggacggtctcaatttcattaccacttcaagtactactatacctatgtacatatttgagaagaaatcagaaggggtcagaaagaaggctacaatcagggaaagaaagattagagattaggactatacaaaattgtgctgaggatgaccactggacatggggttactcgaaccaaaaggaaatgcccctgtagtaccgaagctaggcatgttggagaattgcggaaaatttgagcattcggtatttgagaaactatgattggagttcaacataccagaaccttgttccattgggctaaatccgaacaaacatcgggctgtgccgaggtgattcaccatcctaccttgcctactcaaagtattattccatcctacctgtgtcagataacatatacaaaatgtacgtggtaattaatgttgtgaaatgttataattacattttcatcacaaatagaagaaatcgagtaaaagaccaccaattacttaatatggatcaaatatgcaatttagtgcaagtaaactcgccaaagtctatccaattcaataacagaaatatgtccctttaacaagcggatcgttctcaaaaggatgagttgaatcgtttttccttaaaaagaagagaatattactacccactgtctaaaacataataggacaaagtatgtaataatagcaataatatactttaggcacttgtaccttttgctgctcgccagaattagcagatatgcaactttcaccataaggtaaagaacgaactctcatctctggacatgagcttcgcaaatcttgagaaggtttatcaggactactaatccatgaattttgcctgccacaaacccaatgctcagtactcttcctcagtctcatatatgccgatggggagtgatcatgagagaccaagaaggagtagtcatgacgctcttctctacaaaaagcacgaggtgattccctacattgcttgggaaacgactgcgagccagaatcttgatattgatcaaatatgcaagatgatctagaatatgaatggcctacgtcaaaatatccagatggagaaattctaccaaaacctaaatcaggtgactgattactagctaaatgtccaagatttggtgtcattgtccaatcttctattgttattccacgcttggcagcaaggtccaatatccgtctttcatcaagccccaaccccatgagcaagtcccacatgttccttaccatttccctttgattgtggatgacttgatccctcattgccatttcaaattgaagttctgtattggtcattccctgagaaatgaaagtcaggaaaaatgtaactaaacacgtgtaacccagacaagttatggccatgcaatctttagcatgataactaaatgacggtataacataaagtaaatctcatgccaagaacacctgtaagatcaggttcttaaaaaagattttaaactgtaaatattctaacttaagtaatttactaaaaataaataaataaaagccctattttactccaacacgataactgcataatttgcagaagcatatcaccaatcaaaaaaatcaaagcagattttatacagttataaacatgtaatgcttaccaatagcctgtactgactaagaatccgcaagtatgttttatttccattattactaatggcctcttcaatcatatcttgaagttgacaccgatgcttctcgttggactcaatttcctatagacagtgaactttgctgtaagatgtgaaactgtcaaaagttcataactctatgacttgagatacaatcttgatacattaccttctggtagttaacaccagcttcatcattttcacggatgttgtctagaatgacttgtctcctcgctctcagagcctcaacaactgatccttccttttcaatagcctatgagaaacgaaaaagttaaattgcatacatagttatccaaaaaaaaatatatatttttcctaacagttctcaaatgatacaatcagtgcctttcccatcctcctcacccatccttatgaattataatcattttttttggaagaaaagaaaaattatgttcaataatattaacttctctagcgaaagcaactccagagatcatccaaattaaaaattgtactaaacttggccatggtattcaaaagaagaataacaatctgacaaatacacaacataatcattacctgttgcttcgcaatagcatcatcaagatgttggagttctgtccggttacgcaggttggtttcctcaagttcaaatagtgccttttgtaagtttatcctttcttgaacattttcactggtctgatgactcaaggtatttaaccaggatagctcatcatcaacagctttctcagcaggtttgatgtttagctgggagtctttttcagctaattctttcttcaatcgacaaacctcaatctgtacacctaacaatgtcaatacaacaaaagtggaactctatgctgaaactcttcagacaaaaaaaaaaataaagcttacctgaagactgtcaatcatcctctgatagtctgagacatgagtatcgattgtaccaatatttttctgtgaacaaaaccataaccatctcaaagtttacataagttaaagaagaacgatttcttgttaatggtagcagttcagcttcagatggtggtaaacaaaaagtggacaattttgcctgatttagataaaatcaagcaaaactggaaaaccacccataacaatatacattagcaaccaacagaaagcaaagtgtaccatagaaacacaactagttaagagccagcccccgtgtcagtaataccaagtaacaatggcaatcaaagattaatgaaaatcaacacaacatctataataaaatcaataccaaaatcaactcttcgagaatatcatgtaaatgttgaattatttggaatacataacaccgctcaagaaatttcacctgtatgtgtgtctttatttccttagctcgatcagcatatttcaaggtattcacagtgtggtgatactgaccgtctgcaggggatattgtagcaaccatgacagtttgagagttaccactaagaccatctttaagtattcgtgtaagtttgctgcagaaccatttagatcagccactgtagcaagaatttcatacagctagaaatttctaattaccaatacccacctatttctgtaaggaacataagcaaggcctttcttgtgctgtttccccaaagcattgatgcagtttgctaatgcaagaagcgaacggtttatattagctccatcacgtaatttctggcctccgttatttgtttcagaagctctttcactgccagcaagatccacaagtgctagttttccccgcattacttgattccgatacttgttcctctgttttcttttaacagttatctccagaacagcatgagacctagttaaaaacaaaaccatttcatgaagcagctaaattaatttattcattaaattgaaagcaagaaagaggtactggggctggagaggatgctacaacaaggtgtactttgggggcaagtaggataatgagttttagtcccaacttccaataaaagtggaatagacatatatacatggaaagagaagcaaaaatcgtttggaaatagtaataaccatggagacatgctcatactaggtaaggaaatgtaactcaccgggaggatgttgcattagcctctgtgttttcagttttccttcgactattccccaagttcaaaagttcaagaatcctatcagctgagtgaacctgaatcagaagcacaattcataaacaactagtaattaccctcattatataaattgacgcacaagctttttagatatcaaaaaaaaaaaaaaacaaaccttaatacatctcagcccagccacagttatgccttgttctggatcctccctcaattccagatgaccagatgacttttcaagtaaatcatagataacctaaattcatcagaacaaagattaaaaaatgtgtatatataggataggaaaagtactgtagcatagtatattttagtacaaagccacaccatacttcattatagacttcaagataggaacaggtaacttcaaactcatcagaactcttatccctttggattaaatcaaaaattctgtgcagactaagaaccataagtccaggatcatctttggttccaaccatagtgtaggttttaccgctgaaaaaatttagacacgatttatatattaaattcatagatgaaaaattatagatagacaatgcaaataacaaagagtagtattatgataatgcgaggtgattgcaaaatggttgaggaaaaaggaaatgattattttcaatttttcattagtacttgtgatctcagttttcataatttagccaaacttgtggaatgtcaaggattttagagaatccacctcatcaccatttaaatactttatgaaggtgaccttaattatatagtctcaattttcgtatttagttgaacttatgccacatccaatatttaaaataatacaaaggtaatctatttatagaaaggaattgttattatcgtcagcacacaagattttaggagcaaataatacagcaagtatggatctaagaaaacaataacagcagaaacaactggcaactactaataacactaaatgagacatgagcaagcaagctccactttaagttcaacgataaaaaaagctaaagataccttccagttgaaccatatgcaaagacggttgcattgagaccttgaacaaccccagatatcacagaagatatgcttttcatataaacatcctgcataaaacaatagttattgcacaaattactagctgcttatcaagtatcattcatttccttggatatcctcaaagtattaaagcaacaatagtacaaaaccattatttcattcatcagctgttaattatgtgagccgtgatgagttgcttttactaaaattgcatcatgtgtctgtttatttagagcattagtagctaatataaaaattatcttgccctgctatatgcagtacgcgtcgtaattagcacaaatgtataaacctaacataacttcaaacactacataaatagaactagcaacgttctttaagttggctcaatatgtcgtacaatatgtcatgatcaaacaaatcaaaaaatattcagtgctaagtaccagatttgtggaatcaggaccaaatgcataatcaaaactatatttcttttcctttgttcgattttgtatgcgttcaaggtagcatttagacaagtcaggatccaaaacaagcagctcctagaaaacaaacaaaacatcatcatcatcaatatatcaatccaaaaagaaataaatgaaatgaaatctcaaactatcaatgaataatgatccaaaaaaccacaaaaccttctcgtcaataactctaacgatgtcgcgaccatgctctctctcggccaatggcctgcattttacggcaacctataaataggaaaaaagaaatgatcagagagactcaaagtaagtactcacgcgaaggaagaaaacaaatgcaattgcagaactcgacaacatatatacatatataagtacttacagtgagagttgtagctttctttgtagcaggggctctaatgctcggcatttttaatcaacatcgatttctttgctttttcagtaagaaacaaagaaagaaagaaaaaattcaagactaggtgctgaaaactcgaaaatcacattgcaactcagaaatcaaaaacgtaatccagaataagagattttctcgcgaaccaaacagaaaaacggaaactaagacacaaatttcttctaaccataaaaaaaatgaaagggtatggacgagtggccggcattccaggcttacacaaacttaaaagtaataaataaataagggaagacaataatttcccatcctagtaataaaattaataatgcgcgaaaatattggagaaaatttgtgagaacccgtccattttattttcatcaaaataataataataaataataaattaaaaataaatgattaaatacgtacatgagtcatgagagttgagatgagagagaggtttatgcttagttggcatatagaaagaggaaatgattctgtggtttatggtataacgtcctactgtgtcaataaatgatcaattaagtgaaagatcgtgacggtcggcttaactggtagaggttagttttggtattttacaatatttgtagggactgaaccggaagttcattcattactagtactactgcttaggtcgtgatctgatctgaaatgaaacttttgagctttgtttgagttgagacattattaattttttattttatttactttttattgtctttatactctttaaattttcatttgtaacggctagccagtgcccaggggtctgtgagtgctctggggcctttaaccgaggtttaggtgcacgcgtcacacgtgtgtggtaaaataaagtttatgaatattggtgaaataattatcatagtataataatattaatagaccttgggttaacaatcaatttttgtttcgagttgtttgtccatttctatgtctagatgtctaattaatatacatataaagaatttttaattaaaaaaaatgcatgtgtagatactgtgattctttttaatttttatgttagttttttagtgtaacataatatgatttaaagaaatatgt

SEQ ID NO: 36386 - DNA, 3492 bp, Cannabis sativa
aaatacaatttatacttgcgttaactagtacagatatatcttttaagtgataaaatatggaaataaataccagcaaatagtacatagttattttagctaaatcatttactacagacattaatttctttactatttttattagagtgattttttttgtttttttgataagtgaaattaacaatacagcatattatttcattaaaaaaaaaaaaaaaaagctaaagcatattattattattattattattattaattacacagaaaaaaaaaacaaatggggaataatataaggcatgaaaatatatctctctatacctttactataaatgtatggataactactacaattcaaacagcaaaaataaacatgaagactggaagttcctcttacccacaccatttctcacttaatattttatctttcataacattaataatcttcttagtatcccaaccagccccggcgactggtcttccactgaccacaaattcaagatggattgtggaggagatgagcgggaagagagtgaaactctcctgcgtgaattgggtttctcatctagagcttgtactggctgaaggcctaaacaagcagcccatagaagccatcgttggccgaatttcctcaatggggtttaactgtgttcgtctcacttggccagtctacttggccaccaacaactcacttgcttctctcacagttcgacagtcctttcaaagatacggtctttatgaagctatagctggtattgaggcaaataatccctccatcatcgatattcccctcatcaaagcctaccaggtacgtactatatatatatacgttaaaaattataaatacttattgtgtaatttgtgtatatgttatgtatagggagttgtatctgagcttggaaaagggaaggtgatggtgatattggacaatcatgtaagcaaacccagttggtgttgtaacaataaaagtgacgggaatgggttctttggggaggagtacttcgacccagatttgtggattgatgggcttactcgtatggccacattgttcaaaggtgacactaatgtagtgggcatgagcttgaggaacgagctgcgtggtcccaggcagaatgaagacgattggtacaagtaagtaaccgctgcttcatagtctcatcactccatatatatttgtgtctataataaaataatgtcatttaatttgcaaatcaaatctaatatagtgaaaaataaagagaaaatatgttatttatatgcgtaataaaaattaaaaaaaattcaacggctacaaataaatataaatgcattttggaaactactgtataattgaaatatttgtatataattagaagtaattatatgatttgataggtttgttagactatataattacatttgtaattgaaggtttcaattagagtctccaattctcatggaaaattaagagtaattacatcatgtgattactaaaatattttattttaaatatcaactactgaaattattattttatgtataattaccaattagtttgtcaaataatattttagaaatttatatataattaattactattttatattcaaacacatctaattatattacatagtaattatactgcctactacttatacaattatttttaaacacaccctaaataaattaattaaagagatagaaaagaaaattgaaatgaaaatatggatctctctaatggaattatgaatttattttttattttttggtatattattcatacataataaaataaatgttacaagtgggaaaggaataatgtgcataactttgaaaaatctcatctcctatatcacctgcctaaaattgtgtctcaatttttgtctatcttatgacaattccacacttgtaatactcatttaatacattgactttaattacaaaacgagcactaatttatatccgtgcaatatatatgttaattaagtttcatatatatatgtcctttttcacatttaaagataagatatccttataaattaaaagaaaaaaaaaataaatacaaatatggtgaccacttaattctttttgttttttttcttttttaaggggtgagcaccacttaattctaaatcataataatgtgtatatatctaattaaaaagattacccatatcaatgcatttgtcacttattatttcttcttattcccatttactttttcaaacttttttcttcttcttttaattctttcatcccaaccaaacatagctttaacatttcatcttaacattattatgatataggtacatgcaaaaaggagccgaggcagttcactcagcaaacccacacgttcttgtaattatttcgggtttaaattacgacacccacttgtcattcctacgcaatcgaccattcgagctcacattctctgggaaactagtctttgaagttcactggtattcattcgtagattccaaggcatgggaaagtgaaaatgcaaacaaagtgtgtggtttggtgggtaataacatgaaaagagaatctggatttctggtaaagaaagggtttcctttgttttttagtgagtttggagtggatcaaagggggaccaatgagaatgacaacaggtacttgaattgcgccttagctgtagcagctgaattggacttggattgggctttgtggactttgggaggtagttactactatagagaaggtgttgttggattaaatgagtattatgctgtcttaaactataatttcgatggaatcagaaatgcaactcttttacacaaaattatttctctcacatactcatttcaaggtacgttattctaagttactctatttatatatatattatttctattaaaactccccaaactattaactatagtatactaaaatataagattcttgttaaattttatcccatataacttaaacaagctcatgtggcggatatgtcattgctacatcaacgtgacatgtgcaatttattatttaaatttttttatttttttattagctatctataaataaatataaactaattttatttttttttcttattaaatttttatgagaaaaggaatttcttaaagtttaaattatttatacacatatagcacttatgtagcatgacaaattaaacttataatttccaataactaattcatgaatttttattttatatttttaacacagtgaacttataattttatttgtgctagctagtgtatgaaaaattaataattttatggtaggtggtactgtggtagccatatgtatgcatagtatatattttattttctttataatggtttttagcacatacgaataatattattaagcacaacattaacataaataaaataaaattaaaaaaaaaaaaaacaatgtaatttctaccatgagaatttaataatgatgtggggtcttgctttaataataatgcatgttatttataattaaaatggttcaaaacattactataatattgatatgaaaatttgc

SEQ ID NO: 36387 - DNA, 4660 bp, Cannabis sativa
ttttgatggactaatttgaactaatgatatacataaattatgtatcgaagtattatacataatataatgatatttattgaaaaaaaaagtgacgtcatatccttactctttatataagaatattaaagattattactagcaaataacccatatgaacaaaatcaattaccccaatattcttattcctatgtttttctctagcacctcaaacaaaagcttgcaaagtcttgaaataaacaacttgaggaatcaaatggcttattattatgcccaaaaaaagatcaaagactttattagtcaaacatggaaaagatattctacctatggaattttcattcatagcttagcatcatattattatatatataattttttgaaccaaacgagtagtaacaacaaacatgagggtccctcattgtggttaaaaaaaagggtgggacaaagggttacatgcatagcatgcactcgattgatcatgagtggtttccccatgtgctatggggattgagagtaacctctctctctcaacctctcaatcacctctgtctccctcctaaaatgtatatacttctttttttttctttggtacatttgagattttgagttgtgattcgattcaacctttaatggaccaaacatggtactagatttctaaacccatgtgatagtaatgtatacatataaaagtagcaaaacgttaaaagaggaatttttggttgtatatgtaatgtatatttatatatattcatgaaaaacaaagctcaaaatttcttgagtattgttctaatgtcgcattttgtttttaaccttgtttttcctttgcattgagacaagaaggtttttttttattaatcttaccatataaagatttaatggctcgtttagtaacatcatgttgtattgtattatgttttagtattatttaatataatattatgtttagtattaaataaatcccgaccctaaactcaaattccatctccagtcctatgtcacaaaccccggtctgaacctagaccccaacctcgaacctgggtccaaggtctggggcgatgaaattttcatatctttcttaaggttttgttactaatttatttttattaatgtaatttgtaaataattttttggggcgaataagaaagcaatatgatgttttttcaattaaaacattaattaaataaagttttattgtagctttttcacttttacagacaaaaaaaaatactcattttataataaataatttatttactaattgagtaggatagaattggacatctttaaatatttacctatactcatttacacatcaaagttgtacttttacatattataataaaccttattagattcgagtattatcatgtttgttattataaggtactcacaaaagtacatgcaaaattttcattcttaataccattagaaacttaacaagttttaccttagcttgcatattattcgagaaagagaaaaaaaaaaccataaataagatcaccaaatttatgagttccccaacataagaaacaactttgccaatattgttagttgagaagtcctttagttatgcacaagggttttcacttggtggtggtgccataattattgacctacaatgtgatggtgtggactgtcaacataataatttacccagtcaatcttaaaaaagaaataaccattaaacttagaaagaacaatagaggcttataataataaccataataatagtcttttatgagacaatatatgtagatggagtggagataagtgatgagtagtagtagtagtagtagtgattaactagctaactctgtgtatctgtatattgtactgaaccccatttaaggctttgatgtgggattaaattgttaggtgtaggaagctgaattgggagagaaaacacttaactggttgttgcagatagatagatagattgggaaagataaagcaaagtatgtctaaagttgtttctctctctcttttttttactcatgaattatttctattttactaaagttgcttttgcttgtctatgttagttatatcaatctctctctagtgttttagtctttctctttcttatctcaatctcattcctttattcacgctgctctcattttatagtgtcatcactttttttctcttccatctaaaacaaaaaagaaaaaaccaaaactttcccatttctcctaagtccattcccattcccattttctagaacaaaacaataaaaaccaagtatccaagagaaagaagaagaaaaaatgtctgaattttctatgtcaagaagaggcaagagaagtaatggtttgcctagttttcttctttatgatctcttaaaattttgtttctttgctctttcacaccctttatacttctcttacttcattttcttctcaccatatcttttcaaggttttttcttttctttcaccacttttcatcaccacaactcttctcctacttgctttcatcactactctctctcccggttttgtcaaagatgatggtgatgatgatgatgatgagttgtcacaatacaaggttggttatcttactttcacttaccaaactgttttggagaaattaaggtctaaagttgaagacaatgaagaagaatttcagcattttgaggagcttaatgaagttttcaaaattgtgtttgacacatcatcaacattggaaagtgttggagagaatattcctgctgatcttttggaggaagttgttaaagaaacttgcttagaggcttatgaaactcctgtggacaagtgttcaattcttgagtacaatgcttccgagtcaaaaaaagaagacaaagaagaagaagaagaagaagaagatgatgattttgttgatttcgagaaaaacccggttgagattactcaaatggagatcaaacaaccaagtttggaagcagagtgtactctgaaatggtgtttggaagaagagaaagtgttggaaaatatgtcacacaaaaaggaagacactaataaagaagaaaaagaagaagtgttcacaagaatggaatccaaggacattaaagtggatactaaagtaagtactattactactactaataactcttttgcaggtcttggtgactataatcaaaatgatcaatctaataacatggtagaagatcaagaggaggaggatgaggaggatgattctcaaacaatggcttcaaatcttggaagttttggttcattgaggagagaaaaagagtggagaagaacattagcttgtaaactctttgaggagagacatcatcacaatgtggatggaggagaaggaatggatatgctttgggagacatatgaggctgaatcagacaagcatgttaaggccactaacaaaaataccattaagaaaggaaagaaaggtgtaattgagtacaatcatgaagatgatgatgatgatgattttgatgatgagactaatgggcaattatgttgtttacaagccttgaaattctcagctgggaaaatgaatttaggtatgggaagacctaatcttcttaagatttctaaggcattgaaaggaatgggatggttgcaccatgttactaggcatggtaagaagaggagcaattgagtcaccaaaaaaaaaaaaatcacttttttactttttttttttcctttgttatgtttaaaccagataaatggcattgcaaaatgtgtatcttggttgaatattatgagtaaatatgtctcttttctcttagtctctataagattattttcttttttgttcttgtttataacacaataaagaataataaaccatgcttagttaagtgctcgtgaagagtttgattcaagagaaggccaataaattagcaccactatgaagtggtattttataattggttgacaattttttataatttttaatttagtaaaatatgtgtgactcatattaaattacaccaataataatattacacattacaaaaaaaaagtatggtgtcctttaacatttctccactatcaaattatagtataccctaattttttaaaacaataaacttaaattaattttaaaaaaccactcataatattttgttaaatttttatttttatattgttttgtgttaaatttaataattactttattttatttttatgttttttaaaagattatatataatattttgaataaaattttatataatttttttattttaattatttcatatctatattttttaaagaatataagagagaagaaaaaatttaaaaaaatagtgtaaataaaaaatgtatatttttatataaataaaaattattaaataagatgattttataaatttgatgcaaaatgcaaataaaacaccccataaattaataataataaaaatataaaagtggttaataaataaagtaagcatgcagtgtggaataatggcatttgttgtgggggccacacagtaaagggatcacgtgacatgcatgctctcctttgaccaatcacatacacaaacaaaaccctaacttaagagagacgcggtgtgtgacattattttcccaaaacattattacatatatttatatttaagtttctcatagtcatagcatgtggtgtggtatttaagtgggaagaaaagattagagatatttgcatgtactactattaattcagatattaaatattttaat

SEQ ID NO: 36388 - DNA, 9357 bp, Cannabis sativa
aagtggttatagaacgcatttttgtttttaaaaaattttactttcattttgtgattaaaaaaaagtgttaccaaacggcaccttattgttttcatgtacctaaattaaacataaataagacaaaacagaaaataaaagatttgaagatgcaaaacctctagatggattgaaagtaaaccgggccatccatgtgagatgatttgctgtgaatctgaaaaaacatggggagggggtgatgatagtaagtaaattttgtattactctaaagatttggtgtttcaaaatttctttagaaatacacccacaagacaatgaagcagcgcaaaattgttttatgtatgtgtccagactctcttgggaatcccaagctgtgtaatcttggttttcctctacttactcaggttttaataaacttatggataatggtctgtctatgacatatgaccttgtccctttttcaaaaaaaaaaaaaaaggagcgaagaaattgcttattatgaggcacatcaaaattttattgtttgttgaaccattatagatgatattgatagctgtagaaatatatttggaaggaaactaaaatgtaatgattgattactgcgggaaatgaaattgtgcactgctaaataaactactaacctgaatcaagaagtggacaccctaacaatgaaagctcagcaagatttggaaagctctgagtcagaataaccaaatcttcattggtcatccatgggtttacccgttcaagttgtaactttctcagatttggcataaagaacttgaaagctgcaatggatatatcgccaaaacaatagcataaagccaagacttgcaagttcctcaaggattccatgatgtttacaatgatactgtctgatattacctgtaaagagcagatatcaatctacatattacactaagagggctgatgcctgtgcaaaatatattatatatataaatatatattcatacaactttaaaacagggaaaagaatgatgctaatggagtaacttaagtgtgaacaataatggtagaaatatataggctcaaaagacatgacactcacaatcttacactatgttcggtatgacggaaagaaaataggaggggatcgaaaatataggagagaaagaaaattagaaggaaagaatagaaaatctatttccttcttagttgtttggttagtagaaaggaaagaaaattattacttttttttttgcgaaaataaatgagtaattttacattaatgttattttgtaaaacttttctgtccaatttggaggagaaaatttttgtgcccacctcaaatttttctatccacttttctcttctccctatttttctttccaaccacacaaacatttttttttacttctctccacttttcctttcaaacttttctttcctctcccttttctcctctaccaaacatagagttaattaaggtggtgactcaatggttcaaagcgatcttcatataagatatcttttagttccaattcaagagaaaatccaggaaagagtttcagaaataactaacctaaacaattaaatagcaatataagagaattggataaagttataagcaacatctacaaggggagcacatctgtagcaaagttcatttacccaaaatagtttgaaaaatcagggaaccaaatgcctggcctatattttattactaccaaatctaataactatatgccatttcaaaaaaaaaaaaaaataacatctaataaatatgagctacacataacaaaaaacaatgtcaatagcaagtatctccaagacttttggagagtaatacctgaaaataaagagctacagactctaggataggacaagcagaaggtagttgcacaagtgcagcttcacctaatgatgagcccaagcccgccgtcaacttcctcagtgttgttattgcaggtttcagggcttccatagaaaagtgagaaaatccccatccaagggaaatttcgtgcaatctgcaagtttttcccaaagcaatttccacttccccacaagaatttaagtaagaaaattctcccatcgtggtggcatcacatttgcatcgaaacaaattcctacaaccctttactcttaaacacttcaaaccagtatttcgatagataatatgtgctaaagcttctccagagacctaaaaactcagaacaatatccttcatttagagatttccgagtaatgatttatgtatttaacatagttgaaatgattcaggtcagagaaaaaaaaaaacgtagttgaaatgagatgaaggaaagaaatcgaaatttgtctgtcagatgccataataattaataataggcaaacactagttatattttaccaagatttgagtcaatcgaaaggtacggagcttactagacgtacaattaatctagtgaaataaatttttattcacaatatgcactgaggtgcaaaattgggggccaaaatgaccagttaggatggacaaattcattatccttcatacatagtggtgggtagacatgttgtcttatagatgcatagggagcaagaatgacaatcatacgagacattattgatataataatcaactagtctttctatcacgagtagctttaatttgattgaccgccggtcacttttcaggtgtcatttggctaagctttaatttctgtggcaattaagcatttgacttcctgattctatatttctttctattatcagactgaaatgaccgatatctggaaagtttataatcaggtaacatctaaatgatagtatgcagggtcatactttcaatcactacattgaatcaagatgacagatattttaagtacagagactaaccatagtattagaaacatcaagcatctctaaggaagaaccacggagactacaaagagcacggtcggtaatgtgggtgtccctcagacaaagactcttcagcatttgtgtttcagacagaagttttagaagagatgtttcgtcaacacctgaggaaaacaaaggttttatatgttgcaatgacttcaagagctaaccataaaattgctcaaaaaataaaattgttccaaaagaaaaaataataaaacaaaaaaaaataaaaaaataaaaaagaaacaaaaactcaaatgtatagagtatctctctcaacccacagtatcccaaaagtaattgcaattcaaaattttgaaacaaatcagcagttttggaaaagaggtttcttcaaacagcacaatgaacaaagaaaatgtcacttacccttgcagttaccaatatgcagtgtctgaatattaaatgctaaagactctgaaatttgagtagtagtattatcataaccatgaaagtcagaacataaagctagcacagaattcaatccaaaagaagtatgacacaaaataattgatttcaatctaagacatctgcatataagatctgacatgccaacatctgttaaagcggtgcaccctttaaggttcaggtgctgtaagttggtgcagaatttggcaatatacaggagatcagaatctggcaaacagtgaacaattgacaatgaattccgtgatccagaaacataaaaaaaaaaaaaagcagatcaagaaataatcttccgtaattttgtctccctagctaagtgaaatatgtattttgatagcaagatagttaatgaaacaaagggaaaagaatatagtctcgccatgaagctctgttcgtccctcaagtgtaagctttatgatatttgacaggctaactttagacttataaagaggtgacacatccacaggtcttaagccactagttaacgaattttttggaacttccaatataattggactgacatcaatagctaggtcaacttcacagatcgcagggcattttaggaccaattgtcgtaatgttgttgtactgaaattcaacaaataagttgccttcaggatttttaatgatggaaatgacatggagaaacactcaatggcagctcgaagatgcagcctgtcacacttggaaatatccacttcctctactgcttcaaaagataacatcggcaacaatccctgtgaaattaagaagggatctctctcaaggctttcaagcttagccaataatggcttaatggtattccttaacatggactttgtacagtttaaagtaggaagtagagacatgaaaagtattgctgatgttatctgtggacaacttgaaaggttcaccttctgcaaagtgtggagaaacgaaactaattaaaataaataaacaataatgggagcaaaaacatggactggaactgaaaccactggtgtggtgaactagcatgttttccactaagcctttaggaactgcaaaactaaggattatattatatttgaaacatctataaccttctacatcattgaaatgaaaaaagaaaataacttcccaaggaagcacttgaagtcacaattgtaatgttgccgttctgcttacaatttaaaatcctcaacaagaaaaatatgagactgcaacaggaataccttagaatattccgtcactcgaatcctaaaatctttcaagtcaccaccttctaaaaagcttaatgagccagcagatgaaatttcgaggagtgtgaaaactgaagtaatgcttttatctacaagcttagcataatgacaatttcttcgtttccctgaaaaggtaagccagtcgaaattatatcactaatggctttaacgatgaaaatcagcatcatgtggtgctgttaatatcattcagaagtttatcatacctgcagcaaaccacaatggtaaaaggctcagacggatctgctcaacaccaataatgaatggttaaataaaaatacctctcagtatataataaaatttatagaactgcttcgtatatcacacttggtgtcctagtctgtttttaatccacaattgccaacatgaaaaaactgagggcgaaatagtaacttcactcggaaaggcacaaattctaaacatctaaaaattcatattgatttacctctttcagaatgtcaatataattgcttttcgttatattcaagtcttttgtgttagcatcaatccacatgaaaagtgcatcagagagatacatttcactgtaaggtcacaaacatattgtggtcagcatatgctttgagatttgattaagctaccgttacctaaaataaaatatgaaacctacttgtgtattgtcaaatgggggtgcttcacacaatcttgaagtaatctgtatggaacatctacaaaagatttacaagaaatagcccacatctgcaaagaatattatctgtcaccttcaaatagcaaaacccaggttaaagtataaaccagtagattgataagcctctaatgtaacttcatatatcacagatcaccagcgtgttgcaactaaattattattggaaacatattaagacaccaactaagccacagaaaattaccagcctaagcaagtaagcatgtaaagagctaatgcttttagagcaacaatctactatcatatgacgtatattccatcatacaccttctagcaacaagaagatttcaagaacaaaattttactgcactactaaattcataagtgaatctgaatctctcaaattactcgcatgtagtatttaattgtccaatgcaggtatatttcctcattttctatcctgattgtttattgtatatctttgtataataacatagaatatataatcaaaatgcaaatttaaagtacgatgaactaaattgagaaatcttgttcaaagagattctgctgaactatagtaaatcattttcaataattccaactaaaagttaaggtttttgcaataacaaacaaagctccattatgcataaaatagctcctcgtaattgctcaaaacaatcctagcaatactagctcatccaattttctattcaaactaatttttacaagaaagttttacagatatggatatgttccagtgctttctcttgctggtatcatagcatacgatgtagtgccaagagccactacaacgaatgataggaagggcacacaagagattcatatagaaatgataacaaagaaatgtttggcacgtacaaaattttttgcaagatagcttgcacacaattctggaagataatcattggctgcaatgcattttaattagttaaaagttaataccaaactctgaacatttacaaacacaaatatttttaattgtattgaaatgaaaatagtaatcaaaaaagcaaagataagacgctgaccatgcttaaagccaaagttccaaatggatattagatcatccaactgcatttgtgatggcatggtagatgaagtcacctccaaaaaccaagtcttacacttttcaagaagaactttgactccgaaataaagtgccccctgaaattttattagaataatatttgagacacgtactattaagttagtctccttcatttcaattttcattgtagtttgtatacatgttatttcaacaattaagaggatacaacctattgcaggtttttttaccataaataataaattataatttgcaagttattattgtttttgtttacgagttcggtaagatatgaggttttttgtggtctttttaatattgaagtttgtagcaaagatggtccgtggtaaaagctacactgtctattacttaacatcaatgttaaaattggagtattgacttctgaaattctcattgtttacgatgcaagagactcatttcgaatttgttgtcatgtacccaaaatattgtcatatcttcaactttccctttttccttttcccttgctacattgctaaactcatagaagaagcacacaagtgtttacctcataaaagttgatgacattgtcaaaagtaacatcaactgagcagccatgtatgcacttcagaatattcacaaatgtttccaattcccactcaatcgaaatatgatccagctgtgattcactaccaaaaaaaaaaaaaaacttttattgaccttcaattttctcagcaaccaaacagacagcaaaaacattgtttacttgcttaaaaacagtgtaaaaataactctctattttttacctaaagctccagctgagcatcccatggaaatacgaagactgctcaataagcctacaaataataaataaaaaaaaaaaaaattgaaaacgaagaagagcataaaggtgttagtattcagtaaatttttgtgataaacaaatggtatcgatcagtcaagtaaagatatgaagagaaatgaaagaaactcgcctagttcgatgcgcctgtactctaagcgtggaaaaagtgagaattgaaggcaaatcccagcttgagatttctgcggttgagaggagaaggtcttgattggaaactatattttcctcaaattgactgggattggtgatcgtgagaaggatgaagtcattgtcatcgtccgagcttgaagccatggcaaaattctaagtctccctactacaattacaatatcactgctttcattttggtcctaacactcgcaatggttactccttttttttttttttggtttcatttgcaaaaacttatacattcagaaaaaaaaaataaataaataaataatttatacatcacattttaataatttttattttaaaaaaatatacttataatttatactaattttttcaaaaaaaaaaaaattaccgtttttcatattctttagaaaatatattatcaaataaaagtaacttatattttaaatatcataaaaaaattaaaataaaaattataaaaaaataaataaaattaaaatacgtattaaaattaatataaaataatataaaaataaaagaaaagttttttaaatggaattgaagatcttggtctctcctatgaaatgacgagaattaaaccgttttagatttcgtgtcgctgcttcttttttattggcctcctactttaattcttgccccattagcattttcgatctgatatcaagaatttattctaccagtgaacttgcccgcgctttgtacggtcttaaaagagaatcgttaaaagatactatttgtgcccagtaccctcctcggtgtatatcggtattggtataattatgtatcggatctcatataatttaagaaaatagtttttaggaaatatcactaaccaatcgtgaagcgcttcctctaatgcccaataataatactcatcttaaaatatattgtaattaataaatatttttgttaaatattattgattttctaataaattttattttaatttaagtctaaaacactttttaatttaaaataataataatgcactttttctgtttttgtatttatttattgagttttttcatcaccactaatttatcatatctaacaaaaatttaaggcgtgtaaaagttatatttttgtttttaaaaaaatagaaaatgagtttgataactatttttttctataatgtttttttacttttttttttaattaaaataaataaatatctttggcaacttttatttatttgagtgagggagagaaagtaaagtaaatattggtgtaaaaaaatacaaaaacagaaattgaaaatctgtttaaataattttaaaagtaatttatttttagttttgaaattttcttatttaaaaaaaaaaatgaaacagttttaccaaatatatttttcgaaaatattattgtgattgttttattgatgatctgtaacttttttagttgctataattgctgaacttcatatataaacacaatataagattaatttgaaatggggcatatggttcatagacatttatttatagattatagatgttatgtttcttcatggtaatatttttctgttttgtccgaacagacaaccttcacattcctcccaatctctcaactcactctctctttgtatatacacatacaaacacaaacaactttcagctctgatacacaaaccactttcaccgatagctatttaaaagtttgttatggacaaacttacaaaaaaatagtttataccttgattgaatttgaattttgaaattgggaaagttgaaagttatgcaagaaagggatcagaattgactgattaataaataagctattcttctccaccattttgggtgtccaagcttaacatttcatccattctccttatttcctcttcatgatagtttaacacacaagcaactaaacttattcaataaaatcttacccattcaatcattataagaatcacatccactaacccactcaaaagagccaaaactttctcttcagtgattggtttattatcaattattccaacctaaacttttacatgcacaaaatgaaggaattagtagagacataaaaataaaataagaactaatacacatttaatatacacaca

SEQ ID NO: 36389 - DNA, 6862 bp, Cannabis sativa
  modified_base (26)..(40): a, c, t, g, unknown or other
agggtccaatctgtaacttttgcaannnnnnnnnnnnnnnatggtatttacccttatttttatcactttagaaaaatatttataatttaaactttttttaatctttattatgctaatttattaaacttttatatacatgcaaaagtttagaagatattttacatgtttttgaaaaaaattaaaataatttattatgttaaaaataaatttaaatatgtatataatgtatttattatttttttatattcttacaatatttgattattttgaactatatgttttcaatattataatttattatttagaattttgtgaaaattagtggaatacttactatacaattataatttctcaaataccaaaaataatttctctaattataacctttctttttggcacataataacataacttaatgttttttaatatacaatacattttagttatcatattaactttctcatatatataaaaagaaattaaaaaaaaaaaaaactgataataataataataaagtctctacatatataattcaaaacatagagctatagctagtagttccaactgtgataggaaattgtgttagttttgggttaagattctatataaaaaattatcttaactagctatgtatatgtatatatacgtacataaatattatcattatgatcatattttacaatataaattaatcaagcttgagctatgttggattttctgaaatatttaatctttaaaatatcattcatatattaattagatggttttaattgacttaccattaatctcacaaataataatcatgatgaaaatatatataagaaattttttaattcaattaatatttaataaccaggtttaataaataataatatagctttccctaactatttatgaataattaactacttttcatgatatgaaattcatcaatttcatatcatgactttcaaaaagttacaaataaaaatatgatttttcacatctttttatctgcaaaaaactcaaaaaggagtcaagttgggtctggggataaagaaaatttataattgatagttggcatacaattagaataggaattatttcacaaatatatacaaaaataataaaaatacagttgtacggaattttaaatatttttatgattttatttaaaaaaaaataatattttaatgtaattccatattgtactcttgttaatttacgttatttatatatatatatatttttttgttattttaatgtaatttttttgtaattttaatttatataacaccgtaaaatataaataaaaaatctttaatgtaaaaattttataaaaaaatattactttatctaattattctattaagatatccaaactatagatagcacacattaataataattatagcaatgaaaacatatttagctaaaatataagttcaacattaacatatttgaacaaaaattaattgaagaacttataaaaattacaagcatcgatattaaatttcttgcccatgaagcttggatacaccccagataacttttaactagttattacatatttatatgatgaaaaataaacataaataaaataaaaattctatatatatattttctatagagaagccaaaaaaaaaaaattattgaagtagcctacgtagaaagagatatattatatctttaaatattaaatattaaatattgcatatcgatgaattacaccaaataacaaatcagtaaaaaaaaaaagcataaaacgcagcgtttagcgcttaatgaaataatatcatcactactactgacgtccgttgccgttagttccgtcaggtccgtcattagcgccgttaaaagaagtaatagcgagtagagcaagtttctgaaggtttaacttaacgaccgtatcaacaaacattttagtatcctcagtcgtattcccatcaggaatatccacaacataagattctatcacaaccgtgtacacgtcaccactgtcgtttccactcaattcactgtcgttttgattcaactcaatgtcgtttccgtttttattcttaacaaactccttaactgaagtaactgacctatagttattaagccggtgctcacctccaactacgctgaagctgagcacctgcttttcctcgtccaacatctcgagccgctccaccgaagtggaggcaggcagaccggagacgacggtgacttccctcatagtccccacaccgccgtctccggtcatgatgttgcaactcttgatgaagtgtttgtatttttgtgggttgtcgaaacgacggactagggcccacacagcgctggctggtgcatcgattctttgtgtgatcactgatgtacacgtgttcggttgtgattcaaagttgtggtatctctctattactgggcccaattccatgtattcctccaagcttagcccatattgcccattattgttactacggttctccattttttgatctctctatgtatatttatgtatatatgtgtatatatatacttatatgtatgtgtatgtagatatatagagagagaaatgaaagtttttagagatttaattgatatgaagagaaggagaggaaaatcatgaagaactagagatatatatattttatatacatacatatatatatttattatgtattggttgtcgttttttgagttggacgaaaatacccttgtttgttttgatgagcaaaaatcaaatttgaactccaaagcaaaatatcaaattatattatattttaataatttttaataaataatagaattgtggggatatttgtcgtttaatagtttttggataaaaagaaaaattgttatttaaaccaagatagatatagagagtaactatatggggaaagtgttttgtctataagctaaatttgaatttattgttttcaatttaataatgtttttggaagagctataaatgtttaataatataataataattttcttcattataattaatgatgaaaaccaattttttatatttatattgttgtgttgactgtataataacatggctgactttatgaggcattgaaaataaagaaatagtagtatgtagatatattaagatggataagggtgtatatgtgaaagaaataagaaagagaagggtaaaatggaaaagaaaagaagatacaggagtcgcaatctttgaaaagtggagattattggtggatcatgtgataaccctaacaaactatcttgtgaatgtgatcatataactccaatccctttcccaaccccatcaactatattatattctatacatttttatttttttatttttaattagtttattatattatatattattaattataatcaaaatatcaacataccaatgcacaatttcatgttgtatatataccatcatatacgagtaattatatgtatacatgatatgtttaggtgcatattttactcttttttttttattttattttttttatttaagcgttttatatattacaaccatacataatttaggactcgaacccaggaccctccgacacacacgcactcttctatggccactttgagctagcctcaagtggttgtgcatattttacttttagttacacataatatcatattaattatacattactcgtgttggaaaattcatgcaatcttaaaaataatgtactatatttttatctatttcaacaaatttttttagtctaattttttttttatagtcgtgtacatcataatcatttaagacaccctacaaaattttaagaaatttgaaaaaaattaacacgctaataaagttcaaattataaattacacgcaacactcttttattattttatactcgtgtaaaatatattgttttaattttaatattattttccataatgtaaattattctgaatatctcaaaattttacaagatattttaaataactataatgaacacaactatcaaattaaaaatttaaataaaaaattagatgataaaacaaatacaggtgtatcgatacaactattttagagggtgcattgcatttgtagaatgtgtctttgcagaattacaatttatttatttttttttataattttctccaaaataaagtgcggagaaatgtgtttggaatttaatttctatacatatatcgacacaattttatctttgtaaaaattaaggtggcgtttggttggaggtaataaaatagaatgtaaaggaaaggaaataatttccattctattcttttgtttggttgcatattaaagtgttagaatgtcattccaatggaatgacctttccaccattttagtggaatgacaattacattttgaaatggaagtaaagaccattctaatgcatgatcagaaaaaatttaataatttttttatcaattttttttatgcattttaaatttaatttattctattcctattctcattctcatatttttattcttcccaaccaaacgccaccaagttataaaaacaatattattatatacaaaatgatttaataaaattaataatattttttcaaacacttgttgactttttttctaataatgtatatacatatgtatttctgccagtaattatatagttcatatatattttgttttcacactaatatatataaattgtgagaaaaaacagatattatatacagctttctacgtatggctgtatctggaaaattctctcaattattttattttatttaatatctttattcacattcaaaaaaaaaaaaaaattatgaaaacagaaaatattaatagacaaaaataaaaataaaaaatactattgattcaatcaacaaaaagagtgaatttaattatatatgttatcgtcttattgagttgttgttacaaatttgaatatttgaaataaaaattacataagaaaagttttacatagataaaagctacaagagctatgatttgatatattaaaattcaggaaaataatttaatacatagataaagaattgctcattagtaaaataaaatagaattaaacaaaaaatttcaaatttaataatctcaatatataattcagagaaaaaaaaaattaacaacctaacaaccatatttatatatgaaaatagttttcttaatatatttactaactaattccaagttaggattatatatataagtcaggagatatttttgtgtgtatgtataagttaaaaaaatgacaacgtaagctgtatattctgaatatataacgacactaatcagttatatatatctacgtaacgcgtatatatataactctaatatatttttgtgtttgtattgtaggaaacactcttttatgggtttgtatatattgtttaattatttaatagtaaatttaatcaagaaattaatattattataagaaataggtgtgccatgatatcgtatattatttataataataaattcatgcatggtttgggtatgtatggattctagtgttttgtctcttccttatttatttatttattaaattaattattaatgctaataatggaaatgaaaagtacaacatgatggatatagtcttactataaatacatccctatatataataatatgttttcttagatcctaattacttgttaataattaattaacactattttcttccattaccacatttaattaataaataatattaaagctggtattctttattattttatttatttattaattttttttaactttctccagattctcttctttgtctttttgtttttgtcattttctttttcttttagatccttaaaattaatgcccctggattgttttagaagagaaaaaataaataaagtctcacatacttttgtaaaataagaaaagtaatagttttgtaaaataatgactacaaacgacactcatttgctcaaaacgacattaacaatgatttttttttttgttttttttaggtaccaaatatttatatctcaaatccacatggacgtctaatttgccatgttggctttttacattgacttggtcgagaacacataagcaactaacggtgtcaaagggaaaacaaatagtgcatttgcaaatagaataggacttaaggtagtttttctactaaaaaaattaaaggtaaagtgtattacaaatgaaatagatgaaggtttgactgtaaatttttctattatgttcgatttgtttaaaaagattaatataatattttttttttttttgaaaaaaagattaatataatattagtttagaaagaagagaattatattgtgttatgaatataatgatcgactatgagattggatgggttttaagaaaagaaaaaaaatattagaccttttatcaaaagaaattagtggtttcttaaaaagtattaaaaattatacatactttcaaaagaaaaatatttaatttaaaccctaggtgcaagtatgccttaacttaagctcaacacacataatattaataaataataggattcataccaattttatacacatgttgtttaatgtttatcttatagttaaaatataagattaaaaatagtgtaaattaaggtataattactaatactttttatttgaatgtgtgtatcttcatgttattcaaattttgtaaatgtctcacattttcattatgtacaaaagagacaagttagaatattatggagtgcttagaaatattcggaagaattacgagggtcccactctcggtgtgcggactcactaatgaaggtgtggggactgtagccccaacaaaaaaagttacattgaaaaaattaaatattttctttttaatttgataagggaaatttcaatttttgaccctaataatacaacctatatcaaaatttatacccctttataatttgtacaaatttagtccat

SEQ ID NO: 36390 - DNA, 5255 bp, Cannabis sativa
ttttctgtggtttaatgtgtgttaaaaagaagattaaaattgaccaaaaatttgtcattcattgcacgccttccagtataaccagatcatttgaccccaacttccctgcccctcaataaaaaatcattccacaatatccaacagacttgcacaccaatcattccatatgaaaatatgattttcttatggctcaactaaattggactaacgtgagcggtttcgttcaagaaaagacaaccgaagacaatgttgaaaaagtcacgacctctgattactcctccccctccgactatagcctcagtatcatagttgcatgctcttgtacagtcgggacagtatgtaacctagacaaagtgaccgggaatttaaaaacagaagcaaatgtaacgactagagtctagaagataagttgataagcactatatctgtttatttatatgaactcggactaggttagtagatgaaattgatttaatacaaacctccaataacttgggtcggtaagaactgtcaagcatgacatccacgccataaatggcccttgaatttggactatgcatctctgggtgtactgatgcagctgcttcaaagactgagcggatcataccttttactctttcatggatatccaaccatttgactgcaattattgttgcaaaataacttgagagcatagagttgcaatgctattgtaggcgaaagttaaaaaaaagagtacaattttaggtggaggccagtagaagacttggcaacttggacagcatgataataccttgatgttcttgttcaaattccttcacaaactctggagtgttcttgtgcttgaaacctcctcgataattctgaaagccataactaaatgagagaggaaatgtatagaaatatcaatgtactgtgacattctatggcaacataccatgacagtgaagtgagtctcgtactcgaaaaagctgtgcttctctagagaatacgggttgtttgccaatctaacctgagaataaatcatagtatccttttgaatatgattttcaaggattatattaagagaaggaaaaataaatacaaaaaaggatgatcaagttcttcacattggctatcgtgaacaaagagaagaacatacatacccagaaaacatctgagaggaatatctcaaggggattcatgctgcgaactaatactacatatcgaatatcaaatttcttcccattaaacaaagcagggttctcaatatacttctgacatatctttggaccagtttccatgagtctaataatggcagttaaattatcagtgacagttgtatctatagtacgtgccatgttccaaggttttaatatccacatattgttacactcttctctcttccgcacaagataatcaccaataagttcagagagattagtttccagattataagtgggctgcagccattcaggagaaccatgtgcctgttcataaaagaatctggaattaataagaatcatgagagaaaaatgttctgaactttgactggatagtctgaattgcagacaccaaatctattcactttctactctggaaagaaaaactgttaatacagttgcaagcttacaattttgataagttcaaaagtaaaagaaagtgcgaggtggcatttccatcagaggacaagtcaaaaatattattatcactctatataggatcagccacgccatccccggcgtcactagttaataatataaaaacatatattgaatagaggtgaaatcttgaaaatagacctctaaaagctaagtttaacattaatgaagagtgaaataccaagagagacatcagggaaagtgagtttcttaaccttcaaaatagtatctgccagatgatgtttcatcacaagacaagcctcaaaggggaattggtttacgaattgattctctgttattccagtagccttctttgtatcatcatccacctgcgtacttgtccatatgatatctgcatcctttacatcagttgcttcaagcaaccccccagaagataaaagcagaagaagattttatcagaacttaagacagacggcaaaattcatcacttgattttaataatgttataatacaatacatacttgcaagagaggaaaaaaaaataataaactacatactgatcataaactcaggacgggtcaaaaattcttcaacataaggtaagtcagtgtaaacacgtagagcagatccatcattacgaagcagacttctattcggacatggctgtattggtggaaaagacagcctttttgattttacattattccagtatctctcatacttctgcacaaatgatgaaaagataacatcagatcctgcactaagttctagttttaaaggagaccgtacagattctctggtgtgaaaagaaaaaggtacttggataaaatagttctctggcgtatggaaccaagctgtaagccttgcagaacgctgtttgtcttccccaatgccaaagagaaaatcacgggtgcactcctcacccttcttgacattattcgttggccacaatatagaaaaactgaatgtgaaaagaagcaactcgtgtcaatatagcatttttcttttatttctatttacaacaacacaaaatcagggtctatttttctagaagtattatatgctagaccaaataatctttacttatattattgatttatttcacacaaaaacatttacgtgctttggtgcaattatgtagtaaatcacacgagactatccaataaatgacaaaatagtaaagcaacacaataaggacaaaagattacctcacagctgatgccagtgttccctctggcatgaagagaaaaggagccactctaaagtttggctcatcactgtgtagcaaagctgaacctagctcatccatcacatacctatgaattactccaaaacaaagcaatgtcaactcaagtatcagcaaaactatataatctaaattattatccagaaaatgtcctaaagtttacatagatcacttccatattcaatctttgaacactcaaaacttgcttgtgtatgagagacataaagagaagcaacgtagatttacaaaccatacaatcaaaagccaggatgtaagcaaaatgcaaaacctgctccataaccctaaaatgcataccagacagaggtctcatcaatcttttcttcatcagcaagtctgtatgtcattaaatatagccacattgcatttaaaacacgatcagcaagaggttcatccgcagcaaattcaggaagatgtggttgtagctttgtatcaaccacaggtttttgatcttctagtatttttgatgccataacaccattcaggaccaagatattaggaagcgaatcaaggatttccacagccgtttctccaaggggtccaggaatatccacctaaaaaacaagtctatgtaatataatcctcaaactttaatgtttataaacacccttcaatatcatatccaattcaacttacctccaaagattgcaagcatggaaacccattcaagagacgtaataagtccgccttctgttctaacgggttccctcgaagattcaagtatgaaagagaaggaaagcgaagaggtgaaaatgcctgcaaaaaagttaggtggagcataccagtcagaaccagtattgtctaccagataagattataatatatatattcatctatctgcatttgaaatatctaaaaccaagaaaaatggaacatgaaatagagataaaaaaagaaaacagttcttcaaatttggaaccttatttatcaaattgtgaatatttctaagtgaaaggtcaagagaggtgattctttggagtgaagggtcatcttgaggtctgccgcttcctggattttccttgtcatatacatctccacagtactccaatgcccattcaccataattaggagtgaatttcgaattatagatttccaaatttggcaattcttgcagaactctatctgtcaactgatctccgctgaagtgaaaaggaaaaaaaacttcattttttttttttaaagacaaaaaaaaaaagcttcgtatcatagaccataccgtttttgtacaaccggattattgttgagccagagagctcttaggtttttgagcttagtaacttcttggaccacaacatctatattctcaatcttgtttccacacaaactaagagcaattaaatcctgaacaaaagccatatgagctttagaaaaccactcataacgatgtctttatccaaaatagtaaaatcacccactcactgctcaccggaaatttacttgctaaatctaatgtcaacagagtatcatcgtctatgtcgagctcctcaagctccagccactttacaggaccatcacccttctctttcgcagaaccaagttcagtctctataatctcgaaaacactcttcttctcattgttcacttcattatcttctgtataggaattcaaatcattatccacgcacataatcgcagccattctttccgccaatccaggtacttccagcaactgacatacgacacgactaataagaatataattaaacactaacttccaaattttctacgctggtgcattttcgttcttggccaccaaacaagtccgggaaaatgagagaaatgacaaaagcgtacctgtttataggcatcggacaggcggaaagtccaggcatgatcgatgaggaacacgtctgattccttagccatggcgtccgatgtgaggacgagcttccttcgaggatcttcctcgcatggctcgatttggaagaatgagccaccatcgaatgtctccgacgacagcttctcaaacagtttcccataaagggaagatggcaatcccgaggctgccagaaggataccatgaacttttacgaagtcttcgatggtttcaattttcccgacggtggttgacattgtcggcggcgctggaggctcgagctcagtgtccgtgtcagtgagagttgggagcttggcgcgcgtgcattgagatagaagaaccttcgaggcctttctttttcttttgaaagttaaattgggcctcagcccacatgatcggaactaacgaagtgagctgggcccacaataataggcctagccacaatgttggccaaatacgggccttatctatgtaacccaatcaaatcaaatagaaataatttgtagggaaatttacatatatactgtttttgcaccaaaattttacaaaaatactgggacacggcaaaaacaacttttttactgtcccagcccat

SEQ ID NO: 36391 - DNA, 4342 bp, Cannabis sativa
tattaccacaagtgtttcggcaataccaggctccttaactctcttggtagacactcaaagaagccatcattgactctccactagtttttgttgctacgaaacaaagagactggggcatgttggagtttctaatggactctcaattctgatataaatatatttatatgtacaagtttatataaactgctacatggctaccaattaccaaaggtgatttctttataaacaaaggaatatttaagagtgaaaaaagcaaataccaaagtgttaaacaacactattgttataagaaaatatttcttaaaaaaaatctatatatatatatgaaatataagaaaaccaatctactgaagcttctttatcccaggaaatgagggaagaatagcaatgagagcatcattatatccaacaggatctgataaaagcaaaacaacccaaatttagagagcatttgaagaaagcaagaacaaaaaagcacagtgaaaatttactatacttaccaccatcctctcgtagtatcttgattacctctcctgaaacatcagactggatgggacaaaaaagtaaaggaagatatgtaaaagagttaataaagagaaaatgtatttgaaaaattgctgagagcttttataacattcaaacctcaattggtagctccccaccaagctgttctatgtagcaaatcacttgaccctccttcactgtttgcttctgttaagtcataaatgcaaaagatatacattcatagtaagcattacaacaagagtccaaccatgaccactgccttgagataagtaaaccaattttgaaaaataaatgaacaaagttcatagcaacggggaagtacctctttacatggcggtggagcacgcttcccttttatagttcgagatcttctgaaaaaccccacctacagcagccttgtgtttaggacacaaaatttacagaacagccaaaagaaaatgaagcataggagcacttactcttggagactgaattatcaccaagccgtcatcaggagctttatttacaaaagtttgaatattctgtgaagaagtttctgacttagttaaagccaaagataatgcagaagtagactcatttaactcaggaacttcagcaactgtatattcactagtaggagcataaatttcggaggatggactggtgggattttcagtcaagtcccttgtaacatgtaagtagaatccactgagctgctcatattttgacattgcaaagtgttacaacaagggaaaattcataaaagttaatctttaatagaatcaaaacatattgttacttacttttagttcaaactctgcaactgaagttgtgtcacatattgttgtgagcagatattctacctagagtcaaaacaagtagttagaatgtttttcactttgtgtaaacagtatatgtatagatttccaaggaaaaacaatgctttcacatatagacacatgatgattgtcaacaatgttacctcatcagagtttggaacaacttggctccttaaaccagaaatctcaggctcttcagattcatcttctggacttaaaacggctattacagacatcatcaaccaaaatgagttatagagtcagaagccaaatataataatctaccattaatgactacatgtttcaatgaatactagaagagcattgctattgggtgctcaacaccttacgattgtttagcgatatttcccaaagttattttcattggacacgatacttaattacaccaacaattgtaatttcacattaattaattgatttcttagaaagaaaaccaaatatcacaaacaacttacagagggtctccagtgatggaccaatgctcaagtttaaaacttttcttgacaaacttgatattctcaaacctgcataatctagtgattttttcccactccaacttcttaaaccatttaatcttaaaatcccactctttcttgcaacacagtccaaggttgatatgttaacatatgaggaacctaaattacctgcaaaaccatcatatcttcccaacatttagctttctataacaaatattagttgttggagatacatattattgtgcaaaatgattcaggaaaaataaaaatatattttttttcaatagttagatggaataaaataagcaacaagcacaaaattaaatgacaaattctggtattatacacacacacacacacacacacataaatggcaatgaaaccaatgcatggaaagtttaactatttctaagttgtaaagaccccagaaaagaaaaacaaaacaaaaaagtgtaattatataaaacacccaataatcctgatatggtaaacgatcaaatacaaattaagggaattcatattgggacagagagcgagactcacaggcagccattgaaatctttgaggcaccaaaaagtggagagaagaataagaaaaggaagtaaaaaccagttattaaagaagtgttttaataatcagagaatagtgatgaatacgatgatgatggtgatagttgatgaaacagagaagaagggaagtagagttcaaccagaggcagcccttccttgcttggttcccaccttagcttccttttccaatatgacaaatgaacgtcccactagtccaccattgccaaggctacaactgtaaacaatccactccgggcccaatccaatataatatctctaatttagggtttttaagtttatacgagagaattttatattataattataagagatattagtggtaaaattatcttaattttattattagtgacactaaattaagtaaattgattttttggtgataaaattctttaaattttacttttattagttatttatccatttcgtccgaaaattcttttaagtgctatggtgttcatgtcacaatgtacataaatgtacacgtgacaaatatctcttactaaaaatttgtcacatgcacacttgtgagtattatatatatttttggatgagagacacataaaaagagaaagtatagctttaagcaatcagtgaccaagtcccctttataaggccaagtcacaaagaagttttgtggatcaggaaacagattatgaccaaagaatacatagagatttatcctgccttattatgtcattcgggacacgaaaggcttaatatctctccgactccaagatggcccggctcggagtgtgcctaagtgatacatgtaagattacttaaagggcttatcacggacactcagtgcccaaaagaagtcggatgttaaccatgaaaaaagacttggatcgcccactaaaggttatgccctttctgacacaggatcagaacttgtctcttgtatcaaatcatggtagtgcgcacttcccactcacctttttgcctgacggttagtttaggcatttactttacaaggtgaaaccttttggtgacatgtttccagtgcagataatggtccccattgtatagctgcctcttcacatgagcgaaaactttcttaggggcccaatagttagctcataacatgttatttactcccatagtgaccttattacataaacccttgggggtcatgagcatgtccatacctgtcctttagcctataagtaccattttattttcatacgaagggggatcaaagatcagatagttgaagctctgctaaatttactctaagcttttttattcttcaagagaaacctagtgagcaaggttagggtttcttgcaaacactattgtaaaaatattttacaagtctctcaaggctaataggttgactcttgactaggactcattaacacctgaaccacgtaaaaatcttgtcttctttactacttcatttcattatttcttaagctcttattttattagtttccgaaaatctcgataaacagggaggtttggagggttttaccaccgtggtatgaccacagtgtacacaagtatacacgtgacaaattattagtgggggatattggtttatgtggttaagtatcactaatgatagagttcaagtagttttgcagccaatttccttactaaaaatttactacaagcacacttgtgcacactggcatgcctactgtggcacttaacagtacattctaaacgaaagggataaataactaacataagtgagagttgaaggattttatcaccaaaaaatatgtagttaagtgtcgctaatcatagagtttaagtaattttatcgccaatatccctaattatagatattttatttgatttaataacatcaacaatatagtaaaatatttatcctggtgtattttcgttgttttccaaatttctaatggtgaatttgttcatgttaaatcataaagagacatgtaga

SEQ ID NO: 36392 - DNA, 12385 bp, Cannabis sativa
agagagagagagtgagtgagtgagtgaaatgagtagttgggaaatgagtgggttagggtaaaagatgggatggtttcaaaaatccaatcgtggatgatggatagagaaagaaaatttaacagaaaatggaagagagagagatttggttcagtttttatatttgtgctctaatacaagatgtgcaaattagttataaaagtcaatactactattaatcttcattaaaaatatacaaaataattaatttcatttatattttttttattatcttacaaatataaaatccatttttattaatgaatgagaaataattaattaaaaacatatgctatttattgttggcataatttttagctttggttaattttagtacacattaaatattattattgaagttaaattttaacaaaatattataaaaaatgataatagactattatagctctccattcaagatagacaatttttttttttttttgacaatattcaagatagacaattgatgaactttatctcccatttttctttaaagactagaaagattcaggtcaatcttttattaaatcaaggactagaaagatttatttaatttttatttgaaaggactagagagattggcctgcaattagtagtaaactatactctgatttaaaattaagaaagaaataagatttggtacatagagttgtataaaaaaagctcataaaagatgccaaagcctccaccaatacaaattagttaatttagctttgtatatacaatccttgtctttcaacaaaaaccattatttgctaatctacacaaagtaatccactaatacaataaatatttcttttaatatatatatttgtgtactaaaaatttgattgtatacattaatgtatagagaataacataatactagttatgaacaagtgaccaaaccatcttgtgaaagcaagttagaaccttgttgatccaatgtcttcctaacttccctatagaattccagccatgaagatgagtgcatttcgaccggggcggcccacaagaacgttgggttaggactcgccggacaggcgccgaccaaatccaacacagatgctgctggtttgagtggctgtgggaaattgaatgccaagttgtctactttgtgttcatatattttgccatttctatccaatttgtatcttgaagtgccttgaaattggcctttggcttcccatggaactctaggcacacctttcaagttccatctgattaaaatcacattctctgagggttgccatatcctgaaaacctcaagataaatctctctgaacaaaattctgccatggaatcttagtgcccagaatatcaatttgtagttttctataccactgaatgtgtttaaagggtctttaaacgttatatcatccctacaaaattcatttcgcaaaatacagttttattgaaaatccaatacatatatgaaagaaaattcaagtacccaattgagaaaattacctgtaaatgtcataattgaggtctttggtgaagattagaggaaggtcttcacggagagtacgaacagcaaggccgaggttgacaaagaagtcatctttgggctgcttatcgtgtgcacctcttggggtgttaagctgcgcactcttgtcggctaaaggggtctggagggttgggagggaagagggaagagaaggagggttgttgggttttgtgtggaggagtgtttggtgtacggatttctccttggatttcgattgaagaagcagagaaggagagagattgggaagaagaaaagccatttcagcttttcatgtgaagaggagttttttcagagagttttgtttttttatttttgactaattttgtctgtttgggtcatcgaaacacacacacacacacagttatttcgatttatttgagtggttttgaaggttgccacccaacccaagaccatgagggcttcaccattgattggtagtgattcaatgtggaccaaactcaaaattccctttgcttttgtttcattttgctttataatatcaatctaccattcatattatagaaaaaaaattgattttacttgggctaaacgccaacggtaaaatctgtggaagaaacaaaagtgaaagaaatatgtagtgtaataatggagagaagggggtagggatgcacatgggcggaaaattggcagagagtaattcccgttcccgccttgtttcttatttagacggggaattcccgctccattaggggtaagtccccacggggctatccccatgaagaaaatatgcatggcttcaagactatctccaataggagatgtaaaagttgagctattttaacacaaataatagttttgtgatatttttacattcactttcattattatgctctaacacataattataaatcttgatacaaaatttgatatgttatttaatgttcatttattaatttattaaaaatataaaataatgcattgtcaaaaaatatatatatatatatataaaataataattatataaaattaaatataaaatttaattataaaataataataataataataagagcattgttattggacaccagtagtgtctagcaccttctataggtagcactctacgattggttgacgatattccctaaaaaaattattttcttaagttatatgtgacgttatacttaattataccaataacagtataacatcgaggaaaataataggtaccaataatgtattaactaaaatttaataagaaaatattaaaaatagtataatagtaaatataaaagcataatatttattataatgtatattttacatcatgttatattgtgattcacatttggataactttttgttatatatgtgataaatttacattaaaatttagcacactactaaaatggaatttttataaagtaaactatattttatatttctatcacttatttacatctccctccggtagagttactcttatatatgtaaaagaaacacacaacataatatatatttcatttgcgcccttctcctatctcttacaaataattcaatggaatatagaaactaatattaaaaaaaaacatatactaatcaactaatgtaattgtaacgttctaccaactaagacggttacattattttttttaatttatgtattaatctttactaattaaagaattttaatataaaattgtatttaataaaatttttgtaataattaaaaaaatttaataaacttataatacttttacacaattttataatttgagaccttaaatactatttataaaatgtacatgatacatatactaaacaaaagatattgtctaacgacacaaccaaaatactacgagttcgtagtgtctcaaaaatttcaaccctctaagcttaaatgaccatatatgtacaatttttattaagtttgttactcactgttgttcagcttttgttttacctttacctacacacaaaaatatatttataagtggacagacttacaaatatatttataacttaaattaatttttaaaaattaattttagcatatttttaaatctctttttcacattattttctcttaatataattaattattttaattttattttcactttttgtttctaattaaaattcatatagatgtttattttaacttattttgtcttaatatttaaagtatattttttaggtgattttttgataagaatatgagaagaaaaaaagttataaaaaaattagtgtaagttttttttttttttaaatgaagattattataagttaaaaatatatatattttataactttatggtatgcaaagtaaactcccaaaaaaatatcaaagagagtaattttccaatttggtgggctcattaatttcttggtgacacataacaatgtcaataacaacaaaacaaggggaaaaaagaagcatctttttaagcatttccccaagtacatttccagaatctatttgctcaataggtacattctattttccttttggtatcattcctatcaactatttttaattactcatttggaggaatggaatatacaatgggatactaatacactatactcataaccaatcctatagctcctcccatttgctcttccctttcaattttcaattgtaaaaattacactaaatataagtttttttaaagaatatttacaacgtcgtttacttacatataatcggaatgactaggaatcaaattcacccttaattgaattgatgaatcggattaagaatgagttgtttacttaactaacaggaatcagaattagaataggcaatattctatatgtttacattaatgtagaatcagtttaaattaatttaagttacaaaagtactctttattaaagttttctttcgatatccttacaaaaaaaaattatttagatatttttaattttctttaattaaaaatattaaaagagggtaaaaattaaatttcataattttaaattattatatttatataacacctaagtttcaatttttttgagcaaaaaagtactcaaattattatgtttgtagaacttaagtacttaagttatttattttgctacttaagtttttatatgatgtcaaatttacttataacttaatacttaactgttaaaagtaaaaaatttaaattgggtacttaagttctaccattgtaacaatttaaataatttctacaacctaaaaagtaactttgcctcataatggcctgctcaacatgcgaggctcctaaggacaagtcatcccacatcaagaaaaccaagggttccaagtgtatggtcaacaccgaaataacaaccaacaatagaagcaaggtcggagaatgagatatgagcctgaagtctctattcatcgacaataccccaatggatatgacgatgacgaggttggaagtcgagcctgagatgacaatcgacaacaaaggcgcgaagatcatcatgtcaaccaaaacaataatcacaatgatggctagaataactgcaccaatggccacaatggcagaaacccacttaggaaagaaaggaaagaaagccaaaatgcaggtgggacacctcagacagatgttgtattccgaaagatgggttaaaggcttgaagatgacttacaagacaacttgaaccaaagaagagagaattgagactcaaaattcaccccaccgcagggaaaccagctaaataatcagtgtaactttgtcctgaatgatcaaaacaagtttgtcccgaatgaccaacttcgtaccaaatagagttctgagtgaacaaccggtggcacaagttggtcaacaggtggcataaatatattcaggagtacacgcataatttgatttacgtaaaagtatagtacaaagcatgactgactcaaactcaccgacctgaaacccgatcagagctgaggttccccattctctcctaggaacaattcgttggaaattctgaccaaatttttccaacttggaagatgtatacatcaaaagaagatcgactatcccatattaattattttgagatacaaaccaacctacgaggagtgaaagaggatgttaagtctagaattttcctaaaagctttggcaaagtccacacaacaatgatactttaagttgatattcgagaaatttgattcatcgaatgcctttgattctcagttctacacccaattctcctcctctcgccaactacctgctcacctcgaagacctggtcgaagtaaaaaaaaatactggagaacccttaaaatactatatttagcagttcatggcagagaccaccaaggtcaaagctttgaccaacgaggggcaactagcagcaatcttaagcagaattgagcccaaagggagaccttggtctgacattaaaaggctcattatgggatcaatttaagaattcttagatcgggttgatgagttcataaagctcaaagaggcagaatgaaaagtcaatagcattcacctcgctagtacaagcgtaggttagacccttgaagcccctatctaaaacaaccgaaattcccaaccacaagggaataaaatcaataataataacaaaaatagtggtaagatgctgaactatggaaacaataacaacaacaacaggaatggaaagaaaggaaaattcaataacgtcgatcaaaaaaatcctcaagagagagctcctcgatgcactaccttttccatcctcactaacactcgagaaaacatctttacgaaaatacaagtaccttacagaaggccccctcccataaaaaagatataaataagagggacaccacaatgttttgttgctttcaccaagatcttggtcatgacatagatgagtgtaataaaaatctgaaaaaggaaattgaattcctcatccgaagaaataagccctcatatgaattgatatgtgaagacagatctagttcagcgacccccttagcaaggggataatgctcaaaattatttgatgacaccccttgtggatgggaatcttaacgtgatagaggatcccacattgctgggaatactgatgaagacacaattgctggccattgaagagcagactcccaaacaaccatgtctagatgacacaattgtgtcatttagcgatgatgactctacacaagatccatgaatgaacatcctcttcaaaaccacatacgagaagatgggcttctagctcaaagaccttgttccatgtgcccaattgatctatgatattttaggccacaatattgcagctctgggagtcatctgtctccctttcactgtagggaaagtgcccaccagtagcatagtcatggcacagttcttggtgatagacgtatgtcatgataggacgaccaaatctgcatgacttgaaagaaataactttcattgaccacctttgtgtaaagttccccactaaaaatggggttggatgtatgaagggagcccaacagctagcccgccagtgttacaatatcacgatcataaaggcgaagaaggaagactaatttggccatagttcaaaggctgaacaaactaaaaaaaatagggatccacccaaggtggggatgttgagatggatcctactttggggaccctgacactgaaatagggccgatggaagaattagaagacatggagatagaccaaaccataccgaccaggataatcaagataggtcgaggttatacgagtgaaataaaatctgctttgatcaaatttttaaggaaaaacctcaatttatttttgcatggtcgcatgatgacatggttgggatttttctatttgtaatttaccacactctaaacattaatactcacaattctgaccagtacaacaaaattagagattgtttgaaaaagaaaaagctcgagctctcaaagaggaagcagaaaagctctgagacaacaaattcatcatagaggcattttacccaatttgggtatcaaacccgatgcttatcccaaaacctaatggcaaaaggtgagtatgcataggcttcaccgacctgaataagacatgcccaaagaattattctctacttcccatgattgatcatttggtggatgctactgccagacacaagattttaagcttcatgaatgcatacttaggttacaaccagatcaaaatgtatccacctgaccagtgttacatgaaagagtatagggacaaattagtaattattagtattgtctagttagtataaatatgtaatactatcacacaaatagaaaatcaatgaatgaatgagagaaaattaggattattcctattgggttttggcactaactcgaagagtgcaacccgatacaattcgatctccagtaacaccgccaaaaactttttgtgaaaattagtatacgtagtcacacaagtaataaagtgataagtaagatcgtctccacagggaatgcaagtaaaattcaatgcaaaatcaattatttaacaatttagattttaagaaaataaatggattagatgttgtgaactagaattaatattgaaatattgctacaaatgctggaaaattaactataagaaaaagtaatcaaacaacaaatggacttgaatagctagatccccctatgtctaaaactgcccagtcgctacaacatttcttcaacaaaatgcacagagttaactagaattcctatatgttcatgagatttttccaaaactcatgaaataaagttctatcatctaattcaatataattctatattaaatcacatctaagaacacaatcccagcaccaattcttaaagttatgcaaagtaaatattcctatttcacttactaagaataacctaaaaatgggtattctcttgcatcattcaagtaccaactactagatttagcctttccagtattaaatctagattaataacctgccattgatttctaatcatgtacaacagtaaataaacatgaagctcacttgaatgaacaatgaaaatttagcttaagtaatgcattcaaatttaaaatacatgacaaaaggagtttttaaccattcaagtctcaaaagtttagctcataactaaaatagcaaacataaactaaaataaaaaattaatatccatgagtgctagaatagctatgaaaaataagaaaatacaaaacagaaaagaaaagaagaaatgagaacaaagcctagattgatggtgttgtaggttggatcttcttgttcttatcttcctccttcaattccttgtgcttccttctttttgttcttcatgctttttttttctaacaactttttttttccaactatggcagccaacaataattcctctccttttcttccacattttgatgtacccttaaagttaggtccctaaggtactttttcaatatcctaattagaaaagcccatttctttccatgttggcccactattattggtctcttgtttttacaacagctagctggaagaagattaagtggatgccacctgattgttgatatggatggatgaaaactccttttttaaatctgtcgcgtcactgcgcagaatgcgcagaatgctcagaatgctacaacattcaggcagcatttcctcctagatttcaggtgtaaagctcctaccttgtatcatttcacttggctgatatttagaggattttttctaacaacaaaacagacaactaattaaataattataattaagactaaaaatttaatagacacccaaaattaacttgctaaattaaaaaaaaaaagataaaaactaacaaaagtaacaaacaacacactctttcaatacctgttttcatcaaaattgaagtttaaagatgataaaaataactctataccatagagttatcactgaccaagaacacataagcttccgaacagatgttggcttgtattgttacaaggtcattccattcggcttgtcaaaagtgtgtgatcctctacaaatttcacacccagttgaagcttgtacatctttggcagctatagttgtttgttgtaactatttagtgagtgtagctacctgagctattaaagcaataagggcatccaattcatgaataccaattattttctttttgccaagtgctctttcattagaccattgatagttgttcatagtcatgtcttcaagtaattcataagctcttgttgtatttttgctcatgaatgtgcctctagatgcagcatcaatagtggttctagtagtaggacataaaccattataaaaattttgtaccaacatccactgctcaataccatggtgggggcactttctcaatagatctttaaaattctcccaagcttcatacaaagattcaccattattctgacaaaaattatttatttctcccctcagtttagcaacttttgaaggagggaagattttagataagaacttttgtgctagatccttccaagtaacaatagagtttggttgtagagaatttaactaacatttttctctttcccttaaagagaatgggaaaagcctcaatttaatagcatcatcactcactcaactgtattaaaaagtaccacacaatttcagaaaattagacgagtaagtgtgaggacctttagtaggaaacccactaaattggagagtggactgcaccatttgtaaaattgctggcttgatctcaaaattattggcttccactgctggtggtctgacacagatttgtacccgttttaaaataaggagtacatagtctctcaagctccttttagtattattctaagcttgacctccatgtataactccaggaattagattattcttttcattcccttcattatacgccatgtttgtcgatttcttggctttcttcttgttcattctgttttacttacaaaacttctcaatctaaggattcaaaggaacaaggctatatgcacctcttctcctgtgcatataataaattcacctgagataggaaaaaaaatagtaactaaaccggttgaaaacaagggaaaacaaaataaaattagaataaaaattaatgaaactggtattaatgatgttcaattctcgacaacggtaccaaaaacttgttcgataaatttagtatgcaagtatacacaatcgaataaagtaatagaatgatcaagtagagtatcgtttctatgaggattttgattattaattaccaatctattaattctttatttttatttgattaattaaaaagtttttaaaaataaaataaaacaaagcaaataattgaaaaattagagaaataaataatgaaaaaaacaagaattattatgatccccagctattctttatttacttcttaatgcaattacccaatttttcttcttcctatttaattgacaagttgaattaagtagttcataatctggttaagacttacaaacccaatctatatgaaaacttcctatattcctatggtaaaatttaatcacaaagaaaatattaaacaaaaaaaactcataaaatcatacaaataatgtagatattttcgtcctaaattaatttgcatctataccaatcaaatcatattcaaatcttatatttaagaattttgatttgaatttataaataacaattataggtggtcagttaataattacaaaattaaatcagattacatggaattgaaataagagaaggagatgaaattgaataactaaataattcataaaataaatttaagtggttcacataataatctttaaagaaaataagctcataaaagtcattctaaaacaacaaagattcaattaaaaacataaaagataaagatagatgagaaagaacacagtttggaattctctaatggtgtctagccattctcctatactcaaaattgatctccaagtttgaatgcattgaaaacttagctcctcaacccctttaaatacaaaaataggactgtttctcaagaacttctaatgacacgacattgccttgagtgccgcaacattcaaagcgaagtcccccactttcctttttttttgctattttcttagttttcttttttttcttcttccaacaagtgaatgccgcatcattccttgctaagtcgtgacattccaagcagtttcccaaaatttttatttctcctaataatttccttaagagaatttagagatttgaaagaaaagaatttgggttcttagtttttgatggggttcgaccaactaaagaggagagagaaaggggtatctcaattgtttaattgggtttgtaaagaaaaaaaaaatctaatttcatctattttctatataattctatggtactatggcataagataagttttaaaagacatgtctattaatttaaaaaactatcaatttgcccctactcacaaacccacataaacttaaacttaggggtagaagggtcattttccaaataacccatataatctcataatcttaactatccataacaatttctgatatctttaaaatactaatttgtactaatgtgagattctcggtgctgacggtgaaaactcgtcgaccaaattacgatcgaaaatcaaaactcaaacacgagaattagaatgaggattatatgaaaatataaaaacttaaagaaattctttgagcaacaatggaggaagagaaataattgtatttcttagagtgaagtcttacaatgattttcccacctcttctcacatctaaggatagggtatttataggtctaatagcttgggggtacaattgtggtcacaagggacaagttgatgttcgggtattgtgggttgtaggtgtaggaggtggttttgcaccttgtacctttaactggtgtctggtagtcccaggtagtagaggtggtggccgttgtgcacccttggttggaatgtcagagcttgcaggtgcagtgcatccactactcatactgtaacaccctaaataattaggcacgctacccaaaatgattatgaaacccta

SEQ ID NO: 36393 - DNA, 3034 bp, Cannabis sativa
gatttattccattcctatacttctttacacaaaaatcttctttacaaccaaaagagagagagagcttaaaataactctatttaaggaaagttcaaaccttttaaaccaaatctaaatcaaaatcaatcacaaaaacttgtaaccaagaacataagaacaagttaattccatattctctaattacttcactctctaatattgaacaattaatgtttacaaacaaatgggtttattccatccctaaacttctctacaaaaaatcctaactttacaaccaaagagatagagagagagctcaaagatcctaactttttggtttcaagaaaacctaagttcccaaaatttaccaaaaccataggacaccaaaaatagctccatttgaggaaagttcaaatcttttaataatcattcaaattcccaaatcacaatgaaaaccaaatcaagggtttattccatccctaaacttctctacaaaaaatcctaactttacagccaaagaaagagagctcaaagatcctaacttttaagttcccaaaatttaccaaaaccatagaacaccaaaaataactccatttaaggaaagttcaaatcttttaacaatcattcaaattcccaaatcaatcacaaaaacttgtaaaatcaatcaaatccacaaatttcaaaaaacccaaaaaccaaaatcaacaaacctctttcttcatatcagatttcctagccaaaacagcagcagaaagcaacctaggcaaccgatcaaactcagcagcctcaattctagggggccaaacctgaggattcttataacatagaaaaacatgtctttgatacaaatcaacagttccaacgagttgggtcgatcgaaaatcaggtctagagaatccaaactcagcatcactattacttccgctagtatcagcggttaacaacccatcgttctggaaacttccggaagcgcttcctatatgagaagaagaggttgttgggtcgtttaggaagctgtctgaggagactgtgattggggatgatgatgatgagagtgattgggattgagggtttgtgtaggtgagagatgaagaagggtcggaactgtctctggttgtggttgtggtggtgctacccatcatggggtttttgaagatttgaggaatggagagtgagaagagggaggaggaggaagagttccagtggtgtgggaagtggagaaaagtgagaaagtgagagactttggtcggcgaatggaatggagaatgataaacacgtgacctctctactctctctatagtgttctctacacactcacaacagctcacacttactattgtgtattgggcatcagtagtggtgtctagcacccttaagacgtgttgccttacgattgactagcgatactttcgaaaaattattatattaaactatttgggacccgatactaaattagaccattagcgatattgatacgtaggagggtgcttagcaccactaatgccttttaacattttctatagtggtagaaattgcctttattagtattattttttgtttgggtcaacggtttgattctcatcatagcttctctctcgaaaaggactagagattggtctttctaaaagttagcttgttgtaggtggtatcatttgtgtaatgggaacctattagagttagtttcacattactaatgagtggaaataaattgctatataagatgaatgagctactcctcctattgtcaattagttttgagattaaacctcattcaccttatcctaaattctaacagaacccttgagatagttactaataatccaataaaagtagattgaggtataagacccttatatctgacatgacgcacgtgacctctctactctctctaaagtgttctctacacactcacaagagctcactcttagtgttgtgtgttgcagtagtagaaattgtctttatcagtattttttttaggtcaagggttcgattctcattatagtttctctcgaaagggattaaagacttggtctttctaaaagctagcttgttgtaggtggtgttatttttagtaatggaaacctttgaggtagttattgataatttaattaagacagattaaggtataagactcatatatctgacacaaatcacgtgacctctctactctatcttctttatattgttctttataggctagtttattgtaggtggtatcatctgtgtaatgggaacccttgaggtagttactaatgacccaattaaggcatactgaagtataaagctcctatagctaacatgtgattctaagaattgtcaaaatgaccgaaggaatgaggatatggagaataagacacatgtgacctctctactctctcttctctatagtgtgctctacacactcacaaatcactctattatttttagtaatttgtagcgtaactatctaagtctaactctcgattgtagataaatacctaagtttaatttttgtcggtaataccaccaagttatattttttgaatttctgtaagtacctagtcgttaagtgtaagtcattatccacgtgttattttcttattgttatatttaaattcatttctaaataaaaagtaaaaatttaatgacatggaccaatcaaggactaccacgtaatcattgacttgacacttaatggtcaagtacctacggaagtttcagaaatataatttaggtattattaatgttaaaaattaaacttaagtatttatctgcaactagaagtcaaaattaggtatttatgccgtatattactttttttattcgctattaaaaagaatattctatagtatatttttaaaaaataaataaaaaaatattttagtttaattagggttttcacttgctaaatttgacatgtcacttgaactttcatctacatcattaggtgtttattaataaaattggacggaattctttcaattcagcaatctcaatagttcgggagaatttttaacaatctaaaaagtttaaaagcacaattttgtacatgtcgaaagcaaaaatcatagttagt

SEQ ID NO: 36394 - DNA, 5353 bp, Cannabis sativa
agatagagagtggatgctaaacttgtaaagtaaaacagtgggaaaaggattaatgtaatccatcaggcctaagggtatcatattggaagttaatacaatacttaatgtgtataaattttgtaagcagttggtatattaattggtgttaaaatataaataaagattaaagagtcaaataagaagttgggctgttattaattactctacaaactctttggtctgccactaattaactccactaattccagagataggtccacgtatataaaagtgttacacataaatagactgttttacccctcccctcccaaaatatacaaatgaagaaaaagtgaaggtggtagggttgtaaaacctcattatcattatttggaacaaaataccaaaactcctttacataagattcacaactaccacttctaaaaagagaaacaagtttaagttcagcaatcaaattagacaaaaggccatgtattgatccatatgtttgtactgttatctctaagccttctcattttttttaaccttcaaccttaaaacatccatttgtaatttcctagtcacccatgtatataataaataaatatatgttgcaattttaccaagaatatatatatatatatatatatatattaaagaagaaaatcaaaacatagagttccctggcttgttgcagtcggaacatgcctttcagaagatttctattttaatgttttatattttaaagttgattcattggattggattccctaaaaaggtagagcctccaggaaaatatgctaaacactttgatttgaaatttgatagagttgctttgtgccaacccaattacttgtttcacccacttataatttcagtacagttaattttagtaacaattactatcagaaaaatatcttattctatattttactctaatatatatcctgtctttagaccataatgctttttttttagcaaagttgaaaacaacttacaacctagaaatccttattggaatttaccagaaaaataaactagaaaaagaaaagaagaacagtcagtttaaatacttgatggttatccaaacatgttttttcttttattccatttaagactaaaaaaaattacaataatctttagtttgaaatttgatgcttttggtgggtaacataactttttattattttttttttcttcaaaacctaacaacaaaaattggggccacaccaaacgacacacatctggtgcatatgctcaaaaccataccaaggttggtacatagtactaatcagcttctcttatataccccacaaatacaagtacaaaatacaatacaaagctatggcttttttttttttaaccaaagtaaaatccaatatgtagagaatagatctaaaaagtgagaataagtattagtgttatttatttcaaagaaagaaaaggatcttaataatgtaattccattatatttctttttttaaaaaaagtactttagaaataattatatatatatttttaaaaaaatactaaatattagtacttttctttaaattttttaattttgttatgtttaaatttttggttatgttatgttggtggactggtagtacctgcaattctcagaaaatgccacaccgcttattctctttaatcgaggttctcttattgatctccttccatggactcaaagtagatcaatatcagagcgaaagagaggaaccttcacacccagttcacccccaacacggtcttataatctctatctaaggaggctgagaggccatactgtgtgttgtgtactactgtttttgggtttatttaaaagtaaaagaaaagaaaactaataatgcttctttctctttcaaaaaggaaaaaacattatggagtgagtttttgaggttatcatgaccttcttctcttgcctttctcatttcctaaaagccttttccttgtgattcactcatacccagttgttcaaaatcaggtattttcacttcattctctctctctttctctctgactgtgtactttggctaacttgcatagatttacttttttctggttttgaacttgaaagtttaagcatatgcattgttgtggataatgggttagcttttttcatcatttatttttgatgtatatctacacatatagacagttttatcttgggttttgtttagaactagatccttcggtgtctgttctatcttgctcctagttttggtcccagatctgggtttctgttgaccaatttgactactttgacttaaatctaggcttgttgtcatagctaagtatggtgtctcattgacttttcttctaatctcgtcttgaagtgttctaaattggggtaactttttgctttaaattttactgggttgagttataattttgatctgggtttgtaatatccaaacccaagcaccaagattcgtatatagcgggtttggttgcagacccattttcctaaagatatcttgtaatgttgagaaattatcccccactatattttaatttacttacatattattgtaataaagcgtagtgcttttgatattaatcatgatgattcattctttttctttcccttggttgataactgagtctaggcactcttattcctgaatgctcgcatgttaagtagtgtttttggttgtctttttagaacgggaagtaatatattgctattaaatgaattcttttgcttaatttttatacaaacaacggctcacgcacatgatttttagtttgtctgttatttgtagttgatgatcagttgaagaatgatatactactttctcatcaattttatttgatattctagtgtttttggccattgaattaactgcaaacttattgacccagaaagcagcattgctatttgctaccatgctgaaacaaattctgagcaaactcccacggaaggtaccgaaatcagacactctagatgctgcagggagtgattcaggcagcaatagcaagttgggcaatggattcccgtgtacaataggtgggagttctctttccagcaagttaagtgttgttaaacgagtctcttctgcggtattcccaacgagtattgcagctggagcagaggcagtagaacctcatttatcctttaaagatgtctcaaatcaacagaagcagaatttatttatcagtaagctgaacctctgttgcgagatcattgattacagtgacacagccaagcaagatgttaaacgggaaacattgttagagcttgttgattttgttaattctggttcagcaaagttcacggaacctacaatttcagcaatgtgtaaaatgtgtgcagcaaacctctttagagtattcccacctaagtatcgttctatcatcggtggtggtgagacagaagatgaagaaccaatgtttgatcctgcttggtctcatctacaacttgtgtatgatctgcttcttaggttttccagcagtaactcacttgacacaaagttggcaaagaaatatattgatcattcttttatttcaagattacttgacctatttgattctgaggatccaagagaaagagattgtttgaaaacaattcttcacaggatctatggaaaatttatggtacataggccttatatccgtaaagttgtcagtaatatcatctaccggtttgtctttgaaactgaacggcataacggaattgctgagctgttggagatttttggcagtgtaattagtggatttgccactccattaaaggaggagcacaaaatctttttgtggagggctcttattcctttacacaaaccaaaatcagtgggtatttatcaccaacagctaacatattgtgttttacagttcatagacaaggatcaaaagttggccggtagtgtgatcaaaggcctattgaaatactggccgataacaaatagccagaaggagttgatgttcttaggtgagatggaagagattttggagttgatcaatatggttgagttccaaaagattatgatcccactatttcgacgaatagcttactgcctcaacagcaaacattatcaggtataagtcttgtttgacagatatctagacattttgctcttttgtatcgcctggttgtgacttttcaggattttcgttttcttggtgggtaacaactaaatgatgtgaataactacttccttcattgttgtggtgactataactacctactacccctcctttttcaggtggccgaacgagcccacttgttgtggaacaatgagagcgttcttaatctcaccactcaaaaccggcaagcaattctaccacttgtcgtcccggctctagagcagaatactcaaaatcactggaatcaagcagtgctgaacttgacattgaatgtgaagaagatattccgtgagattgatgaggagcttgtccttgcttgtcaatgtaagttggaagaggaagcttcaagattaaaagctgcagctgagaagcgaagattaacttgggaattgcttgaaacagccgctggtctcccatccccagctactactaccactggtgctggtaactttctagttcccgtaaagcctgctacatgctctgttgcctgctaattcatgtggaataacagtatttggtaaagaaagtgaatcatagtatgagatgttggttgttggaagatatgagtttgggatgaaaaattgggtgtgtattagtgcctggatgttgtgataaattgtattagtgatccctcccttgcccttgaaatcacaagaggcccttttgcttgcaatattatgtcaatgaacgtctgatgtatattttccacaagtgctgtttgtctttactctttagcttaatatctaccttccataagttgcatttataccccttctaagaaaatattgatcttagttcaggtgttttgaaggctctttttttatttttataatatatattttttgtagaaagatgcattataaatactgttagctatagtttttctcatagttatatgatgttctttggagaggaattatgacaaattcaaaaattctatactaatattatgcaaacttgttcaagaaaagtgatgagaagctaataaagtacaagcagtattattacttaactatttaataaaaccattactaattattgtaggacaagctgaatagattggtattgcttttatatatagggatttttatatatagggatatatatatttagggatatatatatttatatatatatatataatcaaaatggtttgagtatagttatagtagtggtcatggagtaaaaatgtgctttaatcacttgatactaaaactttcaattatagagttgcacttgtataaaaatggatgtatacatattttattcacatacttgtgaggtt

SEQ ID NO: 36395 - DNA, 12207 bp, Cannabis sativa
  modified_base (10831)..(10831): a, c, t, g, unknown or other
tataaatatatataatatatgaaaaattaatttatatatatacattatatgttagatatgctaaattattttttttcactcaagtacgtagcacgtagtattatatatatctatatatatatatatattattcaattcatgaaattaatctcacgcacaaataccttattatatatgatgtatatataatttatatgtacatattcactaatgatgatttgtaaacacaaacttagcacacacttacgacttacctatctataataattgaggaacccattttaattaaaattgatcactacattttaggccatataattaagaatgatatttgtgaccgctatatgtaaacgtatacacaacctgtttcttatgttgatttcaggtgatacatttttgtcattttaatttatatatataattaaaaaattagaggtatgaaattgaatactattatacgtatcttctacacatatatataatatacattcacagtaagaattagcaattaaaatgtacatattaattaattaataattagctgacaattaagtccacaaaagtacattataatcaagagctaattacaaatattgcacacatatttttatatattgagataattactatatattgacgagctataagggctaaagttgttactctctcagtactctacaaatacacagagatctagagagagagagaaagaaagagaaaatgccgcaacatatgcatatcatgttatacctcgaaaccttatctaattaaaccctaataagcttttatgcggcaggtgccactgtaactcgatcttcgtcatcgtcatcgtcatcatcatcatattcttggtaagaagagaagaccgatgcaacttggtattccttcctcacagcttcatcatctaccatccaaaatccaggcttcttctcactactagtaagaatcaccatattaattattaattatagatataaattgatgaacaagctaggtgtactacttgacctcttatttatagctagcaaattagcaaagggtatactgcatattgttgttataaataatatataacaaccttatcatcaaaaaagatgtaaaagattcttgattattcggtcttattaattgtaatagacaagacattgataatcgatcgatgatagcctctcgaatatggtatgaaataataagaaccagattttagagagagagagaatgagacacgtgtaggaatatcagttgtgttaaactcatgcattacacgatctaacgcatgcataacaagtcatgacacatgactcactcatgcaactacgtcaatttcccttgacaccttggctgcccttggaccattcatatatataagatttttacatgcacacatttgacacaccattaaacaccatcttgggatttagatactatattttgaagaatcgagagaaaagatgctatagtggactgcactagagatatttttttgactagtcatgcactaactcaattttatgattgcattgatagagagatataacgctaattaatcaatctcaatacttttttttaactcggtttcttctaagcctttgtaaattatgctattgatcagattgacgcttactatatattataaaggctttgctagtaataataatatttttattatctatcctaattggtagttttgagctaataacaatattcttattatctatatatcctaagaaagagcctgagaaagaatttagaaagacattaaatttttaagaaacaagaaacaaaacacacaaaataatacaaaacaaaaaaaataacattaataatacaaaaaattatccaccaatctaaccgtatgtagtacatgtattcgtagaacctacttcaatacagataaatatttaagatattcaaactcatttaatatgcatattctacccatctaaccgcagtacaattaatttcataacttactttactacggataaatatttaagatatttaaactcaactaaataaagaattttaaagttttagtgatcatatatttttccaataacactagctacttttgcagttcttcaatcaacatcaagaacctgatgcctaaaaaataaatttaaaatatgcatcaattgtttattgacatgtttagttgagactaatcaattttcacaaattctataaaatattacataaatatctaattaaataataatataccgagaatgaggagatcgcattacaatttaaaatacacgataataatagaacttttcaaacacactacatatatataataaataaacatatataaaaaaaaaaattataaattacaacacatgatactttacatataacactaatacattaacttaaactaaatcatataatatagtttacctaaactatattaaaattaataactaattaatttttacaataacaaattaaatctttggagtttagccagatggcatcttggaccaccatgttgatagaaaatagaagcttttccagctgtcttacttcaagatttcctattacgatacgcgggtgctcactcaacttatgtactttgacacttgtcgtaaataataactctgaattaacatgtagtcttagtagcaagattgtaaaacttcgcaatggatttgctatgtcttcggtggctgggcaattgagtcccacgagtctcttgttatgaactttttcccactcttgtgtgaggtgcatcccgtacgataattgttttgagctattgcaatatagtcattggatgttggtaagcaggcctgaggtcaggatattgaaaaatagatgtggacggaagtctgaagccctattgtgtgtacctcgaccacaatagtgtatgaactggtaaggtaccaatataggtctgttatctttgttggcatgaatatgctacttttcatgtgtaagagtttggcaaaagagtaatctggatagaaatcaaattcttcggatatagccctgccatatccccgaacaagagtgggataacttataaagatcattggattactttaaccctcaagttttttcttttaaaaattgttttgacattgttggggaatgtaggaaggataagagataaattatccatgtagattaaagggattggatttttaatttgtgtgttgatcatatttatattaggtttgcctggccaagagaggaaatcagaaatcacatttatctttccatttatgtgtttgattttgaacatgtaatgtgagaaccacatggctaacctgagttgttgagaattgattgctttgttctatttgaacataagcatcctttgaaatacgacaaaatttatttccgctaggaaattgtgttcgatgaggtgtaactcgaattttgtgatgcctatttttacagacagtatctgtttgagagtgaaatggtagtatatttgggaatctttgaaagccccactttgtaaccgcactttgcgttatccacgatcttctcccaataggactgctctctagtgtttgtcgctcacatctgtctgtaaatatattctttttgcgttagagggaatctgaaggaggagtaggctttgcattacctctttcatttttttgattgcgattgtttgttctatccccaaggaaaagatctttttgggagtattttttgataatgggcttgtaatatttagtggggtacaaaatttcctaggtaatacaattacgagaaattgttgaatttagatttttatgaggcattcatttgagaatttcaacaactcttgggctatgtgttcttgggcctcatatttttcatcatggagtttcattctcaggaatttgatttgtagccggcttattaccatcttcttttcagagagtatgattccatatgtttcagtgatctccggaaactgggtcaggaggtttgcatgggccttgttatttggtgagaaaaacagtatatcatcaacgtagattatgacttggttaaggattggactgtatattttactcatttctttctggaacagggatggcgtcattttgagtccaaagggcatcactgtccattgaaaatgagaatttgagatgcaaaatgtcatcttgggtctgtcttcctttttgatgcccagttgccaaatacccgcttttagatcaaatttaaaaatatcttcgctttttagatgctagagcaaagagaatttctgtttggcaagaaatttattgtccaccaaaaaatgatttagtggtttataattaattactattttttgttttcttttctagcatgctctgccctattgttgacataaaaggcgtaacatgcccatggtgattcgatgtctttgattataacctttgtgatttaaattgatgacattcttcgctcaccatttgttaatgttcaggatccatttcagggtggcttcctgttattggattgatatcctcattctgtttgaatggtagagagatgtagaactctttattttttcataatggattatttcacttcgatgagaattcttagtgagaatttgcacatgacctttgtattagtttttctttgagtgataaaaatacgtcttgcaccatgtgaaagtaattcgaattttcgctccctttgggtgaagaacttctttaggccaatccttgtgggagtattctaagcccttctttttttgtataaaggtcgaatcccactatgaggtcatttcctgtaagctttgatccaatgactttgtggacaatggaacattcgaggaagaatttattctttatcaacctgctgatgattgatttggtgtggagtacttggttaatttcaacttggaaatactatttcttagttagttgtataactagttttttgtgtttaattattagttttgttattttgcgtaactaggttccaagtttcactatttgaaatgatcatttcaagtaactagttttcatgtattactttttgattttgttgttttatgtaactgatgtctttatgtcagatttttcactagcttataatcgtaacttgtttttgtatgtctgatttttttgtattgattttaatttgttcacattattgttttttatgttttgctaaatggggggtttttccattttttttagtgttttgtctatttttcattttaactttgtcttattattttttatatgatcaaaactgattttataggttttgttatggtctcataggtttgttatgatttttcataggtttaaaatgagtttcacatgttttgagagtattgtaatggaatcgctccatttaaagatgttattatattttttttattattttgtttctatgtttaaaattagtttttacacttatattttgtttttagattattattgtacatttgtgtattgtttttaattatatttgtgagtttttttttagtaattgtatattttcatttggttgactaataaaatcggtttcagttatcttcattgtttatcatttcagttttgttatgatttttcataaggtcaaaaatggtttcataggattcacatgttcgaaagtggtttcacagattttgagggttctgtattggggttgctccattttatgatgttattatatatttttttattttaagtttctttgtattattttatttctaggttcgaaattagtttttgtgtgctagatttttaattggttgtttgatatagttagtttttatgatttattttagtcgtctctgtactaagcccagttttttagtgtcagtaccaagcccagcaaatttttcgacgtcggtgccaactccgatgaccattgttctttaaacatattattaaatattttatggtattttgttgaggttcccatatttttattttttttctctaaaaaattatcatagtttgtccattaagtttcatgcccataaatatgtaaactagttttttttctcttatttttgtaaatagctctattcaaatttataattggcccaaactggaacataatttttttataacaaattagagattattctgaatagagtattcttaaatagaaattttacagtatatatattaacttaaattttatatcataccatatatcaatttataatctattttgagtcaaaaaatagtataatatattttttctctatataatttaaatattatatgatcattcttaataaaatactcgcatttttattcttatatttatttttcaaaactctataaaaatataataaagtaggtaaaataatttttcaattaacttttaatgaatgaccaaatctagaataacaaggctattttagtcctgtttatttttagaacattgtgggcatctcaattggcttaaagcacgtttgtgttagccgcagcatgactatctttattcatggtcaggtctaaagtattcttaaatttttattggcccataatttatatgacgattatttcaatgctagcaaagttttctttccttttttgtaaacaacataatttatattatcagatttgtctattaataaaaatttccatttctctttaaaaaagaattagaatatcaaatttctaaaagcatattacaataaaataataataatagaaaaatgaaaaaaaaagtgagcttgctggtggagatatccatcaccatcaacatttttaatattagtatgattttgaaaagaaaccataacaataagaagaattagaattgctaacaccacaataaaatgacatactacaccatctattaagtactttaatatcaaatcactttatcaatacaatctcaaaacctagtcttcaaacaacaatgccaactctttattatatcaaacctaatcttcaaatcaaataacaatctaaacaattgctctaccaaatgaactccatctctaatttacaataccaatattgtattttcacatagatcccatttaacactatttttattctatgtttctccttcctgctagttgaatttgaagaaccaaatttacaagaaaatatgtaaaccccaagtggttttttcattgaacaaaagacaacttatcaacatattaataaggatgttctacattatgaatagttatttaacataaaactacatcaattggaccattttttcttaagcagaatgtgaaggggattccttttttttctttttctttttgataaaagagaagaagtggccaagtaactaactctagtttatttatgtaactagactagatagatattatatatctactcatgcttccttatcttaaagcttcctcttgggatcttgcttagaataccagcatctagcttttggtagtgattctgaaactgctctaagacctggtaaacgaagttgtcaatctgatcgtcgtacttctcatacagaactggaaatgtgtggagcacaacgaaaccttatcgaaacaaacacaagaattagtgtgccaaactcaaaacaaagaacatgtaaatatatgattcagtcatggttaggcccttggaaggtggccatgagatcaaatcccaaataacatttggaacacaacagtgaaatagcaatctgagtatgattaatttataatcattctaatctaaacctcctgaaattcataggatggctctaattaatactgtgagacttcaccctaaaaaaataaagagcattaatattggataccagaagtgtctagcactacttagagatggcgccgtacaattggttagcgatattctccaaaagttattaccttaagttatatgagactcgatacttaattgcattaatagcaatatgacatcttttactgaattgcatcaataaaattcttaaaatccttgtcctcttttagttctgaacttttttatgtttattgtctttgtatagcattccatttccattataaaatttttcattcaataattgacaacggcaaacaaataagaaatctcaccaacatatagcacagtgagaaaattgcaccagcttcctagcatagcagcagcccataagcctaatatgacctgagaggattatcaaaaatacataaatcaccaagagacaatataatacagagtttgctggtgttaaaagatgtaacaaatggtcttcgcaataacataccgcaaccatttgtttcaaattccctccacatgagacatcctgaaggaactgcaatgctcgattgacctcattaccaaccgagacagcaacattcacaaataactctttgggcagaactacgcgaggtactttagaagaggaccttaccaaggacaataatagccgaaaacaaagaagaactcagctctaccattacataatccaagaaaagaagcatagacataaaagtttatgtgtacctgctgagtaagcctgatgcatttgaccaaatgaattgagcaagcataccaagaaccagaaacaagcatacaatagttaggaagttatagttaagccattcgaagatcacccagataatggttgcaccacttaaaacactagctgatatctttttgttcctccacaacaacacatcagcagctatatgaattaaaggaaaatatatttaagtttaggaagaataagattaattgtcagcatagaagttaatgaataatattcttacattttccaccacccaaaatgtgatgaacaggcttctggcgaccaaacaaccgattaaattgagcagagactgtatctgaagtttcttccttaaaaaatgatacagatttatgttttggagcattttctgcaagtgtctccacaaagttattcaacaaattctcagctttctcagacattgttcccactattcaattcaagaaatacaattaactatggtcaataagttattataacttggaacttgcattcaatgaaaaataacataggaaaataaaccgtgttctttgtgctacattgggtaattatacatggtgacaccaaaagagaatcaactgatggaaatgcaaagagtctgatgaaattggaaaagggaatttgactttctgataactgaaaatgatatccacgcacaaaaaaaaagaagaagaagaagaagaactagatttaactaataagatcagtaagaagtggggaaaaactacttaagctaattcaatataagcaaaggcagcaaagatgtaagaaatggcaaacaaagcatttagaaaataaagtcaccacctaacggtgagatcataaactctgtcaaacaacactaagaccagccaaaaacaacatgattcccagaacaaaaatcataaaattagttgccagaaacaccccccctccccaacactagcagagtttatgcatgtgaaaacctttgactttgtgaacctgatcacaaaaataagcacacaaacaagttttctcagttaacaagctttttattaactcgaactgaaaccacttaagtataattttaaaacaccaaaaaaaaaaatggaaaatttaaaagaggcctctgagatttcatcaccactataaatttatacccagatttgtttttcgagggtgtgcaaaaaaaatgtaggggaaagatcaaatacgaaaactgaaatcaaggaagccattaaagtacgataaagatggtaaatttttcaaaagaacaaaatcccaaaccaaaaagattccttcaagactgaataaaaaagaaacccagaaaccaaatttcacataagaatttaaacaagcagtagcagaaccacttacactaacaacaaaagagaatattaagagttatcaacaaaatcaacccagaaagataagtgaataaacaagaaacgtattcatatataatcgatgatgaaaaaacgaaccagaggcaaaagggttggtgggtaaggatgtagttgaatgaaagagcgaaactgagaagaagaacaagatgatgattacgtacaaatatgggagtggatagctctgctatgtgttacttttcttcctttgagcaaaaatgaaagagcatggaaagacaagtcaacctgaattaaaataatgacataattaattaaattaattaacactaatattaattatctattctttatttattctctcagcaaaagtaaaaaaaaaatttgttctttattatttacctaatcttaatcaaaagttcttttataaagcaaaccttttcacaagtgtagctttcttaaaatatgttcggttgtggaattggaaatttgtcaaactaagaacatgaaaatcttaaaaatattatgagtgttttaaaatccacttactgatgcgatccttaatcaattcttcagtttaaatttttttatagttgtgttaaaaactttaaaataacttacaatatagaaatcaatattcaaactatttattttacacgcgtataaaataataataaaaaaaaaaacagattctataaattttattttcgacgtgttaaattttttttaatttttttttaaaaaaattcagatatcttaaataattataatatatacaaccactaaaaaaatttggactaaatatttttttaaatattgaaacagataatggtacatcatacatcaatatatctatttttaaagggtgtattttagaattttccaaatatatataaaaactataattattatttacagtcgcgtagtgtaatttttagttgatcctgctattataaatggaacatgattattttgctaataaaattttaaaaaattctacaacgcaccatcttaaaaggatgtaccgatacatttttatttattttggtaccgaaataattttttggtcaaatctattctcatagttatgtatattatagttatttaanatatcttataaaattttaagaaattggaataaattacaatataaaaagtaatatttaaattgtctattttacacgcgtataaaataaaagattcacgagtgcaactgactctgtttgaaccctattttcagcatgttaaatttttctgaatgtgtcaaaattttgtaagatttcttaaataactatatataatgtttacaactatacataaaaaaaataaattaaaaaattctctcgaatatcaaaataaataaagatgtgtcggtgcatcttttaaaagggaatatagtaaaattctccaaaattttataatgattaaacagtttgtttttttttttttaattttttaacaagaacagaagttttagtattgaataataaataaaaagtttggattgtcattgattgattcttgaattttttttaagtaaatttacattctctgaattgttactatggttaatatcatactcttttatttatttatttatttaaaaaaaaatgacataacgtgagaaatttatattttatttcaaagttgtagactctcttaattattattgaaataacaagttgtaccattgctgatggctacctacccaaaagaccaaacaaagactccattcattactttatgtttgccttttcttatttttcttttgttttgttaataaaatggtaataaattattgaagaaaaaaataataaatgtttataactagacccatcatcatagtatggcgtggccgcccattaagaatggttcaaaaagttataaaaaaaaaataatttatacatatactatagggtaaggttgtaaagggtgtttcatttaatttttttatgattagttttggtatatataagagttttttagtctaaattatgttacgatacaacatatacattataaaaacaaaaaaataattggactaaataatttcttaaataccaaaactaacaaataagaggtttactagactgacccctttaataggatctatactgaaattctttatactatatcaatatcatataaatacaagccatgcaagtagccactatgtataatattaaaaataagaattgtgttcatagagaacatgcctatgactgagtgatgagtaataatatatagtcgaacacagaatagcatagctcactcagtgatttgaatttcaaagtgcatacacataaaaacagaaatattattattcgtcataccatgatcataccaaaagcaattttgtaggttccaccatgtaatgatattttgcttagatacttattactattacaaaaagtagcatattgtatagggtaaatctacaatatcactaaaaaagtatactgttttgggacccatatctcttttg

SEQ ID NO: 36396 - DNA, 11913 bp, Cannabis sativa
aaaaatattgagttcaataattaagacattaaatataagtattattggtagatgttcaaacagtaaaataaaaatactaaaataaacatgttttcattaagattagaactcatgacctcatcctttaccattatatctaagcttattttatgtttataaatatcacttttatttataaatatatgtttaactaactaaaatgcatatatacgtaaaagaatatatgtatatatgaaaattaacattaaaattttactttttttttccttaaattggatggatccaattcagtagatactagatctaaaatactagataaatccaatctcatccaataaatatcaaatctaaaatattagataaatacgaattaaaccaataaatatacatgaaatacataaaattcaatggataaaaaaatataaagtccattttatattaaaaaaaaattatccaatattaaactcagctccaattttatcaacaacagaaactataaaacgacattattatagcggtcgtctccctagtgcctattcctatatcacaggcgctaccaataaaacgacacaattaatctcaaaaccgtaaaacgacaacaagttttttaaacaacaagtcgtttaataaaatataagttctcagaaaacgacagcaatgtaaggtcatcacataaaaaacgacatgtcgtttactacattccctttcccagctctgtaaagtccaatatatagtgctctcttttctcgtcgagttttgtttggctacgaagaaactcaaagagaaaagaaaaaattagggttcttgttctgacgtaatggcgttcgcaggtcgtatgagatcgactatcccactcgcatctaagctggtcagttcagaatcactcgccactgccagtagatcgaaccctcagaaagctctactttcccctattttcaccgattctgaggttggtttaatttgtgagaataatgtacaaattagggtcaatgaaacattttctattgatgtgtttgttaatttactgcgatttggtttatgattttcctttcaagttttgtttttgaaaccaattgttggaatgatttgtgaaaagggatgtttttttaggggaaatgaaaagagtggggattgatattaggggcaaactctttgacattgattatctattgtgatgtattcgacgagaccgctcttcgatcagaaccttcgtaacagacctgtttcgaatatggctaatggaactattgttgagatggcaatgctgttagattcaaaagcagatacagaaccagaaagcaatactcttcttatgtgctttcacacataagtcttgactttattccactttgtctctctcaattgaaactcttttcattctaatagataatacccgcaatctcgggcttaatctcaatgaatatctccttttcattctgccgtttttctttttccctgaatgtgattgtttatctccattcagtggtttaatctcatctttacaaggcaacccacgatgcaagtcatagcagctacataacccaaatgacgcagctctacttttatcattaatcaatgagctcctaaaattacaattccaaagcaacccaatttgagatttgttaaatttatgaaattccatgcaattatagggaaaataagcatcacaaaaacgttcatatctcctcaaaggctcggtttttccaccacaaatgcaagtgggttgtatttaaagattatgcgagtcttagatttttaaagattatgcaagtcttcttatttgcatagattgatattgcaaagaacttagatgtattgtaaatctagttttatgttataagggaacctcggaacaacgatttctgttttgggtgttagagaactaatgttgatgaacataacataagtacggattaatgcttacatagtgtcggttgtttaactgtaaccattgacatgtttcttataaatgcacatttttatatgtaagcaaagtgtaaatattgtattgacaaacttgtatttgcagatctccaggaatttctcaactgctactgagaagaaggaagtaaaggttaaggtaactgaactgtttttctttcaatgctacatgttcaggcaatttctagttacttcaaagcaagaatcagtttatcatgtgattatgtccatatgaaggaaacatgatatatcatcatttgaagtaattatgcctcctctcccctgttctttctgtacacgataattctgaaactatagcaatgttctttgtaactgtgtaccatcatttactcatattgttgcacattgtgcatggttcttctggtctgttatgctaatgtaaaccttgacatgagtctctgttctcagttctttgaagtgcctctctttttaatattataatctcacattcccaaactgaaaaattatgttgtaaattatcttatttgcactatgtaataccactataacaatatgtagtaaaatgagatatgcatatacatttaaatacatcttacactctgcatagaggttttatgttttgactacttgcagctagttcaattatatgagcaaatcatactaattgggcattattgtggtgttccaggttccattggctttgtttggtggctgtgggaactatgcctctgctttatatgtggcagcagtaaagactaatgccttggataaggttgagtctgagcttaatgatattgttgaggcgacaaagcaaagtcctgtgttttctcaattcaccaaggatccatcagttcctgcaaagactcgagtgggtgcaattgatgacatttgcatccaagctaaattttcagatgttacaaagaacttcttgggtataatcagttgctcatagtatttattttatgttcttctgtctttgaattttattaggttgtgtttgtattatgtccgtagttagactttagagttgcttacttttttttagtatcacttctgcttattaggttctttatatctttatctatttatcttgcagccctttttcttctatggcttgagtttttttagttaaaatcttatttggtttctttataattgtaatcaatgttgcttcactgtatttctgattttgttatctctagctgctgagtttttggatttttgttgtatatataaaattacaccactcttgtgtactaaacagcataagttctcattgaatgtgggtggaccaatgacattgacaaccaccctagtcaagacactaaattattggggttggtctacctatctgcaaagcagccttatctccctctttcgatttttttgctttgtagatatggttaatataatagaagtaccaagtaccttacatggttcttttaatactttaccgtttctgtttctttttatctgcaatttttttttcactttaaaagttagatattagctttggtggcagcagattttagtctcagatgctgattttattgtaataatttattgtatttttagttaccgtggctgcaaatggtaggctaagatacattgacagcatagcaaagaaattcgaagagttgactatggctcaccgaggagaagtgagagctattgtgacaactgtcattgtaagttttaattcttatgtagtttcttttaattccttatttcttgccatttgggcaagaacaaaaatcattattttgatttaaggtaatgaattgtgttagtgttgaagcataattgggtatgaatagttcttggcagcctaccatatttctcgtgggatttgccacaagacttgtgttaaatttactgtgacgaataccttaaagttggatgcaaatgatcagatccatagatgcattcttttgaaaattttgatgtgagatattggtcaatttcggaaaatatatttattgagggattttttttgtttgaccgtgtggtggcctgatttattaaatttgcaaatggtaaccatgggggtgatctggttttggactttgtgattgctttgatgatacataactctggcaatgttgagtgttaaatcgttgtctaggggtggtttatatattgggatagcctttttgaatttttgatgcaagtcatgatcaacttctatgtggttttctcacaaggtctgagattcgagttcctccttggtatctacatagttttctggtcctcgagtattgtaggggtaggtgggggtttcctagtgtaagaaaaaaagatgaacaacttttattactttctttctgatctatatgttactgtcttactactagcccattccacttgaggaggagaaagagttgaaggctgcattgcaagatatcattggtcatgggaagaaggttattcttgaacagaaggtaagtactgagttgagctcaactcacttcacttgtttcaattcacagattttgtacaaacagtttttgactgtttcttttttacatggcagattgataccagtattctgggtggactcgtggtagaattcgataggaaggtgtttgacatgtcgattaagactagggcacgtcaaatggagaggttcttgcgagaaccgataaacatcggcaacctctaaatggtccggtctacctacatgatgaaggccattccctccactcattttgcatctgtatcagtttctcttgaagcttgaagaaagagaatattttttattttcggttctttaaccgctcccctcaaaaatttgcaaataaaagcttcaatttcacattttctttgtcattgtttgataaactaatgctgcttttacttttgaaaaggctcccaaattttcaatcttttcggattggtttcttagataattaaattatgtctcactaaaccttaatactcttgtttgagaagcaaataaatacttattatgaataccattaaagggatctaaagtacaattctcatctttgattatgtttcttttcaccatatgaatatctctattaacattaaatcactctagaaatttcattcaaaactccaatgtacaaagaatcataaatatctacaatccaatgatgaacaaaaagccaaccttttttcactttctttggcctttctagcatgataatgcctaagaacttttttcttagggggcttcaaagttcaaacaagacaaagatattaactttatgagagttttttctttggtacttacaaagctttacaccccatgatttattcatctttattttttttttctatcatcaaatttaacagaaactttattattacaaacaaaaagaacataggtagatagaagaaggtgtatataagacagaatcaacatgaagaggtgagttggtctttcttgtctttatgaccaagcacccccatattgcttcgtacatgctcacaagcataaccattgtactttctttctttcactagggacagctgtacttttgtagatatacatgaaaacaaaaacaaaaacaaaaacaaaagaaacaaaaaaaacaacatttgagtagcttaagagttttctagtcacttttcccataaaacatgcaacaaactactactccttgttggctcacattacataaaaaagaaactcaaatattttgtaatgtataactgaaaattgccttaaagttttgattttttttcatgaaaattgatttgggggtattaagaaaatgactgcttttatgtatgtatataaagtataaaacaatgctcaatatcccatgttactattcataacaagattacttttttattttttttgtcctagcatgggggcatgactatgtaggattaggtaaaggaaaatgatatatcctaagaatatatacaacaagaaataatacaggataaggtttttgtataccttaaccactgatagctacagtatatatataatatagacagaaaaagtctataacacatctaaaatgatattttaggagaccttttatctcgacattcatgataagttttcagtatgtttttttttaataattgtatgtgttatagttaattatggttacttataaatttttaaattttttgaaataatttataataccgaatgtaaaataaaaatattttattatacgcaggtattgtgctcttgaagcttaatttttaacactgtaaactatttaaaatatttataaataattctaaataattaaaacatatataatcttaaaaaattggattaaataagaaggctaattaagagtctttacaaggttatatattctttaaattacaggtcttttgtagaaaaaaggttaattagctaaaaaaagaaatgattatagagattacattacagttcctttcaattcaagggtgaatagtttgattagtaattagagtgtatgtgaatacaaacatatatacatataaagattgcatttttattttaatagtattttaataagggtaatagagtattaatacatttacctttgtaaacattttaagcaattaagaagaatgattgtgatggtccaaaatgatagtggataagactaggacacgtatatataaatatataaatacacataaataaatatatagtctttcattacaagtagctgagtgtacaagtagtctctagtcattgacagagaggagccataatatattgggaagaactactaatcaaatgggaatttattatgaaattattaattaattaattaataagcaagctgtccatttcagcctgcattctttcatgtatatagttgtttatatttcaatatacctatccataaatttatttttctatctagctattgtaatacatgtaattttgggcttctcccatgaattaatgattcttatataagggtacatcacatttagttactttatagactaacgactagttttatagaccaacacgagtattttcagcgtgttttgttctcattcgcacgtttcttgaaaaaacttctcaggaggtcacctatcttaaaattaacccaggtcaaacacgcttaacgtgaagttatttcttgatgagctaccaaaaaacaagactcaccttgttgatataagtagtaccaatcaatccatttaagccttcttcaactgtgtagtcccatacctatacagtctcaaaatcatcacacttgatctgtgagattgcacagcttacctgatatttttccttacggatcagaggactactggctgtcacaatataatcaatacttaatgggtatgtttttaacaactactaggtttatatatatataattgtatacatagtagatgtttaggcactacaaaaaaaaaaaatctttagtaatgattttttagttacaacataaatcttttgtaatgactaaatgtgacaattacttgcgattaaaatgtagtatttatataaaagttatcacaaatttagtattagtcataacaaatattgtgactaaaaatacatttagttacaacaaattgtaatttttgtgactagtatatttagtcacgtacattttagtcacaacatatgaatgatgatttataattagtcatattttttttttggcttgtagtgaggatgtagtgcaattttttaaagaaatctagtgtcgaaaataaggtttgaaattgaaacagtctagtcttttgtatgtatacgtatttgaaatataatatttgaactttaatttatataataaattattttaaatttctcaaaaattcgtaaaattatcttaaataactataacatataactactaaaacataaaagaaatttatggatacattgatttttaaagaacacatataatagaatagtacctatataaatcttgaaatattaaaaattaattaacatgcttttgatatggaatatggtttgtattatgagaaggtaatgtggtaaagaagcatgttgggatcggttgttgtcttaaataattgttccatgcaataaaagaattaaacaacccaaagcatgcaaaacaagacaatgaaaacacatacaaatatttatataccatcaaaaaagtacttttattctaattatatatatatatatatatatatatatttatacaaatatatatacttccaattcacgtgtaccttaactatataattaattaattaagaatggaaagaatgcaaggcatataatatatatatgggatggttattaaggtctcttcctcttcttgtgtttgactctttccctagatagctagctttttgtccttttgtatacatatgagaaatcttaaagggtacattcattgggttctctccgattcgatccaattaattttaatcattcgaattaatttagatgttggattagatcatttctatatgtatttttataaatatctattggattagtttatatttaactaatattttagacatagtattaagatcagatcgaatttatctaacattttaaatccagcattatccaataaaaaaataaaatttgaattctatacatgtatttatatatattaagtatagtaacataaaatttaattacttattcaaactaaaagaaaataattagttcgattaaatattagatgtagtgaattttcgaacacctctcattcgattccaatatttagtggttaattataattagattgtatcgatttatacacacctctaagatacatttcgtcatttcattgttggtacaatttgatattaagttccacacatttaaatttaataaccatatattaaaaaaaccatctactaataactcataagatgttattttataatggtgttggagactactaataaatagtatttaccattgaactacgattattgtagagttttgtcctctaaatttttatctgttgcaaaaattctccctaaactataaaaactttataaatttcctcctataattgcattttggtcatttatttaaataatttgttgatatagcattaatatagcgttaatttaacttaattcaagagttgagataaaaaataaatacataattagcggtctaatgataaattatgagagtatgtattgcattcttaaggctattgtttatacgtttaataccaatagattggattttaggtagcctaaagttattaaataagccattgcattacaattatacttgtaactagggatgcatattttctccatggggatgggccctgcgggactcgctcctaatggggcgagaattctccctataaatgggaaggggcggagacgggaatgcaccccttgcccggacagagacttataacttaattaatatttttattattttttattaatattttatattttataatatgcgtttgtatttttttaatatattagtgtcatttttataatattttaagttgtattttgtataataatattaaataataaataatgtgtaatatattaaatttcatgtaattcaatatttttatatatataaatttttaaaataatttttttttttacattagagaattcccatttcgttccagatgggaaataagcgagcaatgaaatgtggatggagaataaaatacttaacaggaatggggacggaaggagcactcctcgctaattctccatcccgtgtacatccctacctgtaacttataaccacttaagcaaattgttataaaaaatgagaagaataaaattagaggaggatatatttgtaacaatttgcataattcgaggagaattttcgcaactaataaaaactcaagggacaaaaatcttatttattctaatttttatatatatatatattaaggcatatatatatatatagatatatatagagatgcaatatttttcttgactgagaaggtaattatcatctttctatttgagacagctacacttttgcttccacttcacataatattaatctttctctctctctctctctctcttgatcaatggaggtccccctccaatccgtttcccactccaactcatatcacacaaccaacaacacaatctctcttatattttcatacatacatacatttcatatatatatatacacactactattctctagtgttaccatatatattcctctcctatatatatatatattattatgatcatgaagaattataacaacaacaatcctgatcaagttgatcattataatacaaacatgttattaaatattaataatgatactaataataataagatgataaagaatgtgaagttgagaaaagggttatggtcaccagaagaagatgagaaattgatgagatacatgttgaggaatggccaaggatgttggagtgacattgctagaaatgctggtcttcaaagatgtggaaagagttgtagattgcgttggatcaattacttgaggcccgatcttaaacgtggcgctttttcgtctcatgaacaagatcttattcttcatcttcattccattcttggtaacaggtaataatctataatgccaaatgtttttagtgaaattaattacatattttatgtaaaaacgaaaaacagtagctattctttgctttgtttgtttgaatatgcattatttccttaattttactttgattttgagtggtttttaatcattattaattagaagctaaattatatttatataagtttatggtacaaaattatattacatatgttacatgtaatgggaagtgtttatattgaaaattaattaacactttatgagtttttataccattttgtgtataatattttaaaagaataattattttatgagaaaaataaaaaaaaggagttaaaaaaaataaaaaatggtaactaattatcctaaattgtttttccatcttttttatttttctcacaaattaaaaaaaatatattttgttaaatttttccaaaaaaaaacataaaagtgaaaatttctcatgtttaaatcacatatatgtatgatagcattatatatatacatatatacgcatattttttttttttacataatatatcgatattttttttatgcggtgaacagagtcacacatgaatatcgattatatttgttgtttgattcagagaaaatatagaaagagaggcctgcagattacaaagacataaatgaatttaatcaatcataatggccaataaattaaagttatgtttattgttaataattaatattgactaatttctttggttgactattctactatatcatcttttatgcttattaatggcgtaccgttgtagtaattgctcattattcgttaatcttatgcatttatgtgtgtgctgtgtctatataaatttagagaattactaaaaaaaaaatataattggtatttagtattatttttggtataaattaaatatcgaatcatttcatgtaacttaaacaattaatttttagaaaatatcactaaccaattataaaatgtcacctataaaaatgctaaacactactaatactcaataattatgctcgtaaatttatatgtctatatattatgtatacaatacatacatatctatgttaattactagtataatataagcttgtgtttgaatattgatattgaacatcagttgtatctaacacttttcataagtgatatcttatgattagttagcgatattctttaaaaattattttcttaagttatagttacttaattacactaataatagtaaaacactaaagaagatactagacgccaatagtacttcaagtgatcatagagagagtatatgggtgcatgtgtgggtagtcttggaatacaattctaaataatatatatatatatatatatatatattatatgggcagagattggtccatcagctgaaaaacaaaataataattttttttttttgacaaaaagtgataaaaaaagttgaattggacttaaatattttacatgtaaacatatattttatagtgtaaaaaagaggtat

SEQ ID NO: 36397 - DNA, 3190 bp, Cannabis sativa
ctctctctctctctctcttcggcctatatcaaaccaaaccagctctctataactacattatttatctctgtatctctctcagtctataattattatctcagaaagcaaagaaaaaagcagcaaaaagtagatacgaagagaggattagacctttttgtagtaatgaaaaggttgtttcagtactcatactatagccttattgcacccttcataaaccagctcctgcacactacgtactgaagaaaaaggaaaaaaaagcctgaattacatacatacgtccataaattctatgtgaaatgtctcttttgccgaatttgactttccacgaataaataccacttagctacgtacgctcttatattttcttcttccttatttctttttcttctcttttcgggataagagtttttttttttttttttgaaaaaatatttgtttctctctatttttctgagcatgaccagtcctttttttctcccatgagaaaagaaaacaatacaaacaaaatcctcacataaagctgaactgtctatttctctttcgattcatttgcagaattctctcaaactcttctgctcttctttaatttctttcctccattataatttttcacctcggttggtttcccaatattacccagagacgtacccactactagtctcgtctctttctctcttaattagtttctttctttttacttaattttagatatttatatatacataaatactactctcaaatgatgcaattcactactaccagtactactcctactcctactactacaacaattacgcctccaaatattcctccaatattattgtgtaataatcttcctattatgaacaaaacccaattaaaccgaggtcatcatcatcatcgtccatggccaggaggtttcccaacctccaaggccttaggaacctcctttggggacgccaattgcatggagcaacttctagttcattgcgccaacgccattgaaaccaacgacgtcactttggcccaacagatcttgtgggtcctcaacaacatagctcaaccagacggagattcaaaccagagactcacctcagctttcctccgagccctaatcacacgcgccgcacgcatcggcaccagctgcatcaagatgctcgcctcagccgttgcagttcaaacccaaaacgacgataatctcaacgtcgtttttgacgttccacacagattctcagtcattgacttcgctaccttcatcgacttgacaccctggcaccgcttcggcttcacagccgctaacgcagccatcctagaagccgtcgagggcttttcggtaattcacttggtcgatttgagctcaactcactgcatgcagatcccaaccttactcgacgccattgcctcccgacactacgaggtaatgtaagaaaaattaaataaaataaaaaatatttttgtttaaatttttcgaatttaatttaattaatcaaatataattaattaattaacaggtgacacctgtaatcaaactgacggtagtcgtggcagcagaagcaaacgacgtcgttccaccaatccttgacatctcatacgacgaactcggtttaaagttggtcaacttcgctcggtcaagaaacataattctagaatttcggttagttcattcaacttactcagacggtttcgcttcactaatcgaacatctccgactccaacaacaacagtacttagttaataataatcataattacgaaataacccccgaagctctcgttattaactgtcacatgatgcttcattacatcccagaagaaaccctcataaacagtaataataataataatgataatgatattaactgttcatcatcgtcatcctctctgagatcaatgtttttgaaatcgattcggagtttggatccaaacgtggtcgttttagtggatgaagacgcagacttaacgtctaataacttggtgtgtagattaaggtctgcgtttaactttctttggataccttatgacacggtggagacttttcttcctaaggggagtaaacaaaggcagtggtacgaagctgatattggttggaagattgagaacgtaattgctaatgaaggagttcagagagtggaaaggcttgagccgaagagtaggtgggttcagaggatgagaaatgcgagttttcggagcgttggattcggagaagaagctgtttcggaggttaagactatgcttgatgaacatgctgctggttggggacttaagaaggaagatgaagatcatcttgttcttacttggaaaggacataatgttgtttttgctactctttggatgcctgctgctgttgcactaactactactaattaattaatgcttcttacttaattattattagatactaaattaatagttaatttaagtagcatattattattattatctaattttatatattataattatctgattggttgatgagtgttttcttctgttatattttttctataatttgtagtttaaacattatgtatatatatggtgctctttctaattatatcgtaatcgtaattaattattataaaggtaataagctgtaaaaaaatgaatatgaaaaggtcctctcgtgtttattttcaatgccaattttatactgctatgtgtgttgttataaataagttttataataataagttcaactttaaactttaaaaatttatatttaaatataaaaaaattatacatttatttgaagctctaaaactctctttataattcaaattttaagggcgataaatataaagtcaacataaagtttcctctaagaataggagtattagggacgacaatacaatgttgtctcaatttgatttttttttttttaattggtatactatattaggggtgaatttgtaattaatagaggcgacattgtttcgcctctaaaagtcaaatctgacacactttatattttaagttgcccctaaattaagtttttcttttatataaaaaatcctaacgtcttccctaaccccattgtctcttcctttttttctctctgtgattttctttcaccgtgaatatcaacaaaatttttttaaaaaaatagccaccacttgatttttttcgtcatctccacccagtcaatctttcactgtgaatatcaacaaaaaaaaaaactaaaaaaccagccaccacttggtttttgtgtcgtg

SEQ ID NO: 36398 - DNA, 5740 bp, Cannabis sativa
  modified_base (35)..(64): a, c, t, g, unknown or other
  modified_base (2173)..(2176): a, c, t, g, unknown or other
  modified_base (2236)..(2237): a, c, t, g, unknown or other
  modified_base (3366)..(3373): a, c, t, g, unknown or other
attgtttatctactaaaccatgctccccaaacttnnnnnnnnnnnnnnnnnnnnnnnnnnnnnnttgatatgtactaaatcatgctttttaaactttcatccgtgatagaatttttttattaaaattagacaaaagtccttaaatctaataatcttaatagttcaggaggaatttttaacggccaaaaaaattaagagggcatgatttagtacatgtcaaaattcgaaagaaaaaattgctaattagcctttaacaaaatagaaaacccatttaataactttggtaaaatataaaatctaaaataatattttatataatttttttttttttggtgaataatattataagataaatatgcgtgtacacatttaccaaaagatacctggaccagtttcatttttgtttttaacaaatggacaagtttcattttggataattagaagagagaaaaggaaagaagagagaaaaaggaaagccaggaggagcacaaaactaacacatatatagtataatcttggagctttgcacgtgctatttatgagaagtaaaataagacgtaaataaaaaaaataattaacagtaaaaatgtaatttgtacattacaaaataaaaggtatataaataaatacatgtggtcttttaatattaactggatttttagtataagtaaatgacatcaattaaaatgggaaactgacccttaaatattaattttctctttttaaaataggtaggtaaaaatgaagacattgagacttatatatatatactagaaaacaaaccatacttcaagttctattttgtttagtgagatattaaattttaattgttttttatatttttttaagaatctgggtaactattattttattccaaaaataaatttaaatatagtaaaaaaaattataactattgaaaaagacaaccttaataatcaataaatgtcaaatttttttaccaaatatttacatttataatttacatgtcatgaaatactcatatatttatatattctcgttctcctttaaaaatatttcgaataatacaacaatagagatatatacatacatattaataataagataagatagataaaaattttacaatcttaaattaaaaaaatgtgaatgacaataggaacaaacttgtttccttcatcctagttttgattttattttccaagttgctaaatgaaagtgaaggaacttattatattgttacgttagtagatatttttgtaattttttttgaaaattttgaataattattaatcgtgtagctagcatttttttttaataataaataattataaattataattgattcataaaaaaataattataaataattatttggaaacaactttatagttagaagcttatttttaagcatataattttatgatattttactattttttttttaaaaaattattaactcaaaaaaaatattaagaaaaaggaaaaagataaatgaaaagtttaatgagtaggacattaattaaaaaattgtaaatttaaaatgtttaatatggtatatatagtcaattaactcgataagataaatgaagaaaacattagtttacaataatattttttgtaatatataataaatattaaatatatttttagtacaaaatagtttattatagagtcttttaatcaaaataaatttttctagaagttggattgtaccattttaacttttagttgtagttttttcataaattcttcaataaagtgtttttaacgcggcttgtcaaacacttctttatcacagttttttttaaaaagcagcttttgattttttaaatattttttcaacgggccctaatttagattttgtcttatccagtcggtgattcgaatattttgaatcaccactaatccgtcagattagaactccaatcaaatcgtgaatctttttgccattcttactttcaagtctataataaaagtaaagattgaaaaagtctgttgtatatttattaactttttttttttaaaaaaaaaatgcgcatgtaatcaattatattaaattttatttttcaaatgttaaattattttaaaattttaaaaagtaaataagatgtatattattactataattggcactacacaaaattttaaatttagtcacagcgaaacttgtgattaaaaataaaaaagttgnnnntaattataaattatcattcctacgttgtgagtaaaaagttcgtggctaaaagtattagtnncaaaaattacaatttgttgtgaataaatatgtttttagtttaatacttgttgtgactaaaactaaattagtaacaacttttaactaaatattatgttttgttataagtaacttttttgttgtgactaaaagtcacatttagtcacaatttttttttttttttattgtgactaaaaaattatcgctaacaataatcttttttgtaatgtgggtcgaacgcgcgtatgtaacccaaccgcccgcgggtttgttcatactatataattacaatatgtagttacaatgacatacataaatatcatgcaagggactatagatagtgtctataatataaaaaggtttgttctttcaatatatacgaaatgttgtatttgtaggtatttgttatgggatacctaacattatttgatgcagtaattggtttaatttaatttaattaatcatataatagcaacattcttttagaatatacgtggtctaatatatttaatatggcagcatgtgttgttggttccatttgcaattaagagcacttacaactatttgacaaaagatagtccagaagaaagagacttctccacatttatggcgtttccacttctcctttggagaatgctgcacaaccaaatttggatctctttgtctcgctacattaatgccaaaggcaacaatcgaattcttgatagaggtcttgagtttgatcaagtggacagggaaaaaaattggtaattaatatatatattatgtatatatatatatatataatggtatagggaaatttgagtttctaccttcaaaaacatcccatatattataaggtcattattaaaaaaatattaaatctcaaaaattactccactcacagctcaccttttatttttcatctctcttgctctcttcgctatctgtttctcatactttaggatcgaccatgaaatttatcaaaaggtctatcatcaccactcaccttcttatttttcctttatgtagtttttaatttttcctctctcttttatctgtatctctctctaccactcagtcttttctctctctatctctcaatctcaatctcaatcatcttcttaaaaagacaagtgtaggtgctatttcactacaagaaatgtcacttnnnnnnnnacatttttgtgctggcaaaagttagtattgcgctggtaatatagaatttacttgtgaagtgttggcaaatcaacgttggtattagaacttttgccagcataaattgaaaagcgctgacaaaaatgactttttccagctcgtaaatacactggtaaaagttagattttaaccactgcaaatctacgctggtaaaactttgacctctttgccagtgcagtttgcgaaatacgctggtaaaagttacctttacctgcgcagtagcaaactatgctggtaaaggtaacatttgttttagtgtttataggctaaggatcaagatcctaaagtcggtgactgcaagaacttaagttattaagttagttaagcaataactaacttaaccaactcttttgagcgagatctccatgtcaacataagagtgagtgcatccaggaatatatatgagcttccgagatcacggaccgaaggaaatcgctgaaagaacttccgaataggatagagccagctggagtcgactattaggaactataccttccaggaggaaagactagccatctgaaactcacttttcagaggaggactaacttcctaaagactcttcctagaaggactagaaagtcttccaagacttgcttccgtgagtgaacaatttttcagaaaagacttttggagaccttttcatttggaggaactatacgataaattctacatagataattcaaattaaaatattgacggtgatgaagaaaaaatgcaaccatcatggttggtgttccaggaatcccaatatactaacttttgagattgatcaagttcaagcaatgtttgaacttgtttacagttaagaccttagtcccaacatcagcaggattatcttctattctgacattgtctaaatcaaccaacccttcttctatcttctctcttatccagtagaatcttatgtctatgtattttcataataaattgggttcttacaaagatggatagatgactgactatccgaatacacagatagtgatgacaagattatattacaataccgatattactcattattttgatcctgcacattctgtaaacgtgtagaatcaaaataactaaactttaaataatcaaacgattagcaatgacaagttaacaaaccacaaataataatcggagaaaaatagagatgaacatagtatgaaaaacaagaaatgaataaagtagtaaaacaataaaatcaataccaagatatatactggttcaagtctgatagattgatgtgatctatggctctactccagctctggaataccacaaaatcctctttattgattgaacaaaaacaagtacaatatagtcgagaaagattctctgttgagttctctcaaagtgttttaactctcacactctttcccaagattcttcttcatctatagaagattcttcttacaaaatctaaacccaatctctctcttttctctgtacctctctctctgtacctctcaatcttttctctctctatctctcaatttcaatctgaaccatcttctaaaaagacaagagtaggtgaattttataggcttaggatcaacatcctaaagtcggtggctgcaagaagttatggtgttaagttagttagacaataactaacttaaccatcttctttgagcgagatctccacgtcagcataagggtgagtgcatccggtatacgagcttctgggatcacgaaccaaagacactcgctgaaggagcttctgcatagaataaagccaactagagtcgattatcaggaactaccttctaagaggaaagactagccatccggaactccccttctagaggaggactagcttcctgaagacccttcccagaaagagaaaaaagccttctaagaccctgcttccgtgagtgaacaatttttttttaaaaaaaaaaacttttaaaaactttttcatttgaaggaactacaccacaaatgtttatgatataaagtgtcccatgaactcaaatttccctaaaatattataaacattgcacacaataattataaatacatatatatatatatggcttatcatgatcatatatatgaattaattgttattgttattctaatgatgatattattcagggatgaccaaatattgtttaatggaatttggttctacgtgggaattttcacaatcgatggagcacaaaacttaccgctatggagaagtgatggagtactgataacaattcttcttcatactacttttgtggagtttgcatactattggcttcatagagctcttcaccaccattacttgtacaatcgttatcattctcatcaccactcttccattgtcactgagcccattacttgtgagtaactaat

SEQ ID NO: 36399 - DNA, 7686 bp, Cannabis sativa
  modified_base (4013)..(4034): a, c, t, g, unknown or other
tctctctctctctctcactattttcatttttttctctttccagttacatcatataaatagtttggaagctgtagattttctggataagtttctcgccatgaatcctgaccccaggtacattttaatgtgttatagataataatgtggaagtttgcagccgggttttctgtgtttttgagtaaagtaagcaatctattattttttcccttttctcatgggacaatacaaaactaaacttgtgagtttttctcttttcacatgcaacttattacttctctgtttcgcgtatgaagctaaatcattatacaatgttttcatttcatgactaatcacttcctgcatttttgtttttgaaaagcaaattgcttttgtgatttttctttaatgtaacttatggtcaaattatttttcaagattttattatcctaaaatgtcattttatcagttcttactgtctgctggaaaatcttatcttgatacttgtaattgtaaatatgaagtaatacttagctttttgaactttttcttctcattattgtataattttgcagtggtcgtgttaactatcataactttgtgaaggttctacgactcggtgcttgtacattatccgaggaggtaagtttaaatctatttgatttgcttatgtgttttcccatggctaattttaagtttcaaaagagttatgtcatgtgtttacttttttattcaatcttcgtgtatagtggagtttaagatgtctaacgttggtgttgtctataagtttgaatatggatattgaataacacaaattactacttgaaagataactggaaacttactattttttctttctgtattataacttgtcttgtttttttttacttttccatgtaaattttcagttttacattttgattttaaaaaagttatgttttatttatttttatggctgatttttgtaaaagtttatgtgtgtgtaacgtttattttggttggattgcagatattttcatacattgatgttgagaaatgtggaggaataacatttaagcaggttaccctctttctccaattagattatttctttctcagttttatttttatacgtaattatatattttcggttgaaagatacttgtatgtgtagtattggatctagtcatgcttaagtatgtcaaccaagttgagtactgtttgacttcaacatttcctgccttatttaaagcacaatgacatgttaattttgttcagctgacagctaacacattttcaacatttctgaaattggcatagccttatacatcctcatgcattctttggtcctcttggtagcaaagttatcttcagtgataatgaattatcattcacttttcgatctagattctaaccatacagagttttcttctgttctttctttgcttgtaagaatttgtaaaaagttttaaatgcacctcggttcaaacagcaaaactgcattgctgcttgttgtgcaattcatagtgtaaaaggtttggattattgctgtttatatggcatttacagaggatacagatgaaagtgactaagtcacttttaaatgaaaagaggatagataatcatgttcattgtaactactctaattagctctcatcctccaattaatgctagaccttagtaatctgagatatgatgtaacgtttcccttcccttccaccacaatgtatttttgctaaaatattatgatcattgctactaggtactaacctagtgttcaattctggatttgagctgaaattctactgtggtagaaatttggctccctccgatacttgtctttgcaagttttcattttcattctggttgctttcagttcttatttggatcagcaaatgtcttgaaccagccaatattccgacaagcttgtgaattagcctttggtagatgtattgctgcaggaaatgatagcatttcagagcaagaggtacagtacttaaactgcttttcttttctttttacaatttcgttcaagtgttctgataagttgacttgcataaaattttcaatgtttttttatcacagctgggagattccatcagattagcaattccagatttgaatgaggaaaaggtaatgaatttgttgagttacccatgttttgaagattccccgtttcccagtccctgccccaaaattgaagtgggaagagtattttatattctcacaaaagtattttttacccctgtcaacttacaaatatccccattgatttgctggcaggttcataaaatgttcgatttgttcgacagtgataaggatggaaagatcagcaaggatgagtttttaacctgcctgagaaaaaatccactgctgattgcagttttctcatcttgtttgctgcagaaagatctatcacaagatagcacaaggttacgagaagagattgtttagcagagtagcattttccatgctttgtaccattttgttgtgcaattgtttggcagagagagaagggtgggttttattgatgttaaagagcatgtatcatatttaattattaaaaagaaaaacatgtactgtgtttggtgggtagtattgtaggggcatcataatttatttttttcttcattttttgccctcaaaacgctcacaatacaaagctttcatctgtacgctcgtggtttgcttgtattcattttcaccctaattcacaacgatctatttggcgcgtagtcgtctcatccaatgacaaaattatacgatgaatcacaaaagtgcagatgttcattattaatgtttttcttcttattgaactccttgtctgaagcaatgttaaggtttttatgtagagtaagcaaccacctaaatacgcatgttatgagtattaagcagtaaaagatcgttttaagtgggatcagcaaactcagtgatcctcgctttcagcctcactcaactggtaactggtggtaataaggtaactttcagcataaatctttacatgctaaagatatagcataatattaaatttggggtacaattaatacagttttttattataattttacaattgatatagacttaattcttttttaattaccattgttgagtttttttttctttttctttttcttaatttattatatgtatatatataaaaaaaaaatataataataataaatagcaaaaagccagaattaaaaataagggaaaaatatataattaattaataatatatcgctattttttttctccacctgtaactactcatcattcacctttccactctctaatcaatatcgaaaaaaaaaaaaaaatctattaagagaaaagaaaaattagacaaaaaaatgagaaaataaagtaaaaataactctaccaaaatttacaagaaaatactatagtatcctatacttatcttcaataagtttctacaagtattgaaggctgcctttattttcttcacactaaactcattttcttctctaatgaattatttatagatatttttatgatttttttaattcactagatttcaaaaaataaattaatttgtggtatataatcaaagggaaaaatataatatctttattattatttggccaaatttctcataagtttttatttagatttcagaaaataaattaatatgagagaacataatcaaagagaaagacataaatcttaataaaaaaatgattgttatgctactaaatctttcatagatttgtctatactcctctttgattcactagattgtaaaaaataagtcaatatttaatgcataatcagaaagaaaaaaaaaaacaaatatctatattgttgtgttgtcatatttatagcatgatttcatatttctctttgattcattagagttcaaaaaataaatcaaaatatagtatataattaaaggagaaatacaatctctatgtaattgtgttgtcaaaattattttccaaatactatatttaattgaaagtagtacaataaaaaaaaggatttttggattggctctgtcactaaattttgcatacacatgcttattattattattattnnnnnnnnnnnnnnnnnnnnnnttattattattattattatattagcttggttattaacttattgtaaagtttagttattatttgttaaaaaaaaaaaaaaaaaaaacttttggtaacatttggtatcagtaagatgtgaaaaatcaactgaatttttgtgcccacatcattgccaacaagttttgggaaaatttggattggtttcgatattattcattcatttagtttctatttttgaataaagtaattaaatccaataattaaaagcaaagcttttgattagttatgtatattttttagtgcagaggtaggtagcactagccccctagctagtttaattcaaattaataattattggagggtttcaattaagtttgcttatcctaaataaagaacgaaaacaagttaacaactgttattgaaaagctttgatatttccacatttacatatgatggaaatatatgagtaagaaaagcaaatattcaataactatcaagagagagaagaagtacgtatttaatttttctttctcaattctcataggctcatagctctctctacccatatagccaataaaatgtttcgaaaatttaaagcaatgtcaacatttaagattgggccaaactcaccattcctcccataaagacttgttccaccaagaaagaaataatggcactgttttattgaatttaaataataatgatactgtcactgttactaagaaattatatgtatgtaaataaaataatagaaaaagaaaaaagaaaaaagaagtccaaggttgtgattattccaaggagacaagtagtggtaaggggacaatgttttgagatataaaaaaggaacatatgatgccgttggactcaattgagaaaacataggaaaacaaccattggatgcctcttctagcttaatgcaacttctcttctcttttctcttaattttctttcaaattcactgtccctctcaatttacatgataaaatatctaccaacaaaggattgtgttgtgaggctgctaatataaaatcatcccaaggtgagatctacaccatagaattgaagaaaagaaaagaaaaaccctagggaagaagaagttagtacatacacatattaaaatcaaataatgacaatatttaaatttaaagttgtgcaatgctcctgtggtcccctcttcttatcaccatacattaatttttccttttctcaaattctggttactctgagcccaacatcaggaggttttgaggaaagagtctttaaatgcacataaaggcatcaccaaaaaagaacaaaacttggtacataaagggtgacccataacttgttgccttagttggcaaccacgagaagttaattgtgcataacaaccaaaaactataaatatatatatatatatatatatatttgaaaccctattattattatttttaaatcaaagttcatcatttaaagaaaaggttacataggattaaggagaatcctcctaaagagcaagatttgtttcacggaatacaaaagatataccttctacattatcacacatcaacaaattcctaatataatctagaacaccatattaagtatcatattgatgttttaatttaataaattaataacattaaaaataataattgctgtttttatgtactgtacaccttaaagtaccatatatatgacaaaactcttattattatatatatatatatagttgatcttatgattgagagatttgagacaattattaattgtttgaatgagatttattttatttggaggttaataactacttggatcaatgtaatagattctttaatttatttttagttgtaatttattttttatttatagactgtaattttactgtctataatgtgactaaataaacttttacttaaaacttaactagtctagttaaaatatcatcaataccaataaatataatttataatgactgaaaaatctaaattttctttatctataaacgctcgttttcaaaaaaaaataaaaataaaataaaaataaataaaaaaaatccaatgatgttttcaaatggtttacatattaacattttactcttaccgtacattgttaccttttatgcgtacataaatgattgaaatacaaaaacaatacatatccataaccactttcctccaatcaaacgaatttatatatctggagtctacaaccaaaggcaattataaaaatgaaacttataaaaatactaaaaaatagaagaaaatttataaaaatattgagacacataaatttttatacttttcctttactaagtttataaaatactatgttaaaattgtaaaattacaaaaataatttgttaataaaataaaaatacaactcaaaagcaactctaaaacaacttaacaagcatcatgaaaataactataagacaacaaacaataactacaaagcaacagaaaaataacaaaacattgatataattacaataaacaaaacaatatcaactactcatatgttattgtattacgattcttttacttagttttgacaacttgatttacaactaagactttatacatattataataatatctaattatatatttattttgttatttctataaaaatactagaaaatgggaacttacaaaaatactaaaaaataggggaaagtttacaaaaataatgggacatggagatttttacatttttactatactatgtttacaaaaatactgtgttaaaatttcaaaattataaaaatgctatgtttcagtaaaataaaaaacaactcaaaaaaaaaaaaaaaacctagaacaacttaacaaacaatgtaaataattataaaacaacaaaaaaatatctctaaatcaataacaaaacattgacctaattgcaataagcaaaataatatcaactcttcaatatatttttgtattacaatttttttaattagttttgacaacttgatttatatatcttttttgtattattacatttttatcatagaatttgttgttacaactttattctttcaattttttttttctttttgagttagcgatagttaaaatgataatttattttttaaaagttaaataaatagttatattaataacaaaaataataaaatcttatgatttcaaaataaagtatataatataatgtatataatatataattaatatgtcaatatctattacagcacatcgtgtcaattaaaaaaacgaaaaattttatcattgtattttagaaaaatgtgccttaaaaataaacttaatgtatgtatctacatttacaaagcagcacacatacaacaaaaaaaatatcaagactaaactaaaaatatacaccataaaaaatacagattaataaaaaaaaaaaaaaaaaaacaactgaaaaataattgttctttaaaaaaaaaaaaaaactatggaaatggcttaaaaacaacatgaaaattaatagcaaaacaaaatgcacatatatgtatatataaaacaaaaactttgtttagaataaactgaaaatatatacgataaaaaatacacataaactcaacaaactgtacaccaaagaaaaatacataaaaaaagggttttttcataaatgtacaataaaaacaacataattacaaaaaatgtgcaaaaaaaaaattattttaaaaacttattacatgaaatcatac

SEQ ID NO: 36400 - DNA, 4026 bp, Cannabis sativa
  modified_base (3873)..(3880): a, c, t, g, unknown or other
ctctcacccaatatttctaattttcacttatgctacaatgcatatcttttttgttgaaggtctatggtgaattgcatcacactgaattcaactagcagagtggtgttggctagttgtcgcaatgcttttacaatggttgacttcctatattgaactggctcttattccttttatagtttataaagcttttgtaaaatgtaagataaattaatgctttgattcgaattgtataggttgccaacctcagcctgtatgcagttgcctttgtagtcattagtgtcacaacagcaaaaacacatgctaatatcgaaaatcaggtatggttatttgttgtataatctgctaagagattcttgtctgataatgaatgtaacacagttttgatatatatattcagtatcgctggatcgcatatgtgtccatttttattgggtgctgctttgtggttgcatttctactcggaaccaaagagccaaggtttgcaagctattcgctttattctaatttttcatgaacttagttctagtgatagtactattatttatatcacgacgagtatgcaacttcagctaattgactgttacaatcatttttcttatgtaattagtttaaagataggtgtacaaggaagcagacatgaaagaatagcatggtcttactggttcaagagagttttatattatcaagttgctgttgtttatatgctgaccagactggtagtcaatgtttcacaggtaatcctgctggtcactatttgatcgataatacttattttctaaaagtgatgggaaactgtaaggatcctcctacaactaacttcctacccaaaaacaaacaaaacagagcctaggtatccgttcacaacgctaatgtctgagaccctatccagaaagtgtgtaatgggttgattttatttgctttcctttgtaaaggtatgtttggatgggagtaatgaaaacacatgaataagaatgggaattggaagataatagtaaaggaatagaattccaacactttaatatgcattggatttgcctttgctctcacttttggaacttacaaaagccatttcgatgcttaataaagcaagcaaacaaaaaattggaatgaaaatgatttccattccattactgccaaccaaacataccttaaaataatccagttctttgcacttgagcactctttacatgctatttatatcactcaattttgcacacccgtgtagccaccctccagccgaagaaacaaccaaaactctaatgccaactactctttcgtatttctaaacttcagcctaacataactggaacgtataggaggtctatcatatcatttacttgtttccgagtacagcactcatttcaaattgtaacttcctaaacaaggaaataagttagcgaatatgacttcttaattgtgttagtttcttttctcaggcatatcttgcattctttgtgattaatgatctggggatggccccatcggctaaagcgttggtatgtggacaactaaaaaatcttgttgacaagtgaaatctcttctagccttaaagatgaattatttttctaattgacccaagactgattttcttttcaactgatgtgagtaggttcctgcaatcatctacattagtagcttcattgtatctgtcagtctacaggtccccttctgaaactcatttctttggttgattttttacatttaccaatggtttccatatgtttctgttttataattatttctaattatgtaatatttgtattataggaagttccatggactggtcgacgtctgaaggcctacttctccattggagggattatttgggtattttgtggtgtggtggttctcattttgcctagtaacttgaatggttttgtgtacattctatcaatatttatgggcatcgcgaatgctttgatgatggtatgctgtcaaatctttttcttctttttgttcagtttcaggtttgagtcaagaaaacaggagttgaatatcaattagattaaagttctttaatttgcatgttttttttttatgtaacaggtaactggagtcagcatgcaaagcgttctaatcgatacagatctcaatggctgtgcatttgtttgtgggtcattgagcttcttggacaaaatgtcatgtggaattgctttatttgttcttcagtcatatcaaagtaagttaatcttttacatttctcaacatcttacaaaatatcaatttcatctgctctcatttttctcagctgcaagacatacatttgatagttttattgtttgaaagttagtattgcatattttttggatttcttgatgcaattaattatctcagatatctctgaatcccagcatagaatgattaatcacaaatgtataacttgatatgtttaatatgtcttagtgcattgatttcattttcagagtgttatattatttggttaattaatccatatcacctagtagcttgaagttagagtaaagaggcaatataattttaaattaattgggaccttagtttcaattcttagaatgcaagaatagtcccaagattttttttttgacaaggccaattgtacagttaattaatgttttggtaagaaaacgtatactttcattctgatttactgtgaaaatttgtcttttcatgaaatgaatgagaaaacatggtcaaactatatccccaagagttgacagaaaaaagcctttagcctatttcttatgattagatgttatgctttttcttgtgttaatgatgattactcttatctgttgacagacatcgaaatagatatcgcttcgccaatgcaggcaaccaatttgagttccatgtatatttcagttacgagaatcggcttgggtcttcttccggcactttgtgcacttgtggcagtagcagtaacatataccatgaaacttcaacaccctctttcaaaacccttagtggaaccattattaggatgaagaacttgattcatcaaactgcaattcgattgatctttcgaagaaaagattctttcttcggttaggaatagacaaaccaactttgttcaaggatacttctaatacattccacttgatcaggtttaacaaattctcaacacttactcctgattctttgttgttattttactcaatttgtacagatcatgttgtatgtatatatttgtgctacattaaaattaattgtactctcttgtaatccaaagaaaggattgatcagaactctggacactgaaatggcatcaatttaatttttgaagctccagaacttatcttcattgtttatctctactagaaagatacagaataagttggatatacttctgggaaagttctaatagtctcacttgtacttaaggaaacctttttctcagttaaagtttcttggcatgtttttaatggaacttggggaattttctcacaaaaactggtctttggagaattgataaaataatgtttgcaaaacacacttaaaataagagaaataaacccctgaaaaaaaaaaataaataaacctaaggggagtttacacataaataatatcaaatttgttaaaaaaaaatatacctaaatacctaaaatataataatgattagcggtttttttgttttttatttttacattttagagaaatttttattttttttatttttacggaaatccacataataacttacatgctaactaacgaaccaattctaattcacataacaattcacatagaaactactagagcaatttttattttttttttatttttacggaaatccacataataacttacatgctaactaacgaaccaattcaaattcacataacaattcacatagaaactactggatcaatttaaactaggggtgttcatccgatnnnnnnnncacttttttggtcaaacaacatcatattttgtatccaatcccgcataatagtttaaatccaatccaatccgcaatagtgcggattagatcggttgtttttttaatgataaattatttaatatttcatagaaaaaagattaaaaaaa

SEQ ID NO: 36401 - DNA, 5499 bp, Cannabis sativa
  modified_base (5119)..(5125): a, c, t, g, unknown or other
  modified_base (5438)..(5441): a, c, t, g, unknown or other
ggtgtaaggacccaatggaggcttgaagcggggacgttacaagcccaaatgctaattacaattatgtccctttaattagatcattacaagtgaataaattttcgttagaacttattttaccaggatcttaatcaactaatatggatgtttgattatcacataaataatctaacatcctaaaatatgaaattcataaaacgatcatgttattcgtatttctggcaagggacgcgttgaatccaagtcggcatcaacggtcccccaatagggcccaaggaagacaatttagattaggcccaagttgtataggaccttttaggaacgtaccttagctctgtgatcagatgctctttcgccagtaagttcaaatctggaagcaactctagtatcgtgatacctgaagagtaacacatcgtgttcctagaagaccaatccagtttccttttttattcctgcgcacaaataaagaaataaatgctcttcagatctcgacaaaagatcgtatcaagctaaaagaggaaatttcctaaataaagatctaccaattaattcatgattaattgcccacaattataggacacgattttgaccaattcagatatatctaatctgcctagttagtagatcatctccttcatgggctggacttcatgagacagcccaagttatgtaattcaatgtaaattttccaatagagggaaaagagaaactaaatacaattctattaacaatataaatacctaatgaatcattcggactaagggttgaattctcttgcgatattttctcatacaaacttgagaacttatgctcattgtattcctaaagacttttctagcttaaagttacataataacattgactcatggactaaggctcgttaacgccccaactacgtaaaaattatttgtgttgttactctttctcttttaattatttatttcttcagatctaattatttataattggttttctaaaaatctcgataaacattttggtgctttcattgagagctgaaggaagcagtgataccatctagaggttgtgttcagtaatcatggtactcacccgtaacaaatctggtcttcacttcactgatcctattgccaagataagagatggagaagattagaatgaggcgactaggcgtcataaagaccaggttggcaaagatatgaacttagatgctcttgtattcggagatgatgattcagaaaagaacaatttcgaagatgctaatgacgatcttcaagaaacctcaaaagatgatcctcaagacacgtcgaaggaggatcatcaaggcaaacctactgaaggcgatgctggagaaaaaaacactctcgacgagtcatattctgttgttgtcatggccaaaaatttctagttaactaaaagcaggctatctcgtcaagatcagttcaacgagagcctgcttggaaagatgacaagaatagagatcatgatgacaaccatgaccaaaggaatccttaatgtgtcatgacgatcagaggaaacaattcaaaagaaagaacatgctataaaagagttggagaattcttttctttggaagaagatgagaaataaaaatcttttaagagaactattagatgttcaaaatgctcatggctcaaggagcaagcttcttgttgaaactcagaatagattggtggctgagcagtttttagttcataaatcccacatagagaagcttgaatgggaagaaaaatttcacgcttgaaagaggttatcttctctttctgcgagtttctctgatttgtaaccttttgttgcttcatacatggtgtcaatcttgcttcccctaatcccatcttctttaaggtttacttgtaaataatattgacgaaactctcgttatccacgagaaccctgtgtgagggtaccgtacgtgtgacacatcttaattagtaaagacaatgggaggttcatcagatttgctctttttataggctctggagcgaaagctaatgtctcgtttttaacttcatttatatacctcttctatgcattattgctatttcctgtgaggtgtggccctccagaaataatcagtatatccttgccctcaacagggggaggttgtaaccttgggttattcaggttattgggcagattttgtttgtttccttgtggtctcacaaattgcctcaaataacctcgcgagatgagattttcaatttcatatttcagctgacggtattcttcaatggtatgcctgatatctctatggaaacgataatatttgttaggatcttgcttgtttctcgcatgtctcattggatcggttttgggaaatgtgacactgttttcattggcgagatagatattttcacgagtttcattcaatttagtatatactgagtaaatgggaacatagttctcatgcttcttttgtttctttttgtctttggacgagtcactcgactcatcctttttcttggtatttgagctagtaggatttgaatttcctactttggtggtcacagtgctcgctgttaccgtacttgtgctgggtttatctcccaagctggactttaacaacttaatttcatttcgtggatcttccttctgcacgaaaaatttgtgctctttcattgaactcgttaatgtttttaacaggacaactttgtaagtcatgccataattctcccttacagttgacaaatcgattgtaattccagcttgaaggatttttaactgaatattgtcattcagatgcttgactttggatgtggccgtactaaaacgacttaagtacgcctttagggattctcctagttgctgcttgacattggttagcgaaggtgcttatggtcttcgatcttttgcagcttggaattgttttttgaaatcctttgataattgttcctaggaagttatggaatggtcggtaaattttttaaaccaactacttgcagctcctattaatgaagttggaaataatatgcatcgcaagtcgtttgaaacatttcttacttgcattatggtattgaatttgttcaggtgcgctacaggatcacttgtaccatcatattgtgcgacataaggattttgaatccttgaggaaattgcgaatcaaaatattaagatggaatgattttgtctctttgtctaagtcatatccgggtaatttcccatattctccatcctggttttcctgaacttatcttccaactgtatttcttgcaattgtattggatccacaggttgttgctccatgggttgtatgctagcattttgatttagttgcttacgtaaatctggtgcattacggtttaaatgttcacgtaggtcagcttgtctttggtttaactattcgcaaagatcaaggttgcgacgtctttgatcataattactcacagatcttgttcttgagtaactttcagattggtaactgcgagagttacttatactttcttggtcgctataataacgtcgcgatcctccttcatcttgcattcacctatcacgggaatgagttctggttgaccaactgtgctcgtgtgtccttgatcttaacccaccttcatttgtacttgaaccaaattcatgtgacccttctcgcatcagcctcctccttcggaagagatttgacacacggccccttacttagataggtgtgtgcattttctctattgttgagagtagggctttgcggatgccttgggggtcgacctgtcccaggttgatttccagcatttctcttatcatgctgcggaatttcctgggttccaggtcacactagtctggcattcacattcatgcgagatgactctactatatcaggttgttcattatgttggtttgcaaatccatgggaagtttctgcattatcacgtcaagcctcttgatttcttgtatttttagtattttatgggttttctctatccattggaatatccctcacatttccaggttgttcttcctgagtgtttggggtgttcccttgattgtttttgtgtctcctagtcctagaaactcaaggccttccctgtggtcgccttacagacggatcaggttgagtttgaggagtccctccctgtgcagccctggctaccactgcttctcgttctaactcgggattcatccagttcaactcagccatgtgtcaaagttacctattttctagttccactagaggcacatatcaggttggatcataagtgtcttcgcttcgtctttctgggatctgctcaccaattgggttgaaatctccattgttccttccagaacggggagttttagttgtgttgggttgctgggttggtcaatcgaaagttgcatatcacacgaatgtttcaattctaggaagcgtggatcgtgggttgaaggtgtgtgtaataggtatttgtataatttttttttatttgggttgtatatttgtttatttggctggctgattttatttttgtaatattattaccttttttggttaaaattaaaaaagtcctattatataaagataataaatattgggtaaaatcgcgcattttagttccttagttaaaagtataaatcatttaaggaaagttttatttgcaccttataaaataatgagtacattctattattaaaaaaaataaatttaaataaattttaaaaattactcttaatattttgtttaattttatttttacgaattattttatgttaattttaatatttattttaattttatttatatatatttttaaattatgtgtatttttttattttctttaaaaaaatttgatgtaatttttttatatataatatttaaaatataatttatttttatttaataagtatattttttaagaatataaattgaaaaaaaaaattaaaaaatttaatataattaaatatacaaatcaatatatatataaaggagaagtataagacggtgacatggcgctttagaattactctaaatgcatttatctattttctctttaattctcttacttttttaattttttattaggtttataaatattaattatctaaaataatactaaaaaatattttaataaatttttcataaaaatatctaacataaacaaattatttttttataaaataaatcacaatatatccccacgttattattattattattatnnnnnnnattattattattattatatctaacttaacctcatagatccccattttttttattatttatataataaaataattatatacacttaacaaatttactaatttaagggtttctactgtaacgttttaaaattttctattattttctaatttaaccattacttttcttatttttattaaaaattagagtttcatttagatttttttttattaattatttactatttcttctctattttaaaataacatgtgcatacatgaagagttattaaaattgtttatgttatattatttataataatataatatatagattnnnnatgtgtaataaactaataatatgtaacatatgacaatgtatattagttgtcatctttt

SEQ ID NO: 36402 - DNA, 7532 bp, Cannabis sativa
gagagagagagagagtgtttctttcttttcttttttttttctttaatttcttctaaaataaatgaataaaaatttggttttatctaaatattatcagctataaaaatcagaataaaaacctaattaaagtccactaaaggacaaaaagtcactaaggtaaaatgaccataatgcacttgcccacactaaaagccaaacaaatcatttaggggtattttggtcaaatctaaaatctcaactattcccgacatttctaatgtctaactatattgccccgctatactaaaaatactaagatgtgattctattagccaaacaccgcattccaatgttaccaggcacaaaacatgcaaaaatattaaattccatatatgacatataaaatgtgttccatattcaaataaatttccataaattgataattcataaataaatatgcaagttttatagttaaaccctatttatatgctaatatccaaattaaagttaagcggtctttacattaatcttccctttgagcagaacctgtccaatttccttttccttgacaaagaagaaatatttatggaattcaagaaacacgttgttatcttctgttagtttagaaacactaactaagttattttttaatggagggaatttgacggacagagtttaattttaaagaataagagtttggacaaggtaaatcggcagtaccaatatgagagatacatattttcttgccatctacaactgataaagattttggaccaacataggtagtggcattgtcaagtgtggtgttggtgatgtggtttgtgacccctatattagcaaaccaaatcagatcatcactaaaattagcagaacacttagagtatgtgaatgaaattcatgataagtgttagcttctgtgagataggatctaggagtagtgaaccctgattttggagtgactcaatttttgtcaaatctatagtgacacacaatagccgtgtgaccaaatttcaagcatacttgatagatgagcctcaaattagagtgagaaccttgacttgtccctcaactaggaaatctcgattaattctcattaggattacctcgaccatatgactaagatggacaaaaattgccatttcttggtggtccaagagcaagatttgcctgcattttaagtgtaagattagctacagtgttgtgatgatcaagtcgatgctcatgggccataagaagagcttggacttctttaagagtcaatacaccacttttggttatgatgcctgagacaaatgaattgtattcttgtcacagtccattgaggagttgccaaatgagttcttgatcaccaattgttgatcctacaatagtaattgaatttgatagagtttgcactttgtccacataatctgcaatggacagagatacattcttaatgtgcgagaagtcacccttgagttggagaagccttgctttggattgactgggtgaatttctgctcaagagccttccatatagagtaggatgagttgtagtttgtaaatgatgcaagaactccctctatcattgaagatcaaagccatgagatgagtaattgatcattcttcttccactggggatattgcagatttggttcacaattaacaagaacacaggaaggaggtacattagtgaataaagtgtcgccaagattgtgacctgtgacagtgggagccacttgtgattaccattctaaggagttagttcgatcaagtttaacagtgagagaagcagtgagggaattggaaaatggagttgagatcatcaaagcaggtggtggactcagagcagcgctgagcgtgggattggttggattagtgtgaatgctccagtggaagccattagggacaaaggttagtggtgattgataccatgtaagagcttattaatggcagtattagatcgagatagaagaaataaaagaaaagttgcaaagcatgaaatagagcatgagaaatgaatgccaaagaaaagcttaaccaattttggttagcttgagacctttatataagatcaaagttcagtccaatagagatataaaaacatacatatcataacagattatcactgactattgataaactaaaaactaaacaactaacaaactacttaaccaatttatcattggtttacatcctagatccctaactaatattcattaccctgtggttgagttaacaacatacaccaacagaagccctctgcgatggccaaatcgaccactaaaggtcatttcttggtgaagctaaccctaaaaattgaagcccaacctagaaaaccacatgacccaaagaccctcacccttttctcctaccctatctctcttgccaacctcgaccaatgacgatggggcactctcggctatcgtaccctcaaatagagacattgatccacctcgctagtcttgaaaccttagaaaccccaaaggttcctttcctttccctcttccgaaccttctttctttttctcattattcgtggctcaacgtcggtgagccatcttcaggcgtggcttgccaaaatggatgtcaaaaatggcttctacaacccctagaaacatagaccccgtgatctcgagttcatgcgatattgctctttggtcatggagttgaggttccagggctcatgtttcggccataattgggactttttcgcctatcatagacatgtgccattgtatccgttgtaaactgggctaggggttgatcgtagtcaggacttggaacccttcgatacatagggctaggtgacctcccatatggagttagggttcctagaagaacgaagaagaagaagaaagaaaaagaaaaaaaaaagaagaataaaaaaaaaaagaagaataaaagaaaagaatataaaaaatattcaattattttaattttaattttaattttatttattattaaataatttttgtaattttaattttttatattattttttgtaatatttatatcattaatattaggtggatcaataaaaatttatcacaagtacattttgtacacagtggcaatctaccttggcacttaacagaccaaagtggacggaaaagttgagaccaaaacggaattgaagttcagggggttttaccctaaaagttcaatactaaaaggtggttgtgccaaatttacaagtttaaggattttggtcgcagattacccttattataaacaattaggttttgtttggctaccatatatttagtgacaagcccataaattttattatgtgaggacttagagtaaaaattattgaagcgtttggtgtgaggtatttaaaataatttgattataagaaatattatcaaagaacatataatagtaggaaaattgtgtaaactatttttgtttgtatagggtaatatgtaattatattttcgttcaattacatatattggttgagtagatgattgtttatatatattattttaaaaaatgaaacaaaagaaaacatattattttattttaactatttaattttaattatacataaaaataaaataattattcgtaaaaaatatatttattaattagtaaatataaaattttattgtattttgattaacgaaaatgaacattcacttatattttatgcttaacatgtatatatactatcaccaataatataaaaataacccaatttcagacaaaaaaaataaataaataaatatcgcagactaaatatatatcgtaatttttcttacaataaatcataatattaatattattaaatttattttgagggggagcgatagtccaataagtgtctcgttttactgtctgtactgctattttgtttgattcaaattgttagctactcattaggatcactaaggtggagagtcgtttccatccattttatcttgtttggttcggtatcgttcaatatttctttgtgtagtttgagcatagttaattttgtcaggttgtttttgtttttctattttgatcatttcttttgttgtttgattcattgatcataatttatcaattagggagagattgtaaccattattatttttgtgtgtggcaaattatgtcctaaaattgtatctggagtggttagtgttagtctacattgtatactgttagtgattgtccaggtcagcaaaagatattttgttatgatatagttgtccacctgcttacaactatctatttcgggtttctttattcaactagacatatataatttttcttaattatgttagaattataacacttcgaattgttaagcttggattagaactttttagatcgatttttctttcttcttcatttttttttttgtgtatcgatcttcttacagggaatacttcaactcagctcttaactacatagatctaaagagattttggaacttaagattgctaaagggatttcaacaatatcacaagaggatcttgtgtgttcaaccaagggatttggtttttaaggtagtttttacttttgatttcagtcaaggaatatatcttggagttttgtaatatggattagagcttgtaaatcatattcttaattagtggagtgattaccttgattcttcaggagaaccaaatagtagctggctggaatttatttttagttatagtgaaccttgtaattttttggtattttgattgttatgcttgatgttgatttcttgtttctagaataaaactgaaattgtcaatataaaaatgatagtttcttaggtttacaaacttacaatatcatatatcatatatagaagataatttttatttctttaactttctcattattaatttgataattttaaagctaataatgtgtgcactgaaggttcattaggtataccgtattatattatatattatattatattgtttagtataatattgaattgtattttatacaatatttttatataaaattatacgtgatatcgatttttatgagtacctaaatatatagcataaattaaaatttaatataatattatataaaaatatgatatacaatttaatttaataaaatataatataatacgatcacttaatataacgtaccaaacgataataaatgaacaattttaaaagatccaaaaagtagtattcttttgagtaatgtaaattaatttagtatacaccatcatccctatccaagatatataacatatatttgagtttgaggtgtaggtcaaacagtaccacagaccaatttcttattcataaccttttgtggaaattaatagtaaacttgaatagaaaatttgatctaatggtcaattaagctataaagatgtccagcttaggtccccctagtgatgccctaatacaattcctttatgcctcctaccataatatatataatgataattaaacatttagtcatttattatacgatgcaacagatatcaatataaacaattgattatattaatctgattttatattttacctaattaactttgtactacaaagcagtcgatctttttcttttttggtaaataaagcagcttatcttgacttcatactatcacataaagtctttcaaaagataaacgaactctaatttgatgacttgagtatctccaatagagtgtcgaatttatgattgattattatactcttaacacttttgtaacaaaatacttctctaataatgtgctgaaagaatgagttaaatttgatatatgttaaaagttatgttatatttattttcacaaaatatagtattatataaaatttgatacataataaatatatatttttttctcaaaaaatgataaatatacaatttttatttattataatatcattaaatattaatgagtgaaacaatgttgaagtggcggagctcttggcacttcgtgttggccttcaacgtgcgaccaatttgggggataagtgtcggtattggaaacaaattcagtgtatgtttgtaattgggtgaattcttgaagctctaatttttttatttagaccaattattattgaaattgtttttcttttaattattgttggtggtggttcgtgttgtgccattttgtgtaatgtaaatagtgtggctcacgcacttttaaattctgttactagttatatatgaataaatatgtgaattgatgcttgtcttaaatttattaatgctcctgtaacaattgatttaattcgttaacaatatcatattaatatttttttttatcaatttaatttaattgtaccttcaaatgttatattaatattgcatgcacaattgtaaaacttgtgccaaataaaaatatatattagtttatttgtgtgtcaaatttaacacttttaattaaatcatacatttcagataatattattaatagagactacaaaaattagctagtgttatacttgccaatgattttttttctttctattttcgcataatataaccaattagttttagtcacaataatataatcatcattagttatttaaattaaatttaattcactagtacttcaaagtttgataaaattcttattacatttttatattaagaaactagtcaactccgaatcgatccactctatcgaaattgcatctaaagaaaacataattaagagttaattgataatcaatacatttcaaaataatatttaatcatagcttacgtgatttaattaattgtaacaaactttttgaatgtatttaattataatatatattattttaattttgaattcataggtgatggatggtcgactcatgagttgaccttaacagctcagataatcttaattttctttcctaaagtggagacaattcgtatggtacattgacctttgtcataataatttttattattttattttattttaaaatcatatgggagaaactactttttttttttttaattaagcacctcaaagaagttattactatcaaagttcatcaaatttcgtaacccacaaagttcttcacttttttttttttctctcttattttaaaaatggtaaaattattcctattccaatgataaaattcttcaaattttcattttaaaaattgtcaaaattattccttctctcctgtcagcaaagtttgttcattttttttaaaatgataacttatgatcagtaaaaattaacttaattaagcatctgaaaaaagtgaatatatataaatataatatgaaaaaaatacctagatataaagcctagaaaaatgtagcttgataacatgattgcttaatattccatgattaagcaaattcttcttcagtctcattcttttcatcttatctcttcaaacattctgcttctttgtttaactctttatatattatagtaagccaatcatccattgaatggacacctatactataccacagttatcttactgtgtttattaattaattattaatatttttttcttttgctaaatcctcaattattaatattattattcgttttatacttcattggtgtatatatatatataaatattaggttattgtttcatatattgtacatatatttaactatatttttaatttttatttatattatgtatatttt

SEQ ID NO: 36403 - DNA, 3926 bp, Cannabis sativa
  modified_base (275)..(292): a, c, t, g, unknown or other
aaaaaattgtcactaaaagtagttattttttgtagtgcgcccctattaggggatttcccacccatatggttttgaattaaaccaatttattttttagtggattaatttagtcatttaattagtctgattttattttaaatttttaaaaaatcataatacaagtttgattaattgaaaattgaccaaactaatatccctaaacatattcccaatagaaacttgagatggatacgcattacaaaaaatcttaattttagtcacaacaaaatttgtgnnnnnnnnnnnnnnnnnngtgactaattataaattatttttcttatgttgtgactaaaaggtccatggctaaaagtattagtcacaaaaattttaatttattgtgactaaatgtatttttagtcacaatacttattgtgaataaaactaaattagtgacaacttgtaactaaatattatgttttagtcacaagtaacattttattgtgattaaaagtcacattttgtcacaaaaaattatgttgtaactaaaaagttatcactaaaagtaacagttttttgtagtgacgttacatagataacgagaaaagaatacgtttatactctttgtaactcatttgttattttatcatttcctaatacaaccaaaatatttggaatttaataatataatcaaaagtagataaacaaatataagtacttaattaatgtttataaaacaataattttcatttatttcgtgaatacatacttgttactagtatattaaatatgatacatatataagacctatataaatattgaatttggacagaaacattattaagttcaaatctttctttcaataaatttaaaataaaatctgtataaaattacgattttataaacattaagtgtttatactgttaaaaaaatcattatatttatacggcttataaaattttaaactttaaatactgtaattatccctaattaaaataattcaaattttaaaaaattcaaatttttaaaaataaatttctccaaaataattaaaaaaatctaaaatgttgaggtctaaagtccactacctggacttttctgtgtattattggatactgagaatatatctaccttaaatctttgtaccgacacatgtaaattgttaattaaatattattagatccacatttttttcctttttattttataattaattattaggaatatttaaagctttatgctataatttcaatttgatttagtatgaaaatggtcctatgtttatctattgaggttttattattattttattattttgataaaattaagattttattaagtatgttaaaacattaagtgtcccacttaatatgtattattatatatattaggtataggttgttgatatacaaatgatttattttaaataaagaattcacacagaatttacacgtttaattaaactatagttatatatctactttaaaatctagttttatgtcatgattaataggtagtttttattaagttttttattgtttagtgcggtattatgcattgttttttatttgtttgaaggtttaattagtttttaagagctggtttgggcgtatgtataagggccatattatattaaataataaataacattatgtttggataaaataatatattatattaattattacgaccaaattttttaatacaatatatgttgtattatttgatacataataagtagtctgtattagcttgtattataatatttataaaggatttagggtcaacaccaatctccgacccggacccgaacccaaacccgagacccagacccgaacctggacctgaactcagacccgggatcgggacccggacccagacctggacccgaactcggacccgggacccggacccagacccaggacttgggacccgaacctaaccccggacccgcgactgagactcagacccgggacctagaccctagacttggacccgaaccgggacccggaccaggacctgggactcgggcctagacccggacccagaccggaaccccaaacccggacccgaaacccgaacccggacccagacccgagactcggacctagagaaataaacaaaattggtagaaaagatgataataaaactctaatttttggtgttaattttgttaaaagacgtatcttcaagtaattttacggctttgctgaaattttgagatcaaaaatgtgaaaattaagaatgttcttaagggtcgctggcatgctcctttatagacacattgaatttcaaagtttgtaaacaggcattggcatgggattgctgggtcacgaccgcattacttgagctacctaaaaattacaagggccacggattggcattacttgagtcgtaatccacattactttagttgggcagaaaattggacacaattcccggctcatgtccttttagcaagagaaaaattaggttttcaaacatatagttgtgattttttaagaggcaaacttagagggtgtaattttggaggctagaagcacaacagtgattcctatttatttcgaacccaatgtttattttgattattattttatgtttagaatgagtattactagccaatttttttagggtttctaattgaatcacactactacaaaagaacttttttccatcggtcctcaaattgatttttttgagattgatgctattggaattgtttgcctacttaaaattgacgactatagtttagtagtgccatttgttaagagtacctagttagtgaggttagttagagctagttaggacaactgtactattgttctaactaactttctattgtggatttgatcaatcagctgtataaataatcaatcctcagtaatctcattcattcaatgaaatcaattactctttctttctttttgtttctctggttttgagttgtaacatggtatcagagcattaattgtcactgtcatggagcaatcaacagtagtcaacaatggaggttctcctgttgccaacaatggaggatcgtcgactcctccaggttcttcttaacaatctctcttcgtaaaactaatatggattcatcttctcactctctctcaatttagttggatgaattcaactaccttccatggaagcatcaagtgcttgctgcaatcaaaggaagtcgattacagagatttcttgatttgaaccttgctccgcctcaatatctgaccaatgatgatcgacgccataatagagcgagtcctgaatttgaagattaggaacaacaagacaacatacttgtatctttgcttctctcgtccatgttcgagaaagtactcaccagaatggttggatctgattccgttacccagatctggatcaatctgcgtgagtactacacttcacttaatcgagccaagattggtcagttcaagactcttcttcgaaacactaaaatgcagtcctccttcagtgactatcttctcaaactaaagagtatcatcaatactcttgcttcgattggccaccccacaactcctcaagatcatattaaagctatcttcaatggtttaccagctgaatacaatgtattcatcacatttgtcaacaccaggacagatgcttatagtgtggctgaaatcgaagcactcctaatggcttaggaggttcaattgtataaagcaactaaggatcttgacattaccaaaaatgaagcaaacttagctcatactaaagctcaaccaggcaaaggcataacatctgtctctcaaaactcccccactcctggatcaggaaacacattcagaggtaatgccccacctttttctcaatctaattcctcacagtatggtttctttatgcctgcttccagaggcacagggtgttaggttttatgcccttaatcaaactcatttcatataatcagatttactcattaataaagatcagaa

SEQ ID NO: 36404 - DNA, 11055 bp, Cannabis sativa
gctagtaactttctaattgttttagtaactttttattatttattagaaaaccgtatcagtccatagaaagaaatgaaacgtaacctacattattattcatcttaaattcacttttcttagttttaattttgcatataggtgttttggcattatatctatttatttatgataataattaattaaacgtaacctaaagtattattatgtattcatttttttttatttctttttcttagtttcagttttctattcattatcaaaacaaaatgttaaatactattttagactccgtgttttgtaaaagttaccaattggacctcctgttttgttaaatgataaaatggatcctgtatttttcaaaatagtacaagtaggactctgaactgatttttcgtcaaaataaaatttaataataatctgatctaaagatgttatgacaaaattatctacattttctgtatctgttcatgttagaaattgtcttcaagttagttatattaaaaaaaatcaaaaattaagctcaaagtcctatttttactattttagaatatacattgtctattttgttatttaacaaaatagagggtccaattgataacttttgcaaaacacaaagtgcaaaatggtatttacccaaaacaaaattcttttatactatcaactaatatcaataaacgaatccacatccatccgttccattttccttttgagctcactcttttttactataaataatagttggacaagtaaaaaattttgccgataaaagtttgaagaggcaggtaatgaattttgtaaggactgaagtggaggcggagacttctcaagttgatgtacatagaaagatcccaataatgcatgtaagagaactaatgatatataatattatctttcttatttttatttagtgttttgattggtattaccataattcataagaaaagttaatttactaaaattcattgtttcaattcctccttaaagtttatatcactttgtaagtaatttttctttatactaattctttttaatcttgtagtatgttggtgtaattaatttcttagaacaatgatgtgaaaataatataaagaatgcaattagtatagtatgttggtgtaatacttatggccttcaaaatatttttttttttctgtaagtttttgatttcatggagggaatataaaatgcttggaggagataatagttataagctatgaattagatgatttcttagcaaaaaaaaaaaacaaaaaagaaaaaaaacactcaataatagtttgagagaatatttaatataggtaataatttaaaggtggatttattcttaatagttcaagaaaaaaaatacatatttatttttaataataatttatgttgtattataatcataaaattaactataaattaaattgtaatagtaattactttaaataataataataataattattattgtagcctcaagcatataaataaaaaaaatcaaacaaaatatatgaaatttagtttaaaattaatgtagaataatttaaatatgtacaattctcattgttattcctagtaacttataaagttaaactattttgccaattaattaatatttgaaagagtaaatgcagcagcaagcacaagcatatgacattagtcaaataaagcagaaatagtttttatagggaacgttatcaaccctttttagtgagcattaaatgaagttgtctccataatatgtagaggtagtgccttttaataatattttattaagaaataagaatcattgcctccataatgtggagagctgatgcctttttattttaagtgatagtgatgtgaaaaaatctgatgaaggcactaagtacccaacattaagtcacgagaaatctcttttaattattatttgagtttggtctttcttttaatgttttatcaactcttgggctcattttctctgtcagtggacttgggaggaaatatatctaatcaataacttagtggagttttatatttcacgtgcctgaaataaaaatgatcctaggtattccaatcaaaggatcccaaatgaagggtgtgaaaagtcaagggtgcaagaagaagagcaataaatcttggcaccaaaggctttagttctataaatgctttgagttttgacagagtagatataaaaacaagcatcataaatataaaaaagaatactgaatatgggagaagtgatggacaagaatgagaaatctgatacaagtgaagaagactgcaaaattaactacagaggatggaaaatcatgcctcttgtgataggtaaatgtaatgatgtattacatattattacttaatttttgtaatggattttgagaaacccatctgcataataatatttcagggaatgaaacttttgagaagctaggagctgttggtaccacttccaaccttttggtctatctcactactgtattcaatatgaagagaattaccgctgctaacaccattaccatctacaatggcaccaccaacttggccaccatggcaggagctttcctctctgacacctatttcggtcgcttcaatacattgtgctttggcaccatagcttctgttatggtataaaaaaactatactagttcaacccaaaccaaagccataagacaattatgtttagattttggtatagttcatcttgcatcttagttcatggatagtgatacttttttttttctttcttctattaagggattacttttaatagacttaacagcagccattaagaagctacatcctactcattgtggagcaataacaggaaagagtgacttatgcaaagggccaacatctgaacaaatggcctttttattggctggttttgggctagtagtagtaggagctggcagcataagaccatgtaacttggcctttggagcagaccaattcaacccaaaaacagaatctggaaagaaaggcattaacagcttcttcaactggtatttcttcaccttcacttttgcaaagatggtatccttgacattcattgtgtatgttcagtcaaacataagctgggctttgggtttaagtataccaccaattcttatgctcatatccactctattcttccttgtgggttacaaatattatgtcaaagtaaaagctagtggaagtccaataacaagcctagcacaggtcattgtggttgcttttaaaaaaagaagactggagctaccagacctgccatggaaatcactctacacatatatacctcccaaatccatcaattccaatcttccttacacggaccaattcaggtgacccctttttctttcttttatttatttaagaggataacccttttccctagtaaactgaaaaatacacatatttctcaatttctttttcttcttttttttttattttttttaaaagagaaaaaaaaaatcataataaacataaactatcatttttttaagccacaaaatctcttattatcatgtgctacgtgaaatatgaatgaatttattatctattagtagttgcacactaagatattgtagcatctaggtttggattttgtctgatattattctaaagagtaatttgtatatatttatttataatatttttaataaattattaataacaatcctatcaatctgacaaatacaagttattatttgtatttattttttaatattgacacctcgaagaagaaatataatacccaccaaactatgtgaatgaccacaatacaacctattattaaaatgttggaccacttatttttccaacaaaatatattttatataaacaaatccatattcaaagtacaaatttgatcatttccccaaaaaaaaatctggtctcaaaaaacttgtctagtacacaatcttcaataacatggatattggtgtgtcaccagatttctaaacaaagcagcaatattgactccagaagaccaagtgaacccagatggatcaccatctcatccatggagactttgcagcctacaacaagtggaagaagttaagtgtctaatgagagttttaccaatatgggttacatctatggtttaccatgttgccattgtccaacaacaaacttatgttgttttccaagcccttcaatccaacagacacataggaaatttcaagtttgagattccagctgcatcctacactgtcttcaccatgctcagcatgacattgtggatacctttgtacgatagaatcattgtcccttacttccaaagggttagaagaaaagaaggtggggtaactctacttgaaaggataggcataggcatctttctgtcgatcctcacctcgctcgtatctggcgtggttgaaaatcgacgaagaaccatagctctgactaagccagctattggattcaatacaagaagaggtgccatttcatctatgtcggcctctttgttaatccctcaactcttgttagctggtttggctgaggcatttgctgctatcggccaagtcgaattctactacaagcagttccctgagaacatgagaagcattgccgggtctctcttcttttgtggcttggcaggctcaaattacttgagcagcttcttgataaccatagttcaccgtactactgagggttcagctaaagggaattggttggctgaagatcttaacaagggcagattggattacttttattacatggtagctggtttaggaactataactttgggctactttttagtgtgtgctaagtggtacaagtacaaaggttccggaggaatcgcaattgaagtggatatgactcagaaacctgtagtttaatggttaaggccatgaatcaatgatgttatagatagattcattgtatgtgatttgttaacactttccgagtctttttgaagatggtgtgtggaagctatggtgaattggctacagaatatcaagaataaggttcatctcaagcagtgttgcagctctcatttgctagctggttgtaattgtgttgacttagcctttttttctcattttcttaaggactcaaataaaacaacatgccattgtatcattatagatagatttattgtacgtgatttgccaacattttccgagtcatattatagatagaataaggttcatttgcagctcatttgctagcttgttgtacttgtattgacttagccttttcttctcattttcttaagactcaaataaaaaatgccatggtagtatttacatgccatcctttgttttcaactaaaaattcatttgaaaatcacaactaactttataggaaaatacagtataaggacttctccagcatgggagtgtaggaaaattgtatgcaaaaggctcttaaaaggacaaaaaagaaagaaaagcaaaaaaagaaatatagaatgatttaagattaagaactaatgaaaggtgatcacagaacagaaggtagagtagcataaaaatttaattggctgtttagaggacaacaaacaacaatgcgctgattacgtactctcagcactagtagaaccggccaacgaaacatctccctcagactgtatatgcttgttgaattgtgtcgatatcgagtccctttaatctcacaactgactctacatggcctttcagtgtatggagttctctcaacctgtgtagacaggcaaacaaggcattaaaaatagtcagatgtacattccttttgtaggggctaataattagagaattgttaaagccaaacagctttgagcatgaagattgcatctcaccttgcaatttcagctctccttttggcttcttcagccatttgattgagttctgaaacatgtgttctctcagtaaattttgaatctggtggttgcaaaccgtgcaatgttctttgtgcatgtgcccactgaagctcgcgctgttcctttccaaagtccttttgcctagtgaaagcaatctataaaacaaaagaatccattttataagtaagaggaagaatctcatcagataaagttgaacagaaaaaaactcagtaagataagaagattcataccctttgctcgataactagatcccaagctcgtccactcaaaacataacgagtgaagaatttaatcaaatcaagtgggatgtagaagatgatattgtaaagccagacaacaccagcccaaccccagccaatcccttcaattgcagcaaagctccaacttgcatagacagcaattaaagtggcaatctgctcaatcgaaagctcaagagttaaaattttacttgtatcaattgagataagagaagagaaagaacaaccttaaaccattgaaaaaaaatgaaaacaagatctggactcaccagctgagcaaccaggaaagctgcaactagcagaaagccaggacgctctacataggaccagcttcgagatcgagtaacaaaaatgagagcctgactaacagtgctcacttgcaggtatattgcagaggcaagcttcctaaaatcatcatgtgcagtcttctgaagtgtttcaaccccaaatgtgcgctaaaaaattaacatggcggaatcataagtaaaatcaacaaatacaggataataattacaaaaataattatcacaagcaagacaaaaacatgcattattgataaataatttagacatgtgatgcacttccatctcatgagatgattaagtcaagtcatcttacagggaagaagtctgtcttgtatgctgcccaaaaaaatatcacagtcatcattgccatgtaactaccaagcacaacgccagttgtgaaaatctctgacagcttccagctatctggcagtggagatggtttcaccctatcctttgatattgtcatgatagtgcctgaaatgtaatagaatgtaagaaacactacaaaggaactcacagaacccctaaacttaaccatcatatataaatatatatatatatgtatatataatagtttttaaactatccaccacgcctaacccaggaccaataaaactataacaatttgtatgtgcccagtagccaggaaaagttagatgacctattctttaagtcatcaaatatatatttatatggaacgcatactattcttggaatgaagaagttgaatgggctttaatgaacaaataagaaaaccagcacaaaatagccaatgaacgaacacaagtcatctagaaaatgacaatcagagccagcgacaagaaacaagctgcaatatttttagttatttttcacagttgatgtacccctatatatatatatatcatatcagataagcaacgaaccatcattgagaatggcaatgataagcaccatgaaaggtgggaagtcaaacttccatatgagagccagcaacatgaaacccagctgcaccattacaaacaagaatatcaaggcacagaaaagtaaaacacctcctgggaactcaagttaaccaaatcttgtcaacaatactgtaaaaatattgggaataaaagaattttaagcataagcgagatagtgaacaaagaacaactaacttaccacaatacggattgtaatggaaaccgcatatatctgcaaagtgaaaagatcaagcagttaacgaaaaggcaatactgaaaacaagggccaaaagactaacacagaaattttctaggcaataacatagaatacataatcaaaaccaaatcatactgtgtaatttttcatcctctggaagattgctcgacttgttaaaacagcactaataataacactaagaccaggttcagtaagaacaatgtcagaagcactgcgagctgcatcagtagcatcagctacagctattccaatgtctgccttcttcagggcaggagcatcattaactccatccccagtcattccacatatatgtttcctagcttgcagacgctttacaatctcatatttgtgctctggaccaatagaacatcaagggagtcattgagtggaatggaagaacatgaaacaacaatttggtccaaacaagattaattttaaaaaagatcatgtcaaacaagcaattaaacatatattgaagaagcataccggggaaaacaccggcaaagccatcagctttttctataagttcatcaactggtaaagcagcaatcgactcatccttgtgctgtccaagtaaagcagaggaaggatacatattggttcccattcccaagcgacgaccagtttcctttcctatagcaagttggtcacctgatggaaagcacaagaatcagcatctaactgctcaaaaatattgtacagggctgtgtttcatttaaattttgaagtgaagcaggtatgtccatatcagatactgatcaattttattatgaaagaaaatgacaaaaaatcaattttgttaagagaacataatctaagtacacttttagtggccttaatattagccgtaggttttcatacgactcaatttgcactctgaccgcttagaccattaacattaagtgtacctgtaatcatcttgacatttactcccaggtttaatgctctcctaatggtttctgcactatcgtgcctaggtggatcaaaaagaggcaggagaccaataaactgccatgggcctcctgagctttccttggttccttctgggacttcctgcatataatgatggacatatttcataaacattataaagaagtgttttctcaactgattatatacatacccagaataacaagcatcctactagtttaccacaaaataaatgagaagtgggagccaacatacctggtatgcaacagcaagagatcgtagacctctctcagcaaacttatcaatgacagcatgtactctacgctcaatttcagacttgttgtgagcaagatgtaaaatctggaaggagggagaatgcagagagagcttagtatatgacatcaaaagaacaagggacaaaaagagaaaggaaggtaaaattacctgttctggtgcacctttgctgactcgatgccatttaccatcacggtcaatgtaagtcaatgcagttctcttatccgtaggattaaaaggaaggaagtgaacttcttgaatatttgcacgtgccttatacaaaagaaaagaaaaaattattcatgataataaaaaatcaatcaaatcaggcgtcgatactgcaaagttgtgataaaaaaaacacttatatcatcgactacttacttcctttggatcagcgagcattccaactattgcagtatcgatagcatcttggttctctattctagatgctctagctgccataagaacaacagtatcgggatcgactcctttggcaaaaacctgtaagttgaagcagaaataatttttataatatactactaacaaaagcacttccacaacaagtaagaagaagcatctgataaccgacctcgataagatttttatcaacagtaagcttgttcaacgtcagagtccctgttttatcactgcaaagcacgtccatgccagccatctcttcaattgctgtcatcctctttgtgatagctccctgcattaatcattaacaaacatttgagatatatcttaaatcctcagacatagctctgcagcaacatccacaagaaaaagtaaccaacctgttgagctagcctatgagacccgatagccattgtcactgaaagtacagtaggcatggcaattgggattccaccaatgagaagcaccagcagattatcaattccaggacgataggcacgatcttgaattgggtacatgacgataatctctattaccatccccacagcaattgaacaaatacagaaatttccaatagcagtcaagacctacagcataaatacagagaactaattgagaagaaagagaaagaacaaaaaatatctgtgactaaagccatcattctcaagtccaccctggccaatatatgatatgctaatcattcattaccttttggaagtggcccacttgattagtggtatcaacaagatgagcagccttcccaaagaaagtgtgtacaccagtggcaatgaccactgcttcaatctctccttgtttacaggtagagccagagtaaacaccgtctcccgggcctttggtcacaggaagtgactccccagtaagagaagactgcaaatacaaacataatgaatagtgagttgagtattcattatagaccaaaaagtagattcttctgcagttaagaaaaaagattcatagtcagcaaacagacctggtcaattttcaaaggatccccttcaagaagacgggcatctgctggaacaatatccccaagcttaatactgactatgtctccaggaaccagacaagaagcatcttgctcgttccaccttccatctctaagcacctttacagagacgaagaaacaaacaaacaaacaaagatttagaaaagaataattatatgataagttgatcactaaacactctcctccagaacataaaaattacaacttcaagattttacaaaaataaataaatacaactaaagcataccttagctttgggagctagacgagccataagagctgctgcagcattaccagcattgttctcctcaataaaactaattgttgagttgatgacaagaagggtaataatacccacaaagtcttgccaatcaggaggcttgccctaaagaaagaattatgaagataaaactcaataaattcatgaaaaaaagaaaaagttcttagaatttagcaatagaaaaccccaccccctaaccccccctaaaaaagctgagagcttactcctccatttgcaagtgcaatggccatgatagcagcagcttccataacccatgagagagggttccacataaaacccaaaaacttcaagaatttgctctcctgaaatagacccagaaaatgttatcttcagaaaacagaggagttcaactaaaaaattaccagacaacaaagtaagcgagccaaaacataaatgaaagcttcaccctcttctcttcaagtttgttatgaccaaaaatggtcagcctttcctcagcagcctcagtggtgagaccatctttgctacatctcagattctcaaagacctcctcaatgggtatattttcctgcattcaaaaagttcataaaacgaaaaatagttaaaaaaaa

SEQ ID NO: 36405 - DNA, 6833 bp, Cannabis sativa
  modified_base (5211)..(5216): a, c, t, g, unknown or other
ttacagtgtaattacatggtcagataaacatgacaaattgtgtaattacctccaattacacataaattcaattacattgtgactttccaaacgcactcttaatgatttagcatattttattttaaaaataaatggatgaggaatatatatttaaatgaaggatattctaactagagtattctattggtgtaatagaatctttctaaattaataacacaagtttctccaaagggaaaaaaaagaagcttttgtttgccttgaaattgaatagaagcaaacaaaacgtgtcacccatcgacatgaatctgataaatcacgtgtccacttcacacacaaaaaaagaattatcctttttctctttctaggtctaagttttctcaaaatgttggactcaaaaagaccaaactacccatgtggttatccactcagcacgagtcaaattctccatcagttgggggtaaatccgtaaataaaactcctggacgagaattgcttggtcacagcacaacagatgatatcgtccatcaatttgattttcaggggtccaagtaggactggattcgacacgtggaccaatgagaaagcagttttagatggagcagtctcagccactagtctagagtctcagttctcagccacaaattcccatgagtgaaaacctggactcactctactcgttatatatatttcattattatttattattatataatttttagatacaaattctctatacactcgctttggttaattttcatttttgtgataaaagaaaccgaaaactctgttaaagaaccaaaagccgccttcttttcatttgccactctctctttctctctcacttgttcttagttacatcgtttcttgatctgggtcttcttatttttctcaatcatcaactgggttctttcttttctcctataattcatcacaggtatgtgtttttctatctgggtttaaactttaaagtgttctttttctgtgttgatctgtctgtctgtctgtccgtacagaaccaaggaaaagtcttcttagaatttggtaagaagctttgaacttgagattcaaaattcagagcacatataagattttaaggttattaaatatgttatcttgaatatttagggttgagacaaattctcaatctgaaaaaaaaaattacaaaaattaaggcataagtaggaaaattagttgaattgagtaattggtttgtttatttatttgcttttatagttggggaaaacagttaattaatattaagaacgatttatttattgtgaagaaattaatattttgtataatgggctctcatattaataagcccagaaaattacagttaacctaatattacttttataaatttagagttatggtcttattcccaagactaatcattgactagttctctttctccaccataggagagagaactctttcaacttgatcagtctatggaagacctcaacttcacaacttgtaaagtaaccattgtctcaggtacgttttctacatgatagtttccactttttacaagatagtttttgcaaattatgtgtcttgtttgtaagtaaaggttttcttgtcaatttacatgtttggagatatagtacaattctcatataacttaattatgttgtaattgttgttattttcttgttttggtacagatttgaagtaatggattggtgtcttaagagtggcggcggtggtagtggcggcggtgctaatgatgagtgtatggttccagttcaaaaaggaagaagaatattgccagatagacttccatcacctgatagatggtcggaatggggaagagtaggtgagtttgaaacatttcaaacacattacaaagatggtgattctgatcaaaaattctatgctgaagaaaattgcttcaatggaacagctcatcatgagatggaagaagatagtttttatgataagtatcaatctaccagtcctactaatcatcagcttggcctagcagaatcctctcagactgatgacatgttcttgtaccaatctttaactcttcattttttgcctaactttttcattcccattgccttgtttgctttcctcttgcttacatgaatcacttgttttgttgttttcttaatgcagttcttatttttctgagatggataatcaagagagatcctattgtttttcgcctaaatctcaatgtggtgggatagagttcaatagaaattccctacaagacatgacttcagattctagaaatacttcaactgattttccaagtctgcacccaacatatctttcaacatttgacatcgacgataacaatgcctcgatgtttgttgttcctcgcaatttgcagaaaaatgatttcttaccagatcaggtgagatacaatattccctttcagttgcccatttctcaaattctgctgttgttaaaagtttatttaccaatatttttttttgttttttaaaggcaactggaatggagttctcagtcaattctgagagtagcagcatgactaggtctgatgaagagccatcccccgaagaaactgtactgcaaggacttcaatcagtaacgaaacaggtgattttttcagtttgttttttatattgaaaaaggaaatgtagacaggtctcagtatagtattggatttatttcttgagcaagtttttgacaaaaactcaaacacagctcaatgtaagtactcgactttcactccgtgatgcattgtatcgccttgcaaaaagctcagaaaaacgtcccatgagacagaatcaagatggaaaccactgtgtggaaaataattctttgtggactcctggcatggaaacaacaaggtattttacatagtttctacaagctatgttttatataccaattttagttcatgtcaagtttaccctttacacaattctgtgggattgcagagaagggaatggttacaattagtcaatctttgttcctttctgttttttcagtttataaaatattgttaggatactattgtacaaggagcattgttgcttgtccccgaggcagagttcagcccgagcttagtgactctcacttattgggtcatgtggccgaataagtgaggttcacacatatgttatttcataagaatgtgttcaataattataagctttctgatcacaacttttacttttgatgatctcaggtgtggaacaaagaaaggaactgagacagagaccaacatcattgacagagctattgcgaacttgatgttcaacaaaaccgagttggactaccaagatcttactggtgcaacatcctcaagctccaaagacgaggttgaaccgtcatcatctgagtaccaatcctacacatctcaatctcaacaacaacagcagcagcattcaaatgtacttgatgattctgactttccaatgttaatgtatccgggcggggtggatatggaaatggaaagcttgagttgcgatttttcaggaaatggtgtttgagtttaaatcattgttttgatgatcatgatgatgatgatgatggattttaagtggcatttgaatgcttttttattattatatattttgtttgtaaataataatatcattagtactagtagctagctatagtgggcaagatttagatacaaacttgctgtatcagttttgatcctgaatccaaattttagataatcaataactaatctcagtctcttattataatgatgataatatatgtttctccatttgttgatttttttttctctttctttggatgagataaagaaaggagttctttgatgagtaacaatccattttggcacttacaatgattcaatctatcttctctttttgtacaattcttatttctattatagctttgtccttttgttttcaaacatatgaatacaacaccttaatgcatgaattttattgggagtttaattattatttcccttgagctttcgcatttcatgttactttctaataaagatgataacgactttttgagcccaaataattttttgaaaattttaaagaaattgaaaaaagttgtatttgaatagcgaatactcaacttagaatagcgggtatttaaagaaaactgccaaaataatagaacaactggaaaaataaaataaacacaaggaaatatagtggttcagtcagattacagtccgcttagtccactgttgcaaatgatttctgcttagtttattcatcttggatcactcctttatatagaaaacaagtgtccttttaattatacataactgatcgattatagaaccgttttacaatatataacaatattaaattagaataaataaagaaccgtttaatctgttctaataagtgcagcaacgtatgtgaactatagaatgcgagttgtctgttcatattctcgcacaagcttgaaggctttaggtgcgttctatattcttacacaagcttgcaggttttaggtgtgttctatattcttacacaagctcgcaggctttaggtgcgctctatattcgtaaaagggctaatgagcctaccactaggatgtttgcgttctatctgagttgcattgatggacatcttatgtgtcgacaacatgagacacgtgagtctctatcaagtcatcgaacacgttttgtcatttagataaatcgtttcgtaaagaagcgatctttacttagtcgcaagagaaggctacttagccatcgcatatgtttcgatatatgcacaacttgtataaatccttctcggccttgcttatcttacactacgcaagacatagtatgcgattagaccctgtcaaggccacatcatctcgcgagtttggttcaagcgaggtcaactctcagagagtcattaactaacaactcatctatcctttgaggattggatccacgtgtcaattttataggagactgattttgagtttctaggcgaaaaaatcgcaatataacagaacacttaaacaaaaaacataaaaataactataaagtaacaaaaagacaactataaatcaacaaacaaataacaagacatcaatcttgttaaaatatgcaaatcattcataaattaactctgaataaactacacgacatccaagaaaatatactatttttattaatcatgtaaaagatacaaaaatataggatgagtgcttttaattttttttgtaagagagataaagagtgttaaaaaacaagatataaaaatgtacacttattatatatatttatannnnnntatatacaaagataaaaaaaattagtctgagaaaaaaaatagagagagagttagaaaaaaataacaaagagaaatagggagagagagaagagaaagatagaaagacaaaaaaaagtaaaaagaaaaaattaagtagggaaagatgtaaaaattttcttttcaaagtataaatataaagcttgaaaaaaaattagtatttagtgtaaattttctaattcacatcatgcagttcctcatttttccttctcatatgagctacagaactttgggcttagagccccgccatctaccacccgaataactttaggcattgggcttttgtttgccaccaatagccttgcttttttaaataaaaaaaattatatatatacacatgtattaagtttatataacttaaatttgcttacataattgaacctattttttattttccactctccactccttgttctttcttccactctttctttcaattcttagaaagaaagaataaaccatggatgatgcaaatgcaaataccaatgacaattaccattgtactatgtgtacttcgaaaaggagttcaaagatgaaagtggtctacagaagcataaacgttcaacacatctcgatttgttctaaaagaagagatgtaaatgcggatatgttcttgatccacacaattgccaccctgattaggtgagtttaattcattattcaagaactataaattttaatgaattctttgtgttgcttcatatgtacaactaattatgctaattggatgattttaaatttatcaatcacccacctaaaaaaataaataaagttaattttgagacaaactaaagtgaaaaaattaagatctatatataacctaaaagtataaactcactatggtttttaaacatgtgggactttttcaaaagaattaaaagtataaaaaatgttgaaaaagagaaaatgaaatgaaaaaattagaaaaatctaccacttagaaaatatagattattagagggaaatttcatttaatatacataaaaaaaaactcctattttaaaaaataccctctaaaatattttgtacaatagtaatctattaacttcttctttttccaaaaatacccttattatttatttattttcaaaacctaaataaactcaaaaacaatctctctctctctctagccgcccctctcgatttcttcttcgcctccccaagtcgaccagccatcccccaaccgtaccccagccatcccccagccgacccccagccgcgtccccacctcccccagccacttttcctctctcgcaaccagctttcgaagcctttgctttcggagtcgcagcgttcttcttcaccggtgcagaaggggattttgaagatgacatcatgaaggagcccttaaccttcaagatattttcagcagcaagaaagtattgttaataaaaaagtttatttttagttttttttttggttaatttacagagattatatattatttatgttgaaatagattttattttgatgaattttcttaatttataatcggttttatatggtggttatggtgttttctgatctagtgtggtggtggtggttatgtatgttcttgattaattatcgacagattctcga

SEQ ID NO: 36406 - DNA, 6857 bp, Cannabis sativa
  modified_base (48)..(49): a, c, t, g, unknown or other
  modified_base (4061)..(4068): a, c, t, g, unknown or other
ctaaatactatgttttagtcaccagtaacattttgttgtgactaaaanncacatttagtcacaaaaaattatactgtgactaaaaagttgtcactaaaagtaacagttttttgtagtgtgagacggtggcacggtcttcttggagtgaaagtgagagagttgacgaagagagaggcgtaggtgaggattccttttagattttagggttttatttctttttctttaatttgtttatttgaaataaaaatttgataataaaaaaaaaagagaattatttatttttaattttaattattttttagattttaaaatgatttttataatattgaattatcaaaattatttggaccaataaaaacatactacatgtatacacgatgactatcccaactcacactcaacgatagaaatcgatagtcaccttaaatttgtaaatgaaagtaaagttaagggaatatacttcaaaaaaagaaaaagataaagggataaactgagtgggaatgggaataggaccttttaccttgacgggatccgtttaattttttatttattttataatattattttttattatttcacattaatctttatgtgtttttgtaatttattaataaatttttaaatatttttattttagtttagaaagtagtgtatattttagattattaacatctatataatttttaattttatataatttatcttttatatttataatttcttttgtttttaaataaataggtcttctatggatatactcactctcgatgggaatatgcgcggatgagtaataaaatagttaacgggaatggagacggggagcactccccgactattatcacccgctccatattcatccctaattaagtgtatataatttgaaatataagagagttttgccgttaattattctttttaaaataacgtttttctacgttgctgcaatataaaagcaacgcaaaaacaagttttctaaaaaattataaataaaaacctgtaaaaaaatccgtaaaaagattttaaaaaataagtgtaataagtattttgtttaaaatttcgtaaagttcccaataattaaaagtgtattggagactatgtatatgtgcaatttgagtgtgtacatctaaggttactcattatatatacctgtctctcactttgagtctaccactaagacaaccccgttgatccgaggaaggaaagtcctcggaagcgataaaattgtacggccaattttgtacttcgatcatcatctgattaatcataaacatgtataatgaaaaattaattatttaatcaggaaaccactatttctaaataaatataaaatggaaaataagtagtagagattatttattgttaaaattaaggtaaaacaaaatgttaagaggtcgatgatcttaatcattttgtatatagcttgcaaatataattttttcttttgaataatttgaggtgataatacttaaataataaggtttcaacttaaatacttattaaattaaatttttaaccttaataatacatttgattacacttttaaaatttgtgtaaatatctctggccgctaattaaactctaagtcagtgcctacaagtcacttttgattggttccagtttatttttttatttaaaaatttatttaaaattgtttaaaaatcatttttttttgtatggatataaaaattaagaataaaactttaatcaaatataattaaaataaatccaatatcctttcaaaaaagaaaattaataaatccaatattatgatgacaaaaaaaccaaaatccaatattaacaacaatacttatattataacaaattaagaacaaaatttgaaacctgaattttagcatcatcccaaaggtgaagtgtatcagttccattagggagggaattaagataaatgaaaacagggccaaaaactttcttccacggttcgttggattgaaatttcagaaccatatcctccccagcatagtgggcacttagaaacatctgtatgtatatataacgaatataataagaatatatttgggcacccaattcatataagtaatcgatcaaataataagtatataattaatattgccagcaataagtctaatttagtactatataaattaatattttttttttgaaagatataaattaatattttgataaggctattgatttttttcttactgtcgaattgttagcactaccaaaatttgctccgagtggaattattcataatgatgaaatataagaattatgttaaattttatcccatgactgattcattattactacattaatattatatgtgtaatttaaaatatataaaaaatattttttattaatatttaataaaaataaactaattttaaatttttgattaattattgacaagaaaaaaaaaattaaattaatttttttttatttaaattatacatgtgatgttaatgtggtaatgacaaattatcatatttgtttatggttggccacataaatggaataaattttaacataagtattatattttagtgaaatatttgtagtataactactcaaagagttaaatttataaggggcatatataataacctataatttttttaatggtaaaactacagtaagttattaaaattgtaattcagtcattttgaacactaattaaattataatgtccctactgctttataagggtaaaatttggatagttttgccataaatatacttaagtgtataatttagagtgagtaggaaatgtagtgagctcacagcaagggtaataggtccaacgtgagaggtgaggttctgcttaagagggccgccagatcgaaactcgttgctgggtgtaatttgccagaaccctattcctggtttcttgcatatccacccatgcaccttcaaatctctattctcacacgagtactcgtacttgtcatccacctaaattaattaatttattaatttatatattatatctaatcagtgaataataacacaaaaataattaactatatatacacctctcctttgaattctggctctacaggattaacaagaaggacagcctcagggaaagccagctctttgcctctagggggcacccgatcatcaggaagaggcatgtgcctttgcctgttatcacctactgccatatactggaacctattattgaaaacccaataaattccattgtctacgtattagttgcttccaaatttccaataattaaaaaccattaacaaattttactacctctttaagagaggatatcacttttgcccacaattatagctatagtatgcatcttgccgattctttagaaattttgaataattgacagtattaaaatttaataatttgttgtaacgcgtataaaataaaaacaagcacgcgtgctacccatataatttaaattatatacattatcgatattataaattatttagaatttatttttcatataataataaaatatttatttacttgtcctttctgagcttgaaaacaatcctggtctgaggaaggttgaatggaggccattctttcaagtgctcatagatggcatatgcgtaaaagcctgacgaattacccagcattacatacctgatgaattttaattaatatacaactattattattattattattattcatgaaaatatatgtacaatttattttgttaattaattagtaagtatatattaccttatgtctatgtttaaagggacacgttggtctatgagagaggtgttccattttctagtgaatgagatctccaccctttcctcttcttccactataaccttgaagtttgtcccttttatcctgcaataattaatatttaattaacattattaaaacattaatatatatcctaatttgatttacacatgagcaaacaaatattttaaatatatatagggtgtttttataatgcacactcttaaatagaatgtatcgatgcactattaatttgtttcagtatttaaaaaaaaaatagtctaatttttttttatagttttacatgttatagttatttaagatattttgtaaaattttaagannnnnnnnataatttataatataaaaaatattattcaaatagtatatttcacacgagtataaaataaaacagtcatgcatgcaacaaactatttgaattatattttaagtgtgtgttaaattttttggaaggtttcaaagttttattaaattttttaaataactactacctataccactacaataaattgaattaaaaattgttatgaatactaaaataaataaatagaaaggagtaaacgagtataaaagaagagtggttttaagaattttccatatatatttataataacctgtcaaatgtaccggttgttccaatacttccctctttactccacacaaggtcccagtacctgcaaaaaccgaatcaatatatttatttgaccaaattaatcccaaaactaccaattaaacccatcggtccaaactacgtggctgcaccagattagtcaattgttatttggtatatataaaaaaaattagattcaacctttttctttgttttttttttttgagaaaaataaaaatatttattaataactaaatttaacagagtctattacattgatcagagtagactcaacaataatagattaatcatcatgttgtttacaataattaggtagaaaatccgaataacaacttcaaatactaaacctacaaactgctatagcatgtgaattagcagcatcaaagtgcatgcgaatactattaatttctaactcgaatgaacaggtgcctagctactcaaacatattaatgactattaaccaaaaatctttcaataaaaatgactccaacagatgtagttataatagtggtgttatttaattaggtatattataattattagagccggtgtataataataaaaatataattgtgtaccctctattgtcttcctcgtttataacttcaagtaaattgtcgatgccattatatcgtataccagtaacgattccccctggttttgataatgtcactttaagtatgccgttgtccataacaacctatatattatataatcacgcaaaatgtatgtgtaacgtttaattaatataatattaataattattttcatgctctaatataactaattaaaagaggttattaaatagtgaatcagaatgacttacgtgatgatctccaataacaagatgcaccatattaatagatgacattgtaagaagaattaaattaataggatcctcccaaaaaattgatgatatatatagctaaataaggcagagttagttcaattttctgatgaacataaagattaattattttcttgctctgcctatctgcatgcctgtgaaaacatgtatgctcatttatatgtgtgtatatatatatatatgtatttatatataaggcaagtgattttagataatataaaatacaaagtaagctttacttgaactttaagatgacgaattttttcatttactcatgtggctttttctttgtgttaattattattgaagagacatgcaataggtatcaccacatttatgaaagttagactacctatatatataaaattacttaacaactaatttaagaaaaagctatgagaaaatttgagagtgaaatgttctttcctctttgattattgccgtaggctaaatttggataatatgggcctgtatcaatggttatattgtttgtattacatattaaagattgtccaatcattttggtaaacgtacatttatggtccctacccaacatatatattgtgatccatacatatatttgtatatatgagagcctagactgataattggtctattattgggggttacacttacatttgtcttcaagagtcctcaacgggttgaaaattaaaagagagaaatttgagtattgatgaaattaattaatttgaactgcgtacatataaatatatatactagtatattacattatataagtataaaattatctaaagagacgtagacaatgtttggtaacaaagatggagacactacaacaaaaaaaggccatgttgcatcagttcatagatttgttggagcgttagcattggttctcaactggcggaattgagtagatgcatgcctcggctgagggccaatgcagctaaagcaaacaatgtaaagtcgaaccttttacaccatttgtgtgtgatttgtaagaagagatactggataagctatagggaaagtcaaatgtgatgattcagttgagactgtatatgtatgagactacacagttgaagaggcttaaatggattaatgagtactacctatattaacaagatgtatcttattttctagtaacccatcacttaagaactctaaagttaagtgtacgtgcttgacttagagtaattttgggataggtgatctcttggaaaatttttccaagaaacatttgagtgaggacaaaacacgctagaaatactcgtgtttttctagcataataataaataactgacgccatagggttagaaatttttagaaggaaattttacgccacttatggcgtcggttatttccaaataatcgatgccaaaaaggtttataatctcagcctagcccttcgtcttcctcattcgatcagccaacctagaaaccccaaactagagaaaccccaaaccctctccgccaaccaccacgaaaaatcacccccatttcaccaattttttttcccactattttagcttatttttgtttctaaatcttctatttttcatacctaaaactatatacctgaaaagatcacatttttccttattttttagggtaaattgaaggtagaggtagtggttgtgg

SEQ ID NO: 36407 - DNA, 16461 bp, Cannabis sativa
  modified_base (7408)..(7408): a, c, t, g, unknown or other
gaagatttgagctctgccactggacatggcaaattttccaatggtaaaaataaagaaaatgggctgaccttcaattgaatgcagatacaatctgattacaaggggaaaaataatagaaggttaatcttttctaaataatataaaaaaaaattagggtgatattgaatgagttcaaattgttttatctatttttatttgggagaaaataggcatgaaagtgttgttattatggaggtggaatagactcaagctcaactattaaagtactcaaagattgataatggtatcggtagggattattttgaaaataggtggaatagatctactctaaaggataacaatggaattagatctatattttcacaaaaatattattctaattttaattttataacaatggtccttttttttttctcaaatacaactattagaaaaaggctgtgcaattagaagagagagaatgatgagttttaaagagagaaagaaagagaaataaaacaacgttctgaagtgagagagcattgcactgtctaatttttttttcttttgtttttagaaaaaaaaaaaaatcgatccttttaatatgcacaatcagaagtcatatatatcagtggtcaaaaaactgtccttataccataggaacaaaatagatgtgcctactatagaattattctatatgtatagatgaaagtaaatataaatacttacctcttagtatatattagttggacatggatttttttttaataaataaaataataatcatatatattgttgtgactttgtgactattcattttgctaaataattgtaaacatgtgttatgattttgttttagagatttttttttaatatatattcaggtttaaagtcattttcaattacactttaatgaaaaacttatgttcagtgtaatttttcccataaaatacttcaagtttctttttttttttaattaaatattttatttatgaaattaatatttttattatattaataaaataacattataataaagaatatagattttaatataatttttagtattgtgattggaattgaaaaaaaaaatagtgctaaaatagtactcttttagttcgatttaacattaaatttaagttttggcattaaagttatcttaagtaaaaaattagtaggataattttattgtgatagtatagttataataaagtaataatattatgtatagttattaaatataaataaagtaatctcaaaaaataatatttgacactaaattatatataaaaaaaaattgtataaaaaagagtacaaaaaaatctccttaacacttctctaaaaaaaaaatttaaagattctagttcagaaaaaacccaaaatggatacccgcagataaataaataaataaggcagcaatctccaaaagtaaggttttactttgggaaaagggaagtaacacctatttaatctttaataaatccgtaataataataataatattattattaaatttgttgtgtgttgattttccaactacccataataataataataataataagggagatttttgtttgactggtcaaagtggcgttacagtgccgaaattacataactcacaatctcacatatccaaaaataatgagaaatgggttttaaattagtttttcattattgttctcaaatcactctactttctttcttctgtttcttgcagggaaggctgcccaaagggattcccccaaactctctacttcttccaaaatcccttcacttcaccccaccatatctacatgaaagttaccattttttaatatgaaaaaaataattttttttatttttacactttaaaatatttttattttgtgtttttacggaattctacacaaaagttcctatagtaactaatggagcgatctaaatcgtaattaaaattcgtatagaaactcacataaaaaatactgaagaaactatcggagcaacccaaaccgtaaatttaaaaaaaaaaaaaaaggttaaaaaatagtatatggggtaattctcccaaaaaatgtactatattaataggaaaattctggggcatacattgtttaagtatttatttagcatttttgtttttgatatttagaaaaattatagttcaatatttttatattagtatatataattgtggactatgtgttttgtaaaagttattaattagattttttgttttgttaaataacaaattagaccttgtattttcttgtcgttagagaaaattagacaacaccaaaaatagtgagttttcaagcagagcaagaacacacacttgcagatatgcgagtattcatctagagtgacgaatactcaaagattagaatacgaaatagacaaaataaagacaagaaaaagaaaatgagacagaagtacaatggtttagttagagtttggtctgcttagtccacttttggcaattctttcagcttattttatttaattcggatcactcctttatataaaaaacaagtgtcttgattttacataatcggtcagacatgatcgtttattacattaattatacatattaattaagataactgtaagaataatttcatctgttctttgattaatttcctgaatgtgtgcaacttgccgagtcgcatatttgactatccatattctaaatacgcgagatcgcaagctttggagtgttttactagcataatggacatttaggcctattaggtgaatgtctgcgatcatccttagtcgcatatgcagatattcctaccttgacaacttagaactttcgagttcctaacgaatcgtcgcacattagtctttcgaaccaaacatgtgtaaagaggcggtctttacatgtcgtatgagagatatacttgctcatcgcatataatcgatatatgcacgatcagtactagctttccttggtcctacttatttctcgacagtatgttatgcatagtgtgtgactagaccatgtctcggtcgcaccttctcgcaagtttatatcatgtgctctacaggagctatccattgacacgtcatccttttccatcaagaatcgagtccatgtgtcaactgcctatgagaatgtgctcgtatttttaggcaaaaaacttgtgtcataacacatgtccctagtttcgcgataatagttgtctgtcaaatgacgaaactatctcaagtgataggtgagttgtattgtcacatcacagtgacgtttggatgtcttattaaggatttttaaaacgacgactgtaattatgacttttatcttcccaagatgccatgtcattgaaccctttggggtctgtgcagtcatgacttgagaaggttgttggatcgaatgacctttggtattcgatcaccatgtgtcatgtgatcaaaaggtgattgtgacgaatattaaaacccttttatatgaaatgaggatttttcattttccctctcattctcaaatcctctcaaacctcattctcccaaagaaccagaaaatttttcaattcaaattcttgctaatttcccaaatattgttcaaaagatttttctgctacattactcaaaatcaggcctacaaaatccccaagaaaaaagttcattcggattcaaggtaggttcctttaaccccctcagttcttttcatttgcatttttccgaataatcgcatgctttctaggtttttagggtcgaatatatatataaatgatatgatagtttttgggtaataaaattctaggcaaaaagactgaaaaaggtatttttttctagaaatttttacctatttattgaatgcttgcatcttcttcgtatgaactttgaataatcatatatttttagctagaacacttcaaatattcacacatgcatataggtttccacttagaacatgaagaactatatgacgacttgcagtttttcaagaatactttttcttttgcttaaaattataaatatatacgtgtgaggaaactcttcttttctctaaattatatatgtgtgaggacactcttcttttttctaaatttcacgcacaacacgctgaaaagatcttctatcttttagatgagcgatctttcagacagtcagatataatccgaaggaggagccttagcaaacgagccctaaaggagtgacagcttcatactcacgtcactatcagacaatgcaactctagagacaactggaccatagacatccttttccacaaaggaaatagctcgcatggttaaggagttaacaaagccagtggtggtggaagtgtgaggaagtgagtccaccgtatctgcccaaagttttatcaatccaagggttattccagatggtgaagtcgatgaagttgagcaagacttcgacttgcccacttacaagaatgaaagtgagtgaagaagaagagattggtgtctttgacgaggatgcaccccttgacgagccattatctagtgtggaccttgaatcgagggtaaggctgttagcctcagtttcttttcaaaaactaaatctaattcaaactggttgcacaaagccagtggccaggaagcgaccacacctttcctttactaaccgcgagatcatcaagtttgatgtcgcggctatctcgattcccataatccactgtggagttgcagttccttttcaccattttgtcaaagatatcttgacccattatgacatctctctattctagctaaccccaaataactatagaatcgtcctcggattctttgcaatgtacaaagagtatgcgcagggatagctcattgtccaggattttagttatttctacgacattaaaaatattagcaatgacaatagtttctactgtttcaccaagtgggccaacactgagataaatgggattgaagatgcgatttccaatataggcgattagaaatcaaaatggttatgtgcattcacattttcaagaattaggatagactttaattgccgtctaagttcgtcacgtacttttatacttgtattttttacatataaaaaattctaatcttcttttcatactcgtagggaggccaactcgattgaaactcacaaaagacaaattaaaaatcatcgaggggcttagcagcctatcaaggattgcggttgtaggatcttatgtacgactgctaaattacgagagcatagtctaatttgttgcgacgttagactccaatgagaatccacatataaagaacatttcaaaagctaaatgtgaagatcaaaaaacgtcttgctagggaaaaataaaaacaacccgtaggtagtgatgcccctagcacttttgatcgcatgtttttattatacgattactaacacttggtgcattttatagatatgacttttttaaaaagtgcttctctcggccgcaaggcaaaaaccaacaaggacgctgcgaatccttcttggccaatccatcgggtttccacaaacgctaaactcgaaaaatattttatcttataaaaggcatacacaatacccaaatgctttaataaaattttcgtaattaataaattacacttatttatttatttctactaaaatctccaatttcatataattagcttaataacattataatcttatcaattatgccctaaatatttattttatctcatatttaataaaatattcttaattaaatataatcacaatttttggatattacaactattccctccttacataaattttatcctcaaatttacctcaacatctcatgatattgctcccacatttgcgactctaattcctaagttgcctccctagccttgttgtctctccacaatacattaaccaatagaatcgtcttattttgtaacacttctcttttctatcatggatctggacaggttgttcctcatacaaaaaatatgtctgaagttcgatatcatatgtatcgaatttgacacatacttcttaagcatcaagatatgcaacacattgtgaactccagacaaagcaggggtaatgctagctggtaagctacttgacctaccctctccaggatcttgaagggaccaatttacctagggcttaactttcctttctttccaaatcttcgagttaccttcataggaaaaactcggagaaaaataaagtccccaacttaaaacttaatatccctacgcttcagatcaacatagcttttctgtctactttgtgaggcaaacatacgagctcgaatcttttctatagcctcgctagttctctggactgctttgggcccaagatatctcctttcactcacttcatcacagtggataggtgaacgacacctcctcccatacaacatttcatacgggcccaataccaatagtactctggtaactgttgttgtatgaaaactcaatcagagagagatatttattctaagacccttcaaattccaacacacatgctcacaacatatcttatagtatctggatagttctctcagactgtccatcagtctgggataaaaagttgtgcaatagcaaaaatcgaatcacaatagcaaaatacaacacaaaccaagccacacctatgcccaggtaaggccagtgtgtctaaccagcggaaaaaaaaacctcttgtagttataaattaggaacgagaaaccttaatttttgaaattagttcacaactctatatatatagttatttttttatgtttaagtatctattaacaacaaacttaataatttaaatatttatgtcgtaaattcaggaagcgggttattaaaaaattatgtttatatgtttcttaaattaataataatttaaaggctatttaaaaaaatatgagaaaaatttgacatatatggcatgcaaacttgattgcaccaaatatgatatatatatatatattttttaaaaaaacttaaaaatattggataaatcatctaagaagcaaaaccataaaaattttaaaaactcgtatataaattttacttttatataatcaaaactagctttttgataaaaaaaaatcaatttctcgttgaagaaactaatttcttgatgaaaaaactagtttcttaatgaaggatctttggtgagcaatttatctaaaaattaaaaatgagttttaaaaattaaatttaaatgtacatgacatagcaaatactaggggtgttcgcggtgcgggtggtgcgatttttgaccattttttcaaaccaactcgcacatacgatttttctaatttcccaaaccgcacccgcaccacgaaactaaaaaaccaaaccgcaccgtaaaaaatggtgcgttgcggtgcggtttttgcagtttgaattattaccaataattaaattatcacaaatacaataaagcttgagtaacacttgtcaaaaataccataaagcttgaaaataaaaatcaattttttttttaagttttaataagacaataattagtgggcttttggttggacattcacatattagacctnaaaaaatataaaaattggtatttttaaaatgtgcagtacggtgcagcttgaaccacatattaacaattcaaaacagcaaaccgcaccgcaccgcgcggtttagaaaaaattcaaatcgcgaacgcaccgcaaaaaatttcaaactgtatttttttgcggtacggtgtggtgcggggagtttgatgaatacccctaatgaatactataaaataatttaaaaacaaaaaaataccataaaattgcgtacttaaagatgtcatatttaacgaattttttttaaaaccataaattcttcataatttaaatcaagcccaatgagctgtccagattgtagaacatcacgtcggcccagtccagaaatcaaaatgtaagaagatagagagagagagaagaggggcctagctagaagcttccaaattcctcgtcctcagacataagcaataggggtcattttggtaaaattatcttccaaaccaaaccaaaccaaaccaagacaaaagaaagttgttttgacttttaactggtaataagtaagagtaaactcagttaaaaatgtttcatcttcacgaattactttgccctaaccacttcactcctttacattacttaccaccaaaaccaacaacacattacacaacacatctcatctctctaaaaagataacacacctgatctgatcgcatagtttcctccttcctccaatggcggagccgcaacctgagaaaaccctaactctatcccaggttcttttcttgttgtcctctttagtctggatggatccaatctaatttgattcattgctttctcttggtagtttttgttctatttagctttttcattcaatagtggcttgcttcaatcatagaaattctttcgttttttttttttaattattaattgggggttttagttttcgatctatctaaatgcggtcaagtgaggtgtacgccctaataagattttcaataatttttaagattcgttcgacgatgatcgtttcctttacctgctataatttataaatgaaatgtatcaaaatggttttagttaatgaagataatcagcctttgagtaagttaggcattcacgatagaaatagttgcatgcgagagaaaccaggtggatcatctgatcttcaaataggtcatcccgctatgaaaataaactcacgctatacttgaccataaattctgtcaattcaatttctgctatgaaaatatgcagattttactttaaatttctcagattttgtaaaattccattgtcagcgtgattgtcttaagttttttgctgttgaccatttaagcaaccattctccgctcctgtaatatctacaagtttttatcttctagagagtgaaagaactttttttttttttttattaactgctgcttggttgtttcttttgttatattgagtttacaaggttgagaatgattttacctgtttctttgactcgcagcaatatgcattggagaaagaggacaaggtgggtgtggatacaaaacctgtggaagtaaaagaagttgaaaacacagtgaatgctacttctgaggaagtagtcgctgagagagatgaggaaccaccagctgcatcccccaaggaaagcactgaagttcctgctcctgctgctgaagaaagtagtgactctgccccttcagctgttgttggtggagaaagctctgaagccagtgctgatgcagctgaaaccagcaatgaaactgccgccgaggaaaacactgaaaatgctgaaaactcaagtgagcaagaagctgtagaagaagaggcaccggagattaaggttagttttgctataccctctattactgttatcattaaattaattttgttcactcagacaatcatgtgcatccgatactccttatgtgtttgaggtgttatttacttatacttatttgatgatcagcttgagacagcaccagcagatttccgtttccccactacaaatcaaacaaggcattgctttacccgatacatagagtatcatcggtaagactgctgcaagttcaaatggctgctgcctaattctttgagcttgtaggtgttttgtaagttgcttaggcaattcttgtatattgaaaagagtatttaattatttctttcctttttcacttttctaggtgcgtagctgcaaaaggtgaagatgcaccagagtgtgataagtttcagaaatattatcgttctctttgccctggtgaatgggtatgtatcttcttttgtccttacagccacttatattttttccttagcataatatgtaagaacctcactattattctgtcacgttggacattgttgttttgcttgtactgctcaaacattcaacttggatttaattggaatatctgttgcaaattttgatacattaattgactatttgtatacattatcacatcacaaacggaaatttttaattggctgattgaatttaaagacaaatccagggcaagaattacctctttactcaacccaatggtttcttatgtgtgccaggtcgagcgatggaatgagcaaagggagaacggaaccttcccaggtcctctatagacagtgactgtttaaaagtgccttgatttgccatgtcatctgcttttatgcccaagttgggtgttctggtagatgaacttctgtgatgagaattgaactctcagggaatttcttaaacaatgagctaataagaaatttggcttgtttttggatacagaatatttactgcttcataaaagtcatttatattgatattaaaatgaggaaagcctttcttatgacatttctctggcttacatgtgcaacagccatttgttatttttatagacaccacccctatttgctcttggggttttgttttgttaaaagtgtcttccaataaattaaagatgatgataggttttctgtgtagattaatcatgtgaaaaagctatcgtgcattgataatttctcttaacgtaaccaggacttcttaatatttgtttatggcatcacttctaatttgtttttttttcctttcgttttcaaaaaataattctgaaggtgctgtcaggtaatgtttatttatttatttttttctgtgggtttctttaaaaactaaaatgaaaatatttttttatgtttagaattgtctggtaacagttttatagtaatgaatttgtttcgttcacccaagaattggaactgaaagctatgccccaagaatcaagttactagatagtaaagactcttaccattgctgatgggttcttaagtgtctctgagatgcaagagttcttcaaccgtggaaatagaagactcatctggctaatgtcgttacgagatcttcaacgacagtattagaagagtcctttgctggattggaatttcgtcgtgagttgcaagaggtcttcagcgattgtagaacactcatttgcaggatagaatattgtcgcgagatgcaagagttcttcaacaatagaagtcatttgttggattggaattttgttgtgagatgcaaaggttctttctgtagcagtagaagtctcattttgtaagattggaatcatcatgagatgcaagagttccggtagcagaagatatttgccgtattagattatcgttgtgagatgcaagagtttttcaacgatgataataaaggactccttcgtcagattggaatattgttgcgagatgcatgagatcttcaatgacgtgcaagactgaacttacagattggaatattgtcgtagatcaacattctcatcgttaacgtctttatgctttccatggagttgttcttgtcttttattatcataaaccgcggtgtcatcaatcactcctgaggcactcaacttttgccaacattcaatctttgcctcaaaaatcttatcaagtctgacttgttcaatcatattgtataggttgctaagtgagctacattttttttttctcttttcgtttcgccaatgatgatggcatcaacaatgttgttgcaaagggtctcaatgataatgttgtgaacaatggtgttgtgaagggtctaatgaagatggcgttaacattgtcgttgcagagggtctattgacatcgcaaaggataaattctttctagtgattgatttgagggcttatgatacgtttagttagaagttagaaggaataaaaatacaaaaatacaaataagaataagaataatagaagtgaaatagaattaattaaatatgcacataaaaatatatacattttttttcataatgcattagaatgacttttccacttatttttaaatggaataggtcattgaccaaaataataaaaaaatcattctattaaaataatatcccaacaatttaaaatcagtcaagaagaataaaataaaatttgattcttttacattctattactctcaattaagtgcacccttaggttgatcacttttgtatcatttctagtggttgactaagggtagttgttttccaaatttttggaaaaataaaaatgatgtaactgagcaaggccataaacaaatcggtaaattggaccaccaaactttaacacaatcaaaggagcgtgccaacttagcaaaagagtgtgctaaagaggtaggcatacgattacaatacaatgctcgaaggaagcactaacaagatccttacaatgagacccaatgtcttcaattatgaccccaaaagcatagttttcaaggatattttgtttgatggcgttgcacactctaatacaatctgattccaagatgatggaggtagtatctcaaccttttacagaggaggagaccctctctcacagccaatgcttcaacaacatgagattccaaaatcaaattgagaggaacaacaaagagaaccactctaatccctaacatgcttaaaattcaactaactttactttttttttttttttgaaaagaactaactttacttttaaaataatatttatcactaaatatgtaaataaatattatttttcatagaaatacatgtaatttcacataaaaaaattatcaaaacacataaaatcaacatgtaaccatccaaatcacatccaaacaattaaaattattttaaattatatttctcgtgaaagtaaattgttactatgactttgaggccagttgttggaacatgttttattaggattttaatttactaacaaatatgtttgattagatatattataatctaacatcctgaaatatgaaattcataaaacgatgattaaaaacataaaaggaatagaatcctttcatttattgcagcagaaattagtgactcctttcgttcaattactctaaccattgattcccgttctttagcagggtattgccaagtgatgaacttaaattgcttccttaaactcgataagtgacagttctacacaatcttacacaaagatctgagtaccaccatgaatagtgtgggctaatactcaagtcattaatggaacaaaatttgagagagaataatatctatattttcgattataatagaaggcaatagagaaagctttttcttgttaagtttaggctagaatcacttagaatgacttatgttgacaatgctctcatctctttctatctatagacaacatgctacagttagattagatgaggtaggctagaacaaaaacaattgggcctaaaatccaagctatggccgaatacactaagtgtggtccatggatttgatttttgccactttatttcatttaatgaaacaatatgtctttttctaatttttgatgtaaatccaatctaattatttaaatactaatttttatctatttcataattataaatgattatcaaacaaaattataatttaaatatatttattagttagactcacaaagtatcttaattaagaaataaacccttatttttttttcttctcaaaattttccaaacttagtgaaaattcccaaataagacaatttattttcgaattctaattgacttattaaataaattaattaatcctacaaggtaatattatcctagatgatgtaggaatcatgtgcttatgaaatcaagctcccaataagtagatttaaaattactaagtaaatttcttaacttattaatcccttttgactctattatagattcagaattgtactattgattacataaaacactctatttactaaatataaatacgttatgaattatccattatttcagtctaaataatcaatgatactttatagacagtttacatcacatagggactaaaattaccgttttacccttcgatgtattttatccttacaatacttagttctttataaatgatattttggtaaactaatataaatatcaaaataagagctcttccatttatattgtttaaccaagctctaaggaaattatcattttacttctaaatagttacagaagttataaattccatatttataatttatgctcctactcaaatgcactatcgagtttctaagatgtaagtataggctagtcttatgggtaagcgggtaacgaacaagtcaaagaaccagtatagtacaattaatctaaagcttagtcatctcaggattgagaataattgatctaagattaactaagtgatattgacttgaaaagatacaacaataagtttatgatatcttttccactgtcaatatcggtccatttcgatgtataaccaatacattcgatacaagtttgctttgctaatgccctggaaaagacattccacttatccaagtgtaagcaaaccacatcgctgattatcacgtcagtgtaaatccagtgcaatgataaatcgtaggactaaatagtttgaagcatataatcatgattatttttcactgtgttgacaacactgtaatcacagataactatatgttcgagatttaatataatttatatattaaacattgtttacacgaaaactagccctgatgatatcattaatgtttgacacatagaaaaaaggaaaacattcatggagttaagtgtcttgagtcataacagtcaactctgggaagggtctgagccctacgctgaggatgacttcggggctccagaatgggtgtttaaaccaagaagtcaagaaggattcaagtctgaagtttgagaactgaaaagagttgaaacgacctatcgagagtcaacctaggtgcctaatgcccatgttgacatcccaactagggttttaggttttgggtccgtctgtgcaaatggctcaaaatttgtgcttagacatgaataagacttatcacgaacatgctagaggtactaaaatcagaatcagaacacttcccatttgaggcatttaagcacttgacgcccagaccacttggtgatgcacccaacgcctaggttgatatgttgttaacctggggcacttccaaccacttttcccaagtattttctttgtcttcatccaaaattagaaaacaagggcttttgggaaagaagcagattgaactggaggccaaaactgggacccagcgcccaggttgactcagtgctagatcccagcaccgaggttgacatattgtcaacctcgaccattttcaataataattatgacaaagtcttccgggcatattctccattttcgttaataattaagatatgtgtgctttcaggaaataaacggagccgtctaggagccaaaactgggacccatcacccaagttaacctggtgataggccccaacacctaggttgacatattgtcaacctgggccattttcaacaacaattattacgaagtttttcgggcatattctccattttcatcatcaattaagatacgtgtgctttcaggaaacaaacagaaccatttgggagccaaaatcgggacccatcactcaagttgacctggtgctagaccccaacgcctaggttgacatattgtcaacctgggccattttcaagcatttttcccaagaagtcttctgggcatattctctgttttcattaacaatttaaatacgagtatttctgagagtcaaacggagtcaccaagtggtcaaaactgggacctagcgcctaggttgacccggtgctaggtcccagtgcccaaattgacattttgtcgccaattccaaatatttttttcgaaaagttccaagtatagctaagaagattttatgctattgtgtattaatttccattaagattctctttattcttaacgtaatgatattttgtacttaattagtaaaattataaaagaaaagttgtaaatcagtttttataaaaaaagttgtaattggttatatataataataaattacaaaatttgggtatattatctttttaccaacaaaattgtcattatttatttctgcaagtataattgtgtaaagtcttataatttttacaatgctttttgaggattgttttgaccatgagtttagtggtttctttttatttaagttgttgcttgttttgtaccatgtatggtagattttttttttttttttgtgtggcttgtttggtaccatatataataatttgtttaagctattttttgagattatcttaaaaagagtctgctggtagtattgacaccctccactctagagatactaattataagtttttttctttcatgaaaatcataatttggattttttttcactttgaaataaaagttcatattttaatttaagggggtgttcatggattgatttggtttgggttttcaatttttttaaaaccaaatcagtattacgattttttaaaaattcaaaaccaaaccagaccaatcaaatgatcaaaccaaaccaaaccaaactaatccacttaaaaatatattggtttggttcaaaaccatgatttgtatttcatagttgttctaatattttttttacaatatttgttcttttttcgataattttatttacctttaataaatttatgatacataaataacaataaaaaattattatcataaccgcattaaatcaatattaatattttacctaaagttgttcctaaatattaacattttgtctaaaaaaatatagggtaaataccattttggatcctctgtttcacaaaagttaccaatt

SEQ ID NO: 36408 - DNA, 4034 bp, Cannabis sativa
ttagacgtcttcctgtacgcggaaggcggggctcggctaccggtctcgactctgtcactaataatagcgtcccacctgggattcacggccgcattcgcttatctgctagtgaaacagaagttcacgtcgtattcggtaaacgctgtcgttttgctgacgatgggtggggccgtgctggccctccacacgagcggtgaccggcccaagggagagtcggagaaggagtacatagtggggttctttatgacactctcggcggccgctctgtacggttttgtgttgccgcttgtagagttgatgtacaagaaatcgaagcagaggattacttactccttggtcttggaggttcagttggtcatgtgttttttcgccactgttttttgcaccatcggcatgcttattaacaatgatttcaaggttagttttattcatatttcctcttttatttttattttcactgatgatcatttcatttggttggtggagtttattttactacactacgagtttagaatgaaacaatatcaatattttaattaaaacaatgaacaaacataaggactaattagtaagaaaaagaaacaagttttttttttttttttcgagaagaaaggaaagtaaaatagttgattatcgatcgataagatagaatgaactttgaaagtaaaatataacggacggtgcttattgcttttgtgtgttaaagaaaggcatcatgattttctttgaattacaatttcaacaagttaaaagactattagtaaatacaatataacctccatctaaaaatactttattaaaaaataacttctaatttattataaaaaaaaaattaaatatcactttgagacaattataaataagaataatttataaattgtaattagttatacattattcaagtccaatattaacaaaataggcctctatataagaataattacatctcaataaaatatatacatatattttttattttataaatttatttatgtaaaatttataatttattttaaattgtaataaatattatatttactcaaaaataattttattataatgtagtattaaggattgtttattgttattattattatattgatattttttggtgtttagaatttttttttcaagtataattctatttggttataatctcttaaatagagattctactttaataatattctaattttttattctaatatatacaaaaagtgtatatgtgtagcgtcactctaagacatatagcaaacttacacttaaaacaaatatatacaaaagtctaagtagtcatatcatttagtatatactgattacatttattgtgcacctaccaatactcgttattgtttatattagtctaatagtgtggaccatttatgcaatttcttaatattttttatttacaattatattaaaattaatgatatttcaatgtgtataatttgttggtgtaattatgagtaatcattttccttgccttatacttacgctaatttcaaaaaaaaaaaaaaaaaaaaaaattccttgccttaatatatgcaattagattttgagattttatattttttcttttttcctattcaaaaaattgtatattgcatgtcaaaaaataattgtacattggttatgataaatccaaaattctgaaaggtatagctgagtttgaaaagtctatggcttttggctttacgttgttttccaagttcttatcactgaatcgtacaaattttgccaactaaataaagatatcaaattccatcatgaaaaaaagtaataaaagacggctgggagtggaagctgctttttagtttggacgctgcccattcaagtggctataactatcatattcttttttcttctttctttttttctctctatcagattcaatcaactagaaaagttatatatatatatatattatgatacatttatttaattaatgataggttattccaagagaagcaaaaaagttcggtatgggtgaaacggaatactatgtggtgctggtatggagtgcaatagtttggcaagcatttttcttgggagcaatcggaatcatcttctgcgcctcatctttggtatctgcgattgtaattgcatctctcctgccggtgactgaggttttggctgttattttttaccatgaaaatttcaaagccgaaaaaggagtctcacttgcactctctctctggggctttgtctcctatttttatggtgagataaaacacaccaataaaaataagaagatgccggccccccaagaatcagaaattcatggcattttagatacttcatgaaataattttctttttgttaatttccacttgggaaagtttgaagtacaagcatctccaatcagccaggtctagacatttgacatccgaaaggtgtggcaccaaatattaatgggtttagcaatgtcactgagttcgcaaaagtagcaataaactttactgttacaatcactttgaaggggtaaacatgctaatatatgacaaaaaaatcgaagtaagaaaagtgtaaaagtttataacaaaattactttgccaattaagacttgactgctgagcttgcagatcacaacaatttcaaatacaaacatgctaaacagagaaaccaaaatgttaatgaaagatgtcgagataaaacgcagcgacagataaagaaactataatatcaagttgctgtgctgcggttcccaagaagtgtacgagcggcttttatatggtgattcaaatttggcagcaccttggacaaaagtggacactgtttggaaatggacgacatggatttcttgagctcccaaaatggtttcctgtgaaactgaattggccactacaaaaattgaataacaaatggtctccttccaaaacattaaacgagacctgagatctcttcatcaaatatcacactccaaacctgtatttatcacctattattatttactagatctcaatctgtcacctatctatctgaaaatcaatatgctttcggcaaaaataatgattcgactaaaaattcctcaagcatcctttccctctctcagacagagacaatacttctgataaatggaccctgcaaaaccatacaacaaagttatcaatgtatgcaaaactgtcttaacttggtgctaaataaagccacaacaccatatgatctactaccaataacatgacactgagagaataagcggatgtgcgcatgaaagagtccgagaagcatgtctaaaccaatcataaacttcatcataaagtatggaataaatataatttacacttctatgttaggttaagactaaaagagaaagggtaaaaaatactgaatcaactgtcacttgaaacatttaagtaaccagaacttgatgtgtctagagaggactatatcagaaaccaaaagaaagagcgcttataagcagacaacaaattgctgatgaatttaaagcaagaaagataaaacaatgataccttgtgtcagtgcaattccaaagtaggaacaagaagcaatcctcctatcattgaccattggccccagaagtctccattagaattgccttcatctgacatttttgctcaggaagaaaagaatcaaaatgaacatggatagttcaagcacaaacttaggacccgccaaatgttcaaaaaacttctgcaacctgtaagttcaaccagtacagagctgctggtaaagcctgttatccatttaaaaacctttattacagtcagatgagagaacaaaggattgaatggagatctctcaaagattccactacaatgtatgggaagattgagttagcaatttctacactaaccctaaggtatttttcttatgtcatttggtgcgatggaatgaaataaaataaaatgaaaaatacaattacaattacaatcaataattttgtatgaatttcaaaataagggtaaatatataattctgttactatatttttttttgaaaaggagacaggccaatgtcttagactggcccctagccgataaataatgaagaccctcacttgtggcggaggaaaa

SEQ ID NO: 36409 - DNA, 6958 bp, Cannabis sativa
ttctacgtgtcaacatcgctattagtccaactaaatatctggtctcatatagtataatataataacttttaaggaatatcgctagctaatcataaaataacatattttaaaaatactagacaccactaatacccaacgacaatgctcttacttatactagacactaaggtttctctttaaacaattattctggcacattcaatatggaatgggggtgtatttatatatatttatttattataaaaaaaaatagtacaaatgaagtggaatggaatggctgtattattaatataaataaaattatatttcattattatagtatagggtggaggggaggagggtaaaatgggaaagagatgagaattgatgggagtccacaccaatgaccgaccgtccctgtcacctaaaagtttcattgttttgttttgggtttcaaaccaaaatacaaaatacccattttaccctcgattttcttctaatattccccaattgaccccacttctcttaataatattaattcctccacaaacggaaaacagaacagatctcattccctctctctctttctttatacttaaaataaaatattcttaacttccatgtattcatctaatttgattatttatttaatttttgtgttacgaaaatggaaaataattttataattataaattaattattaagagaaaacccaataaagaagaacgtagaagaagacacaaacaaccgactcgctcttcttcttcttcgttcgatttctccattcttttgcaaagatttacagagcgagaaaatgtgatgaaaatgggggtagcaaaggcatggaggtttagcttcatctctcccaacctggctgtccttcacccccaaaaccctcacaatgccaccgccaccgtcaagcccctcgtctgttacagatcgcccaatccttccccctcttcatcttcagcctcctcctggtcactcgtctgtggtcttatgctctttggccttggcttgatttcccttatcacaggtcacgtagcttctcatctcgaatggtactcacaccgccttggaaagccttctatttactccaaactggtataactgttcattattcttgttattgttcctttcttcttcttctttaaatatctatactttactgacatttttctactgattttgcaggattttggacgtaggacggcccccattgatatctggaaatccaaatactccaaccatttctatggatgtagtgaaagaggcccgcgttttactcgtacgttcttctaatcttcttgttcgattgttcttctactttgcttgggtgcgaagtgttgggaaaataagcatatttcctaacgcaagttcgattcttgtgtgtgtttgtgtagctgctactcggcaacgattctccaatggttatttacttattgcaactagtggagggctgaatcaacaaagaacaggagtaagttaatgatttttattggtggggttgggctttaatcaaagttgttatcaaaattattattcatattattgtcttcatttcactgtgctctcagataacagatgctgtggttgttgcccgaattcttaatgctacattagttgtgccagagttggatcatcattccttttggaaggatgataggtgatgattgattgaattcattacttttatagcattatgcttcaattttgttttttaaaggcgtgcctttttgacaattgcttctcaaatgactttgtttgcagtgactttgttgacatttttgatgtcaattggttcatttcttctcttgcaaaagatgtcaccattgttaagagagttcctgagaaagtcatgagatcaatggaaaagcctccatatactatgcgtgttcctaggaaatctgcccctgattattatcttgatcaagtgctgccaatacttttgaggagacgtgtaaggctactttgccacttaaattttagatattagcagacccttttttcattctaattgcatttaactcctagttaatgatgcacatatgttgcccaaatgaaattttgtcatgatttgtttttagttttttgagaagctacaattaacaccaggaggtttgcaggttgtgcaattgaccaaatttgattacagactctcaaatgaccttgaagaagagctgcaaaagctgcgttgtcgtgtcaactatcatgctttaagatttacaaaacctatacaagagcttggtcacaaacttgtgaagagaatgagaaagatggcaggacgcttcattgcggttcacctaaggtatgtcaaactgcttgcattgcatgtgttgatacataatatgctgacaagtacgattatggctatggttagtttctgacatccttttttccacaggtttgaacctgatatgttagcattttctggatgttattatggtgggggtgacaaagagagatatgaacttggtgaaatcagaaagcgctgggaaacactacctgtgagttactaacttttatagttctgatctctaagtccaaataatatgttgtttataattttgtatttatctgcactcgcacgatcaacatatttagagtaccatgcttggaagtttgtaaaatttgtaccattctgtgtatctaaatggacgtcctgttactgtttttccttatgcaggagttaagccctgatggagagcgaaagcgaggaaaatgtccacttacccctcatgaagttggtttgatgttgcgagcacttggttacacaaatgacacatttctctatgttgcttctggtgaaatatatggtggggaagaaactttacgtcctctaagggaactctttcccaacttttacacaaaggagatgcttggaaatgaagaacttaaaccttttcttcctttctcttcacgattagctgccattgactacatcgtcagcgatgagagtgatgtgtttgttgccaataacaatggcaatatggctaaaattcttgctggtcgaaggtttgttatctagtctatttgcttattgttagagagataactattactttgctgatttcttttgtggtacactgtgcaggcggtacatgggtcataagagaaccatcagaccaaatgcaaagaaacttagtgctctgtttatggcaagggatcagatgggatgggacactttctcgaagaaggtaaggtcgtgccagagaggattcatgggtgaaccagatgagatgaaaccagggcgtggtgagtttcatgaatatccacacacttgtgtctgtgagaaaccgaaaccatttaaggattttgaggacaaggaccaagtagataacccagctcacgtagcaaaaggctcgacaacaaaaagttgaaactagagttcatggagatggagtgaaggtgacaatgggttaaacttgccaaaaagagtgaagttggggcgtctgaaagggaacaaggagattttttttttgttaatttattttttactggtaacggagagcatcatgaaatggtggttagactcatatctatagatttattggaaatgatggtgaggttgcacctttagttttgacaattcttcatcatatgagcttaaaatttggagtagctcgacattttgaaagcattacccggttgctgtttggtggtgttgttgattaagtctgtgaaggatagaattggaccttgtatagtagaaggctctttactgagttgcaattgtttgcaattgttcataatagttttttctagataatagttgtgtagaaactcatgtttgaagcttgttactcaaacaaatctaatttaattgtgtgaattacttttgctgtaccctgtacttgatattattttatattatgtcacattttcacatggtaaggatgaaatctgaatcatctaattgaagtttacttgggagatatatatatatttatattttgtatatattatgtaatgtatggcacatgtttacaggaaaaaggtaagtatcctctgatcaaatatcttattagtttgaatttgattcagatgacccttcaaaaactacattaacatgacccacactcaaagaatattagagagcttctccaactttagatgcagaggagagtggaaggaatgcttgtattattgaggcagtggaaatgtgcaagttgattcttgtgcattttcaatgctagttttcgatttaagaatgacgcgaatcactggaaactgcgacagcctgtgattcactagaaattgtgatagcctgtaactgtggctcctgtatcttgttttcttccgtttcttgtgctaatttgttggcgaaattctgcatttctttctttttaccccaaaggaggatatacaagccgatgattactacgacagatcctatcacactgttgaaaccataggacaggggcagtaaaacagtgagaatgtcagttgggaggattgaaaagtagaaaatgtattaagtaatatggaaggtgaagaagtgactactgactttccaaggtagaggctctcatgcaaaatggggatatctatcatggctgccataatctgaacaagtggactgaaggcagctgtgaagactggaccccttttctttacacaccatgacatggtgacaaaccccaaccctgatcctaccatcccctggaaattgaatctatgattatttatgagcccttttaacactgaaatctaaaaggccaaggtggctaatacttacagcgaatacaactgttacaatttgcagcggcccctttagaatccacacagagaggttacttccggtggagaagctcaagatagcggactgaatggcaccgaagaaggacatgatagcagtgctcgaatactggtaaggatatctcttgcctatgttagattgcaaaagaaaccaggaagaccatgagagagttcccatgattagagctattgacccaatcatccatctctctgctttcttagaggagctgagtttagtaatggccctgtctatggtagcatgtgagtggttgttgtcaaacaaagagactcctttgtatagtagtaaaatagcaccacctcctatacacaccaatgttcctattactttggctttcccactgttgcatttgatgttaactgcttccaatctgagcaaaagcattaaacacacatgtattaataacttatatgtatcttgttattgttttctttgttgctttatatagaaaaacatacccaaatggtaaggccattaggaatgtggtgacaggcaccatgttgacaaaggcacatgcaaaagtggctgatgtgtattgaattccaagaaggaacagatactgtgttagagatgccctgcaaagccaaggtacatccactctttttacatgtgagaatatgttgttcatttttaatggaggagaaaaagaaagaaaagagttgagtctcactaacccaacaatagcacttaggaataggtagcataagatacgaactgtaagctttggtctaccatccctacaagcaaaagcaaagcaagctttattataatatattgagagttgaggtgatgaactcagggcttggacaggggactgccctgcctatgagtgttagtgcatgaagtagaagtaattggattttatttaaacaaaaaaaaagactattttgctgacagtcaaatcattgcggcctcaaccaccgcaacctaaagatggccttggcgggggacaagggctgccctgccgccgagacttgggaatgaatacgagtatgtatgacatgagtgttagtgcattaagtagaagtagtagtagtagtagtttttccatgaaatgaattgggtagtttagttatagttataggagttataggtaaggtacctttcccaaaagtagctaattggggccaagaaaatggcagatatggtgagacggtaggtgacaagaaccaaatgatccaatccttggtcaagtactttctttagaagaatattcaagactgcgaatgcaaagtcgactactaccattgccataaaaggcttccattcttcacaacttgttctcgtcatcctttcttctcccatttaatgtccactccactccactcttaattctatatattagcttaactatatagtctcttaagcaatacaaaagtctttattacttctctaacaggtaaggtaaagcaagattggcatgtaactaactataatatagtattatagctgagaactaactagtatgtgtgtgtgtggtagtttcttgtggtttacagaagatctagtgatgatctaaatagaattgaattaatgaatgaatgaagatgatggccccagaataagtggggagaaagaaagattaaattcttcatatcacatcaatgctttaagcaacctccctttaaatattttacttgcattattctcttttttccaatgcatagaaagtatcaatagagaatcgttttaggggactctcagagtcatcatcaagagaatcaaatgcatattatattatcttgtctccccccacaagttgtggtacactaatcttggatttgtccctgtgtttttcatttttcatgaatgaacccctttcttcatcatcttcatcttcatcattcatcattcatcactcatcacgtgtcgtgtccttcatttactttttagctatatagtatctaatacttgtattaaatgataggaagagagtgaacagagcatcctgattatatatagatatatatttacaaagttcatgtactatatgtatatagcttcagttggaacaatgtatcaaatctgtgatcgatgaatgatcgaaacatattctcatcatatcatatcacaaagtacataacaaaacatataatgacttaatatttgaaatgaaagcatcctaacacactacttttaccactttaaattactaagtgtatatagtactatacattatataaaaacatatatgtacactat

SEQ ID NO: 36410 - DNA, 5277 bp, Cannabis sativa
  modified_base (4944)..(4944): a, c, t, g, unknown or other
ccaccaccaccaccacccccactcccatcatcaccaccgagaggcaaacgtcatagacagcgtaagaatagtgtgttatctgttttcttgtaccatctacactatgttgtatgaatttacatctatatttttattatttgttatgtttgtttttcagcacaatgaatataatatggtagtttttaatttctatgcagggccttgtagttactagctaaaatatatttacaaaagacgtggccctcttattgattcactaggctgagtagtccttgagaaactgctctagatagcttgttatgtaaaaattttgcgaagtttcctttatgctagttcaatattgcttcaattagaggtgaaaactaggaagtgaaatatcattgaaactaaaagatgcttttctcatcatgccaaatgtggattcactgataataactccttagttaaattccataacttgctaatggattgtttgtatgacatttatatacatgtttgctttatgacttttctatacatgttttccacactataactatcaatggaggaagactatttaaaatttcttttggtagtactttctgtgcccaattgtacacttgtctacatgctttttacactatcatggcttaagaatttcactgattcttttggttgtacttttgttgtctaactgcactgttgtgttcctaattataactgcttttcagatattccttgcgaaattggatttgctaaatcagttgattatattgttgaacccagccacctcacaaactttacacagttttcgctaaaatacattgaccgagaagaaaaagcttcttggaacaataattttgatctgagatttggaggacaccaaactcttattgaaagacaacaatccttctatgcaaagaatcaaactcttcattgtggctttgtcaaaggaccaccagggtacccgagcactggatttgagataaatgaaaaggataaggcctacatgaagtcatgtaagattgttgtttcatcgtgcatttttggcaactccgactttttgaggaggcctactagcaagcaagtaaatcttctctttcctagtttcgttttgtttccacaattatcattagtgatggcaagaatatatggttcatatcaatatgatggagtcattattcttttgacttttgtggccatattataatcaatgacagaaacataattgttacccagaacacttaatttggtttgagtgttgtgggattatgtgtttatgttaatttctagtccgaacatggttgatgtgtattagcacaataaattttgtacaacttcctttaattttagtgatgacaaatttgtgcttgttccacagataagtggatattccaagaacaatgtttgttttgttatgtttgtggatgaacaaactttgtcaaaattgtcgttggaaggaaatgtccctgatgatggaggaaagattggcttatggagattagttgttgtcagaaatttaccatacaaggacatgcgaagaactggaaaagttcccaagcttttgtcgcacagactcttcccttctgcaaggtaatttactacacctagttccagaatttcgttacagtaagaacatttgttgttatgaaaaaaattcattggaccttcaattgagtctctccccctttttctctttaaacattgtcctttcaaggtattcaatatggctcgacagtaagatgcgacttcacactgatccaatgcttattcttgagcgcttcttatggcgaacaaagtcagaatatgccatttcaaaccattatgatcgacattgtgtatgggaagaagtactccaaaataagcgtttaaataagtacaatcatacagccatagatgaacagtttaagttttaccagtctgatggcctgacaaagtttgacccttctgacccaaataaacttcttccaagttgtaagtgtcttttaacctatccctggatatttctaattcatttatctaattatcttagtttgtgttaacttcaaattcctaattttgtgtgctgtatattttacagatgttcctgaaggttcattcatagttcgagcacatacaccaatgtcaaatctgttttcttgcctttggtttaatgaagttgatcgattcacctctcgtgatcaattaagttttgcgtatacttacctgaaattgaagggaatgaatcctgataaatcattctaccttaatatgttcaaggtatctcattttcctgaatatataaatgtatacatacaatgaaacaatattgtgtaatttgtattgataaaagatgacagtaatcatctgtataatacatcctcggcagtagcaaaggtgctccttcatctaaaacatagtgaaagacaaacaaaaatacttcccataagcctgtaagattacaaacacaaataccaatcacaaggaagagtggagaaagagaatgccttaaactttttgcagttgaagatcaatatagcaactcaatactttactttctcccatattactcccatttcctcttctttgtcattaaaaattctgttatttctttccagtcatactgccttgagaattggaaagacagccatgttccataaagttttctttctctgactttgacttctctttgtggcacttaagagcctttatatgttgtggaatatcatgagatgaattgaaccaaaggatacattataattctgtactatgcagcatgtagtttgtaaactagtaactagtaacaggatgggttgggatatttctggtcggctttgagaggtattagggaatgtgaggaattttttgtatgttcaaatgatgataatatccattctgatcattcttgctgccaaaacaaatgataattctaatgtcatctttctccattaattttcaggactgtgagcgcagaacactagctaagctgttccgccacagggtactggtactgccatctcctcgacctgcttcttgatccattataacactccttacaatacctggtaagatttagcttatttctattttttttcttatgtactaatttctctttcccactgttttttttttgggggtgcttttagcgttacttaaatgttctataagaaaataattagaggattaaacaaatgaaagaaaggatgtacagtatgttggtaaagaaaaggcacaagacaaatgacttcatcttttcaagaagcttgtgattgttggtgtcttgacatcattattatagaaaacaatctgtacccatatgaaaaatgtcgcacatgtcattgtcgcaaacacagaaaagcccccttgattttccaccctgacagagcttatgttagatgcagaaatgtaaattgaatgaagaaccagtaaaatataaagaaaaacagaaagaactcatctattgcggaatgaatatcctgggatcggaacatcagttgccactgtaaagatggtctggtggattgctttggttgggtatgtagcatgtaacatagcaagagagctatgcagtaaattatttatacattttgagtacatgtttaatcagcaattgttggtctcttcttgaaatcataattataggacaagaaaccaaatctgttatgcattattttcccaacaattaagttacttgtgggtttggtgattagttttcagggatacaccaattttggcaaacagaccctttcgtatttttatgattcttgatcagtaatcaccaaaaataggttcatagtatgttataatttctaatattcttatggaccatgtcactctctttgaacttgtttattattcttaatattacattttgttggataattgtactttcattatgtattttgagaaattgtttttgggatacttggctttcaactattgatgacggatatattattataaagggaccgatttcctcatatcattgatgtggctgtatcatccttaaatgatttttactatatttgttcacgagaaaatgaccaaaataatttggttgaagagataatttggttgatgacaattggctttgatcaaaccacataaaatcatcgttacatacggttcttgtgtgtgaagcaatgggtttttcttgttacaaacacacattgtatgaattatgaatgttttttgttattagtcatgttgctatggtaaccaacaccacggtatagtctcacatctttcatctttttttttttctttttcttttggaattattcgtacactcatgttgcgtttgtaaatttatatttttggaatattttaaatatgaaaattaatgtgcattttattttttgattttttactttagaaaaatgtgattagtaattattaaacaaaatattaaaattacctttggtgatttttttgggtttttttcaattttaacaaaaaaaaaaaacaacaatattacaaaaatactttcagctggctaaatgataaatatacaacccaaataaaaaataattactcaaatatcacttacactttcaactaaagatccatgcttcctgggtagctattgcacaaccgcgcagcaacctaacgcaatcgaaacgaaatttcaaccagaaagagaaccaccattaattctggcaacttcacctgagaagatgactagaatcaatcaaaataggggctgtttcgaattcatgaagaaaaaagtgtagaaaaactactacgaaactaaaattcaaccgaaatctagtttaatttgcataaaactaatgttttgacttcaatttttagatccatgaaagacagatctcaaaaagttgaactggagttcccaaacaatccaactcaagtataataaaaaaaaattacatcaatattagaataaaatatttatcttggtgtattttcgtttttttttttcaaatttctaatagtgaatttgttcatattaaatcataaagaganatgtagatagagttacgtacgtggaaacaatgttctaatttttaatgtttcataacagttgcattacagttgcataaacattttgctaacagttatttcgcctgattgaaaaccttcgtctaatgcaaccttcggccaaccatccagtgaccactcagcagccttcatctgattgaaacctttgtctgatgcaatcttcgaccaaccaccctacaattatcgtctgattgaaacattcattttatgcaactactgcgcaaccacgcagcaaaccactctgcaaccatcttctgattgtgtaagtgatagtgtaagaggtattttggtaattaa

SEQ ID NO: 36411 - DNA, 4574 bp, Cannabis sativa
atatacatagtcaaaagaactagctagatagataccagtaaaggacgacaagtcgtttttgtcgttcagaataaaattacaaaattgacctctcgttcccaaggaaaacgacaacgaccgccgtagaagtaggtaggttttccaaaacaacttatagaatttcgccaaatggaaactgtcgaaaccagccttctatattggacgtgttggcttgtgcatggcgattcctttattttgtattatacatagttttattcatacaaatacaatccaaccaaccattcacaaccacgtacattaaaatcttcgccctttctttcaaaacacttttttttattgtttctgtgtttttttttttttgtttatcactaacacctggtgcggtcgtcactgtccttttgacttttttggtttttcttggaaagagctctgttctgagttcttctgacatgtagatttttttcatttctaaactgaaaacaaaaacagagaaaagagagagtgcagaagatgagtgtgagagatttattgacgagggtcaacgtgatttgtaataaatacgacaagtacgatttggagaagcgtaaagatcaagctcagaatcttcatggtggcgacgatgctttctctcgtctatacggcgtcgttgaggccgaactcgactctgccctccaggtcttctatctttctttctcttccattgctttccctgaaaatttaagtagaaaaaaaaaaccaatttttatgctatatgggtattggattttatatggaacagttacttttgaatagccaaattctaatcgtttttaatttcatgcttcaaaaacttaaccttttttttgttgttattgttattatttatttatttatttttgaataatattagaaatgggaggctgcggcaacagagaagaacagggctagtgcggttgctatgaacgccgagattagaagaaccaaggctcgtttgctggaggaacttccgaaattgcaaaggcttgcttttaaaaaggttttgttcccaataaatatgtattatgcatagtaaataattaaagagtgtttattgatttgattctaggttaggcatcggagattaaaaatcacctgacatgacatgacatgggatggggccggttttgcctttgggagtcattttccttttctttggtccactttaaatttgagaattaatatttgtcaagaattttaatagagaattaattagtaatattctttaaaatttattacattaaattatataaaatttaataactaatcaagcaatattaatacataggtaaatgtcatttagcatttttcctttaaatttctaataaataataatcaaagaagcatatacttggtgaattataaggttaaagggctttcaaaagaagaggttgagactcgaaatgatttggttttaacgattaaagagaggattgaagctataccagatggttcttcttcatcaaatggagctaaccgagctgaacatagtggttggacagcttcaaccacttctaattatacaggaatcaaatttgattcaacctcaggtcaccattttacttaaaccttatcctgtaaatgtttgtcaatcaaatattctttctttctttattctatttcactaatctatgtgcatagtgctccttgataaccactagttgttgttccaaaacactttcatcagatgggcgatttggcaatgagtactatcaacaaacagatgaatcggatcgatttagacaggaatacgaaatgaggagaatgaaacaggtaagttatatatttttttgatgtaacatgtacatgtgtttacaaaagaaaaagatacaagtataagtttttgtcaataaagcttggggacataattgtgcttgcaattgtggccctcctcaccttttttctcacttgttaggcagtaaaaagtatttgacataacagatgaatagtaaccagtctgctggaaagtggaaagaagaaattagtcttacttgtatagcttttgctacccttttgtgctcttcctttttcattaacttgggtatttgtacccttcttaaaaaaaaaaaaggcttttaaaagggtgtggtgtgaaatagtccttgttaaatgaattcaacaggatgaagatttagatgtcataacagaaggattgcacacattaaaagacatggcccatgacatgaatgaggtttgtcttgtacccttttgtattcatatctctgatgtgaaaatactggtacattaacattgtaatttgtcagtttgatattattactaagacattttatgttttatatttaaaggaattggataggcaggtccccctcatggatgagatagatgacaaggtaagccattctcatatagttatctatatatttaattctcttcctttatatattcatatcttcaactctactactactagttcatcagctttatttcattgttggttttcatttcattattataggttgacagagcaaattctgaccttaaaaatactaatgttaggctaaaggagacaataattaaggtatatatggatttgagattactaccagatttggattaagctttccatctcattgtccctttcactccacattaatgcttttcttttattcaattataataattttcttcagctaaggtcaagcaggaatttctgcattgacatcactcttctgatcatagtaatgggaattgctgcttatttatacaagtaagctagctctttattctctgattttaaaacacaaataaattaaaaatgagtaattagcagcatatacctgtgtatacatataagtataacttcaaaaacaatacaataataattcaatcaatatttaacggtaatatccaactgataacttaaatttatataaaaaaataaacaaacataaacagtttttttttaaaaaaaaaaaaaattaataagttagtgtaaaaattaaatataagaaattttggccccaaataacccattaaaaatacaatactacttaagttctttatcataaaacaccttgggtaagaaacttaaatagaattaccatcttttgtcagtatcatttacaaaaagtgaaaattcatgtcagatccctttttaactttcagtacataataagaaagaagactattttaaacacttttgtctgtgaatttgtgccaaaacaaaaatgggtgtcattcatacataaataaatttgataagaagttcatcatccctggattaaatttcccaatcctttataaattattccatatattaccacaattacatttcctaaccctatcacattcaaaaacttatggagtgacattgtatgtttgactgaaaattgaatcttttgaattttgtcctgttatgcataaaaatgtttgttcctgtctctgtcttattgtttgtttgtttgtttttgctgtaaatgtaactatcacacccactaaacaaatcataagaaaaatccaaagagaattattaacgatttaattgtattacttttatttctcctaattattatttgcatttcttttgtagtgtcttgaagtgaaaatggcgcttctacagttacttccacggctattctctcctatatatgtattttgttatgcaaataaattcatgtgaattgatgctatttaattatacaattattatattttcacaaacatgcattttattgtacaattattatattttcataaaaattatagacaatctttaattatttataagacatcaccttataatagttaagaatcaccttatagtgctttatagcaatgccctactaattttacatacaataattttggcaacctaagaaaataacaccctaaccccatcctatcctatgccctatgacctagttatgtattctttcatgtattctttttttttttatataaacattctctcatgcattcttggtcggcaattactgcctaaactttttttaagctgtgcgccagcttttcttcgaataagattcgaatcttttcaaagttgtaatttgcttaaaatataaattagtatagtgaagtatagatataagagtagtactacattgcgaccgagttaaactacctcagttagaagttgaaaatgacggaatcatatcgtttccttcaatatagattgtctaatgttaattccatatataaatgtagggatatgattttgtctcgatgtttcacggaatgtattctgtggtacattagatgggtctcaggggtacattaaatgaatgttatggtatgtttctactttttaatcttaattacccctagatcaatctcagccgtcagatcaaataactccatcatctgacggctactgtacatcacgaattacaatcagtgaaagtacaataacgagacaaaaccgtatccctataaatgtataggaaaattaataagtaatgttaattccatatataaatgtataggaaaattaataagtagaagcatcactttttatattaatataacggtatttataatttatttattatttgtggtatattaggcatgcaattataaactaa

SEQ ID NO: 36412 - DNA, 2391 bp, Cannabis sativa
  modified_base (2145)..(2145): a, c, t, g, unknown or other
agagagagagagagagaggtcagaagagaaagagagaggccgtaagagaaagagaaagagtgtgagagagaaaaaaaattacctctgaacagttgtggcggcgacgtgtccaagtggttgggggcttccagttcgtgcgacgacgacttggctccgatttggggcttacaaaaataaagagagagaatgagggtagatagagcaagaaagaatgttagaaatgggggaggccgctaggttgatgtgagtattaaatctttagggttaaggttttcataatttggctcgagctcggagcccattattgtcttttttttagtaaaccggtgctaactctttgaacatcaatgctaaacctgggtctgcacataaccgacgttaaatttgaccactgattatttgtgtcggttatgtaattttttcgacgttgaaactgacgcaaaatgtaatatttgtagtagtgaaagtgtaaagatttttcaaaaaaacatgttctataaaaaaaatttcacttttaaatttttaaaatgaaaattaaaattttgaaaacaaaaaaaattattttctagactaagagctactcagcatggtcaacaccataggctactcgatgtcatgggctaagctactcagcacctacattaagtatgtatgaaacatgaattataatggggataaatgacacccaaagagagggtaggttcataacctattccacataaggtgaaaaacctactcggtaccctagtagggaaaaccctactcaacacctcagttgggaaactcactcaataccatcatcagcaatctacttgacatcccccagctagcaagtgtgctagcagttgagctctgagaaaatagcgtgacatccttaaagatttggtccgcaactaactccgataatcatgagatatttcttattcgtttgagtttgaattcaaggaaattagccttactcttttcctataaatagattattataggaacaagggaattgatggaaattttcgtaaacaagttctctgccattttatctttgtatttactttgtagttgagaaattcaattgagaccttgtgattttgacaaaacctaaaataaatacataaatttaagatgattatggtattaatcacactcggggatgaatctctataaattttggtatttttttcttacttttaaagctccttacttcatttattatcatttactgtggctctgtgtcagttggttaaaattttaatcaacattaatgaatatcttgtaaagttctacatattcttcacatataaagtacctccactaaagtgtcataatacactaatgacctgaatctaagtcacatttatctataatactagcggaccatactagcagtaattaatttaatatctcaatgactttattttactaaggaatgtttaagttcattgtctcaatctcagtctcataccaatatgagaatcagaccacttcatatataaattagatttttttttatatttacttaatattattaacaataatatggaacacaagtatcaggtgttattttgcatcgtgtttgggttgtatttaggtactttttgtttagttacattttatgtagtgcaatattacacttaattttatgtgtttttcgtgtttagcgaatcaaatgagaaatggaacaattggagatgaattggttgaaatcagaggggaaaaatataatttttggtgattgattcaaataaaaggtgaattttcaagaaattttaaagctatatatggagaatttttaggataaaaatgggcaaaaattgaaaaaaagtattagggcctcaacatagtaaacaatgccacgaccctaacgtattcttagaatgcctcaacacggaccgcgtgccacaatattggttttgccatgccatggcccacctatttgcaaaaaaaagggagctttgtgtaaaaaaaacaagatgtggaccatatgacgagggccatatttgatgttgattaatttcttgtgtaaagaccgcttagctttaatttggaaattagtagataattagaatttaattatggaattatttattaattttcaattattaaattttatggtggtttatttgaattcaaaatgtatttttatgtcanatatagaaatttcataattttgcattttcagtgcccgacaacattggaacgcggtgtttggctattataatcacatcctagtatttttagtatagcgaggtgatatagttagatattgggaatgtcgagaatagtcggaattttagaatttcctaaagtaccccttagtgacctttagggctattagtatggaagggtataatggtcattttgccaatcttgattttgtcctttagtgagaatgaa

SEQ ID NO: 36413 - DNA, 11928 bp, Cannabis sativa
  modified_base (10939)..(10954): a, c, t, g, unknown or other
gaccaagcttcccagataatctttaccggcgcacaactgcgccggcaaagctttgccggcgcagtcagggtacttttgccggcgcaaccatgcgccagcaaaagctggttttcttgtagtgagtgtatctcaccggggcatctcgcttggtacttgaacaacttggtttaacaataaccctggcagtgagctggagcttttcccatgtctttccaaggttgaaaacataacgctccatctaaaaatcacagttctagatgccaagatggacttcagcagctaacatcatttgaatgtcagcttcttttgtagagagctgatgcaacggagtagtggagcccattgaaagatgtttagagctgattagtgacggtaccgggagtattctttcctataacgagatggatgtctcactacgtattatcggtgtcctccttacaactgtgtcctctgatgcgaaatggtttctcatgtgaatcaatagtctgtacatctttatctcgctaaagactgtgcagtctgtgatttataaatataccctattgactctacatttaatgagttattccatttaatatcttttaatataattgccattatatttgttgattcgtattcctcgaggttgacacgtgtcatcctctgaagtgccagcttaatttcgggtataacaattgccccttaaaaagtctttttcagtgaaaagtgttttttaaatgattaccatgggtatttttgtcactatctattttaaaaaaatgcatgcctttaattttggcagttttgtagtttcgaggcacatcataagcattaaataaccatcttttccacttcttccttatttctatccgttagatcatttatttcttaatccaacggagatcaacccaatggtataaaatgaagagtggcagtggttagccataacaaagaatgaggaattattttcaacatcaacatatcaaatacaagtgagaaaagtcacccaagggtgtataaccctcacaggcaaccactgctatcttttttgccaaaaagatggcagtgctctcttctatcaattggccaagaaccaatgtggccaaagtagttttctagcatccatgtactacaataatcatgaaacaccatccaaggcttcccataagccttgggcaaccactaccatcttttagcattaactagtggcagtggtcacccgttagggttttgggcatcgaaatgaggtttgggggtctcaggacccccattatatgattcaccatcaaaaaaacaagtcaatacacaccccgaggggtccaagaacatgcacgtccgtgaactcccacatggacgtggcaatggtcagatttggagtaaaaaagtacatactaccctttagtaaattagacataactctctcaatttttatccaaatgacttagttcaactttaattggaaagatcttttcaaaatggatctaagtatgtctcattgtcatagctcaattctgaagttatcagactcaaaattagctcacaagataggatagcacactttacttgggaattaattggtgttattaagtgtgaactatgatgggatgttggagaggtatgccatagcccatgtgacatcatatgcgagaagtgccatcctaaaacacctctctccaatacttctctccaattttatgaattccaagccgagaggtgacattccttgtcactcctctccaatttggtatatttctagccgagaggtgacatcccttgtcactcctctccaatttagtatatttctaaagaagtgacatcccttgtcactcctctctaatgtttgcatttccaaagcgcaatgacacacaagcaaatttaagacaaggggaatatctaacttcaacaacaatcccaatgtttataggatatttacctaggaataagggatatttttatagatacttattttcctacttttttattcattattcacaaatagatacaggatgtgaaagtgagacaccccagcatgtggggattacaaacaaactctaagcccatataaagataaatgataggctggttatatcgatcacttgcttctctgcgaagaacacttcaactcttgagatttccttccttcatctttttcctaagtccttcacattttgtcgataccaagccaccattactaaaatactattgatgtacacagttacaaagaacaagagaccattctcttttcttgctcccattggtgtattattcccaagaacattatcaccaccattattattaggtttatggtattgagtctcccatgagctttttacccataagtttggatatttattttgcctagaaatctatttttgtattattattcacactcttgaggacataactctagtgtatcggatctaattaataaaaacaaagtagacatagtcccattactatcatgacatggggtgaactactataaatccctaatgtcctttttatttattgtagttttatttagccaaattaattcatcgcattcctcttattttttacgatcttcttagattagttgacgacaatccgtgtaaacaaaatacaatactaaaaaatttatataacttaatttaattattatatatattttaaaataattaaaatttattttataatttttattaattaatttattatatatgattattttgtttattttttttaataacaaaatacatttactaacttaatttcaaattgaagattattttacatctcactcttttttaaaattttgactatcaattaaaaaattaaaaagtaaaaatacttttatagactttgtttttaaaaaatatttttattttttttaattataaaaataaaaattaattaaaaaagtattagtaaatattaatttaattttttttattattattttcttattttttttcctagaaggagacttttcttgacgagaagtgtagtactgtttaagtgtcccactggttagttgggagaaatttttaagatcctattttttcatacttatgaatgtaagctcaaaattcgcagtagatttaaacgtgataacctaaacccatgaagatttaccattttaataatatcacagaaacgcttttaccaaaaaatctgtctacggaagagagaattttggcacaaattacccaaaacgaataaagattatgatatgaatgtaaaagcgtgtggtgattttacaatttatgattggtaggttttctctctctatgcattcgtcgttcaggagaagggacacggaaagagggctgatcacaaaaaaggggtcccacatagaagaccaactaaaagagactgatagacttttttactaacacaatcacaaagaactgaaccaaccaaaaaataaaaattgaacggtctgatggagagggttgaccttaaatggatggtcccacccacacatcggggcacaccgcaaaatacacatacatgatatgttatgtatatatatatggggtggcatttgggctgcatttaccttttccattcctcgtttctttatctttatttctcaaattatggaccagaaaccaactcactggagacaagagcatctgattagtcttcaatctggtttgtttcaaatagaaaaaaaaagttttttttttctttttctttttaataaattgttctttgaatttgttaagtgttttttttttgttgtgtacgactattatggattctaatagctatattattattgttttgtgatgaaatgaatacatgttcctggtttggatttagacctttctctttgtttttgctggtttgatttttcttttttcttctgtttttttttttcttttatattgatttttttgcctgaagaatatggtagtcttatctgtactttagttctacatggattgggataacattggggggttttggttactcttacagttttggggtgtaagagattctggctttaggccatcttcgtatgagttttgggatcttggattagcttattttattttatttatttaggaaagattgaattttaacttacctagttgagatttgactttagatgtagaaacgtggtttctaactttctattagccctttcaccctccaacttgactcttttctattttttttttaattcatgaataaaaatatgtaaatgaatgagtcctttatgtttgtaccattgacgcctttaggaactacgataattttgattgaagcaaaaatgtgtaactgcaaaaactgtgatttgaggaaatatgtagagggaggccttacttttcttgatgaacttgtttttatttttctcttaattattttagccagtaaacaagctacttgttgatgaggattttagttctttttttttaatgctaatatttctatcttgtttaaatttataacaatgatgatgttgaacatatcttttttattactaatttatatttatttttataatttaagctttggttgctagtggacattaattaatatctgaaggagaagaaaactaaaaaaatggaacttagagaagggctatgtgcaggccagtggccaaattcttcctcaaaagagctttcgtcggatcctccatcatcttactctgaattcaattcacatcaaggccaacagaagtggccaaactcttcaattttagattacggcgtcagaattgaaccatctttcagaggatttgatcagtcttctgaagttcatgctgtaattcctcttgaccttagtaataaaagtaaagtcttgggtcctgaagatgttcatatgcaggatacagaggaagccaataatatccctgattgggatccaagtgcaatgctgaacaatctttctttcctggaacaaaaaattcaccaactgcagaatttagtacagttgattgctggtgggggaggccaagttcttggtagaccaactgaggttgctcagcagcatcaactcattactgctgatcttacttcaatcattgctcagctgatctctactgctggtagccttctaccatctgcgcagaacacctttaccactgacctgccgtctatgggacagcttgcgcagcctggtgaggtccttggtgtgagtgctggtgttcagccacaaaacaatggccgaagcaaaatctctgaagagtccaatcaaatagataagaatgctaatcatggggttgagcataacaaccacatggatgaacatgattttaaagatgaggaggatgctgatgatggtgagaaccttccacctggtacctatgagatcttacaactagagaaagaagaaatcctggcacctcatacgcacttctgtgccatttgtggaaagggattcaagagggatgcgaatttgagaatgcacatgagaggtcatggtgacgagtataaaaccccagcagcgcttgctaagccacacaaagaattgggatctgaacctgtggttatcaagaggtattcctgcccttatgctggctgcaagaggaacaaagatcacaagaagttccagcctctgaagactattctatgtgttaaaaatcactataagagaacccattgtgacaagagttatacttgcagcagatgcaacataaagaaattctcagtaattgcagatctcaaaactcatgagaagcattgtggcaaggacaaatggctttgctcttgtggaacaaccttctcaaggaaagacaagctttttgggcacattgcgctgttccaaggccatactcctgccataccaattgatgaaacaagaggaaatggtggtggcccagctgatcattcaactgggattgaagtaacaaataagggttctgtaaattctgtaaccttcaattttggccccagtactcctggtgaaactgttgttcacaacataatggatgagaaaggaaaccttgacgatcctactgcatgtttctcaccacttaacttcgacacatgtaactttggtgggtttcatgagttccctcgacctccttttgaagactcagagagctcgttctcatttcttttgtcagggtcttgtagttaccctccaaagatcggagctgagtccagttctaataataatctttagtaatattgatgggtttattttcagcacacattaggggcacgaaatccctagttttctgttaccataaaaggtgaggtgaccccattacctgtaatttgaagttaaataaattattctactttcttataactctttttccattagtcttccctattattatgtcctgctaatctcacaagaaatttatagcagtgaaattgtctacaaacagtgacagatcgaagcaatatttagtgtagtttggaacttagtacaaagcatatcacatgcgacaaatcctctgccatttttataccaattaagagatgttctaatttcgagaaaaagatggtgaaaaagcattcacacattataacaatggcaaaagaaacttaaactcccatacaataatttcaaccaaaatgcttttttttttctaatcttgcctgtgttgctaacattgaaacaatatagctaacattttctcgtccataatgagaattgtggagcagaatgagcttcaaacccttagcactttttaatcctgcctgtgttgctaacattgaaacgatatagctaatattttctctgtccataatgagaattgtggagcagaatgagctttaaacccttagcactttctcctttggaagacttcttcgagggatatcgattgtacttctccctcaaaactacatcatctaagacagaccaagtttgccctctgggagaactgtcagcccacaaaaacctttcagaaaatggattcatcagactctctcggaactcttggaccgtctcgcagatgaaaccctgaaaagatcataaaaaggaaaatgactaacattccaaaatttggtagcatgcaactgtgataatgtatttgttgaaataaaaatttagtcaacaattgcaatcgatgatgcaatgataaaaagaaaaaaaaaatgaggccaaggttttggtgtaacttttgcgttctcaacatgactttctatatttcacacgttacctctgccatcgcttggatctttagagtaagatcgtcactaaggaggacatgctgttcatcaggtctcattttcctacacagtagagcacactctaagatatggtcttctgttgttggggaaagaatttccattaaagtccacggtaaaagcgagtttgttccacggtaaaagcccccacttccctggctaaatggagatctaggagtggcggggggagtagaagcagtcagccttccatcttccactgaggtctggacatgaatccaccatgttgtttctgtcatacatttctcaatccattctaacgccaggcaagcctcaggctttcttctgaatagactgccttgccgcttcaagcaatccaattcccttataactgataacaaagacacatttagttagcatataatttaatgcaacaacagcaagtgaagttatatgtatatttaattttttcattacccattcttggaatgattaaccgagtcccctttagaccttgcaaaagctgcagtgccttcctggaatccttgttcagaagagtagttgtgtccacaactatggtccatcccctcttatcccctcggacggagatgttctgaaatgaacttcaattactgatttatacttgttcagacaagttaaaacaaaaacaatatgaagttggacacaacttacagagaatggatgagtaaccttgtcaacagtatgagtgtaatttactgaagagctgcatcttgtaggagaactagggcgcaacatttctgatctgctgttctctacagtgtctacaacttgtgattgaaatggaactcgtttcatttccggtcttcttttgttcaagaccaattctttttcaacctccaactgattttctacagcgtctacaactagtggttgaaatggaactcgtttcatctccagtcttcttttgttaaagaccaattctttttcaaactccacctgattttctagagtgtctacaagtagggattgaaatggaactcgtttcatttccagtcttctattgttaaagacaagttctttttcaacctccacctgattttcagagctagtttgtttcacaaatttccgttcttgtaaaactctcaatgaatgattctcctcatttgaaaaggaatttaagtttccttcagggtgcattttggggctagaagtaatctttgaggagggtcttctgcatgatatagaatgcttcacttcttctagcgtgcccttcttttttatggacttgagtagaagggtattcggggtacaattttccttgtctggagtataaatctcttcttcttccccatcaacgtgagagaaaagttcctttgaaattgatttatctgcagcaccccatttggttccggatctgcaattagttgttccaagctgggtaacaccagaaggtgtacctttctttcttgaggacttctgttgtaaaagagttgggatgaaattttccttatctggagtaaagagctcttcctccctgttcaagcaagtgaacatttcctttgttatagatttttcttcagtactctcctgattatgctgcacagctttagaatcagacccaccttgcacagcttttaatctattcctaccggttcgaagggaaataacactagcagctttacccctcctagaccaaatgcttccaaagcttggactcttatctgatcttaatggagaattccttgttttttctgattgaggtagacctcctccagcaaagagagattgtggggtctggttttctttgtcatctgcaatttcctggacaacttcccaagctggcagagatgagtttacagattctgccatacaaggttcacaatccttctgttcattacctttcatgtatagcctttggtcctcagtttcttcaattctttcagaagctgaaggaatgccatcagagcaagcagatatatagtcaaccaatgagtttgatttttgttcacttgtataattttcattcattcctcgaagagatagttctacatcagaaagagcttctggggttaagctttctatgtcagtttgttgagtttcagtcttagcaaagactgatccaagcaacaaagatggttcatctttctgctcatagtctttcctggccaggctttcgttcgcagtttcctcaaagagagacggcggggtttggttttctttgtcatctgtaatttcctggacatccttccaagctggaaacaactttacaaattcacccatacaaggttcacaataatctactgaaacatccttctcttcagcttcttcaattctttcagaagctacaggaatgccatcagagaatgcagaaataaagtcaaccaatgagtttgaatttcgttctgttgtgtaattttcaagcttaccttgaagagatagtgattccacatctggagtttctggggtaaggttttctatgtcaatgcgttgaatttcagtttcctcaaatggttgagaggcaagttcaaccttctcttcattatcaatggaaaatgaggaatgacggcctacaaattgattaaattcttcctctagtcttataggagacctctcttgcattactatctcacaaacatctttaacagaagatgaatggcaatctgaacccaaagttaaaatttctgagtcggttccaaaaagcctattacaaaggattgggatttcattatgttcagtgacatcttttagtgggctttcagcaagttcatcattttcatccagaattacaaaaactggattttcaggtataggaggtgctgatggaatctcccttttcacagttataatcgaactctcatcagaaaataatgaactcatatcctcaacaaccaaatccagggattgcatgtctttatttactactgataaatgattgttatcctacaaaagtcaaaataaacaaacaaaacctaattttaaaagacaaaaaggaaaaagagaaaagtaaaattttgctacaatatactaaatgattttaaatcatgtaattctcacctcacaattttcttcgtttgctttgggttccactgtcatcgagttattttcttcttcaataggtttattctcgatcatcatagagttctcatcctaacagaaatgcacaaacgtattcaagaacgactcacttcattttctttggcaaattttcaaaaggggaagagggaagtaatttcatacccggtctaatcccatttcaatttcttcttgtggattaggaacatcgggtacggatacatgcgtggtttctaaatcataagcttggctgaaaggaatccagtacaacctatagactcggctcgaaccgccgattctcagagagtctccctccttcagctcaactcgaacacatggatcaatcttcttctccgcaacccaagtcccatgaactaaaaagcaaaacccattctatcaagaaccataagagccctaaatacgaaaagagagaagaaattaaagatccttaccggacgataaatcgattacagagagcttctgtaaggatgggttggaaagaatctggaggtggaatctgctgatactgggatgagtcaacatgatgttgcaatcagggtgtcgtccgacgattagtatttcatcgtgttcttgggtcgggatttggggaatgttattgttgacgatgaagatgttctttagaatgactccgttcttcaagacagtgaagactgggatttttggctcttgattatggcttagtttgcattcgttcgtggcagccattgtaagctttgcacaaacagaaagaaagaaaggtttgggagtgtccagtaaccggggttctcaatatatattttatatatatatannnnnnnnnnnnnnnngagagagagagagagaggggtttatcttaaaagagggaggatttgattttgaaaaaggtgaccgttgtattctatttttataacggcttccttttctttcttttacttttcctttttgaaaataaccttttcaaactcgatatggctaaggcctttgatcgtgttgaatgacattttttggagagctttatgtttcactttaatttttccctcaattttgttagactaattatgaattgtcttactactactaatctttcttttcttcttaatggtaaagtttttggttctcttaacccttcgagaggtcttaggcagggggattctttgtccccctatctttttattctctgtgctgaaggtttatcttctcttcttagaatgaggcaggatgctcatattctcaatggtattgctatctctagacatgctcctgctatttctcatttattttttgttgatgatagccttttgttttgtactgctgataggaattcttgccttgctcttcaggatgtatttaatatctattctaaggcttctgagcaggccattaatttctctaaatcttatattcttttttctcctaatactgttcctgatattcgtgctttgttttttcaaatttttaaccttgaggatcggccttttggttgtaaatatttaggtcttcctcaatgtcttactaggtctaattatcactctttcacctatctgtctgataaagttgcttctgttttgagaagttggtcttccaagtgtttctctagggctgggaaagaggttctcttgaaggctgtcatccaagccatccctgcttatgctatggcttgttttaggcttcctattaaaatttgtaaaggaattgaagctgcaatggctagattctggtggggttctactggggaggctaggaaagtccattggaaatcttggaagtttctttgtcagtctaaatttaagggtggtttagg

SEQ ID NO: 36414 - DNA, 9860 bp, Cannabis sativa
attgtccgcccctataatgacaatatatttattttagtgtctcaatttaaactgtaattgaaatgtgttaattataattaaaggccacaacccttatgtataatccatgagcctataaacaagaaaaataaaaagctcatcggttcataattgactcgcactatttgtaaaaatgttattttatttattattttcctattattaatttagtaactttttattattatttaaaaattttaagttatatttttcatatttcacatattttttctaccactctattgggcgaagatccgtccaaatgggaagagagcggggaggaagatcatatttttttttttgttggagagtatggactctttgtttagatggggacctctttaatattttatttaattttgtaatatatcttatttaagcaattttatagtattgtggtaacttttttttttttctctttttttataaatctttaaattgtatattggacaaaataatttgtatattaaaaatgcaatattttatttttaatttagtttttttagatataaattttctttctacataaatggatctgtgttgagatttcttacattgttctcgatgaagaatatgtaaatatggattaaaattcttaatgagaaccaagagatgagagacacttcatgccaattcttcgccagtgcgcgctttcctgtgttttagaaatttattcatcagtcgacctcatttattagattcaaagtagtggtcattacattaaaatataacatgtataataaatattattatcaatatttgagattgaactactatttcattactctttattcatatatatgatttatttattattatccaaactggtgttcaacacaaatatacctagtcttttttcacagctttcaattcatatctcaatgtaaattttaccacactcatttttcaccttaaatcatatatatgtgaccaaaaaaatatgatctttaagtctttatttatgtacatttgaagttatcgatttttttggcattggatacgttctaatattggacacattttaactttggtttacaaataatttttattttttgattaattttcattattattatttttcttttgtcaagataacttacaaaagtcacaaagaaaaagtcaataaagttcctcatctattcaaacagcacaataagctaatccatggatcacaatatgaaattagaagacaattaaattttaacaactttgaaaaataaacaactcgagtaaacccttacccaaaaaaaaaaatgaaaaaaaaaaaaaaacttgagtcaataattattatacaataattactattagtgcacttgggataaactttgcttgcataagcaagatggtagagtaggtttccgagacatacatttatttaattaggttcttttatcgaaacaagcttcaagtatttacaatgttccttcttctttggctggttgtgtgttaaaagagttgtacttcaagaaaatatcattttctgagattaaaaaagggctcttttgtttggaaaacattttatgggagaagaaactttttgattcaggagctatttggcaagtggggaatagaaatgacagtgctacttactctaataagtggattccttcagtcccgaattcctgtattttatctccaccttagcttgatgtttcgagaaaagtttctttgttgtgcgatgcatctggtgtttgagatagagatttagtctatgtcagttttccttttttcgaagcagaagctattctcactattccttggtcctctttggatgctccaaacaaactgatatggaactttgagaaatcttgttggttctctatcaagagttgttattagcttgctctttataagttgggcttgggtcgtgcttctctgggagtttttcgagttggtagaaaaagatttggactcttaatctttctcttaaggtgaggttgttttcctagaaagtttcaaataattggatccctacgaagattaatctagctcgccatggtcttttatctgatggtttgtatcctatttgtgatatgaaagataaaactactcatcatgttctttggggatgttcttccttgatgccttgtaggttgctttgtgagttttctttaggggatccttttggtcattgtgaggtttatcttactttaattatagatgcattgatccacttcgacaggaaatgattaatttggtgatggtgattatgtggagaatttggcacatgcaaaataaaaaggcccatagtaactctaaattttcgtcaattctagtggttagttggggagagaataccttagaaaatctcaacacaagaagcacacgacgatggtgtcttcttcttctaggttggtggtgaatcctcatgcatccccgtcgattcttatatggttccctccttatttgggcagtctcaaaatataacactgatgcaatatagatgtggtgggcaactgtagtggcttgggcatggtggtccaagatgagttgggtgttgtttgagctttggcaagctggaaattggaaggtcattttgattttgaagtggtagaagttttcgctatctgcaaagcgttggctaattgtctctctattgggtatggcaacattatcattgaataaagtgttcttaaaattgagggcttgttttggatgactttggtggtctttgtaacaggttccaagcgattagttttgcccattgttatagatcttgtaatgttgttgctcattctttggccaaacttgttttgtcaacaagtagtagtatggtttggtagccagatttttctagttgtatccatgacttgttgataacatgtactattcatgaataaattttcacccccaccttttaaaagtacttgttggtcttggtgtttagtagtttagactttttttaaaaaaaaaaattcaaatagaaattaattgaagtatagaaatctaaatcaaacatatgaataaccctataattagtctcaagtagatactaacaaaaagaaaagaaaacaaataatttatctttattattattattataaaaaattaaacgtctcacaccttgctaatgaatgaagtgtcaatattaatacaaattctaatttaggttcactgaataaattattactcctgcttgatagtaaatgtgagagctaaagtaaattatgatatgtgaaagctcaaagtaaattaggatttattccacctaatttttttaagtttgtgtttttgataatttttttattatttattttttgtatggctatttctttattttctctcttagtagatactcttattaatagaattctaaaaattttgttttcacaaattcattaataattataaataaaaatattatttctctctacttttactacatatttgaataaattcatctcttttttgactctatttatagtagtatgtggttcaacagatttggttttggattgaaatttctaatcggaaaagagagcttaatgatgttcttaactggattcaaaagtcaaaagctttaagaggtaaaagaagagttcttttgagtgtcattatagtcacaatttatcacatttagcatgctaggaacactatgctttggtatctaaagttaccttctattcaggtcacttttaatgtattgttcatagtgcttgttctagattgaatatttttttttgaaagaactaaaagttcattgaagaaggtaactgggaatgacaataggggatccctctctttgaactacatcaaattggtggccagccatcttggccaacttagccaccctatccgcacaaaaattatcagttctatggatgaaaacaaaagtacagattcgaaccaactagccagctgtcatatctccgccacaaacggtctagccttccaacaaggagggtaatgcttactttgaagtgcctggaccaccagcagagcgtccgaggcaatgatgatggagggcaaccctgcatcacaatagattttcaacgtctaaagaattgcaaggatctctgcttccatagtagaatctaccttgcacttcttggtgaaccattctctaaaagccgtatttctgtccaattttcccaccgcaagactggccacccctccaatccacgacgcatcagtaacacagaacacattggcagagcttgggatcacctccctgccatggaatatcgtggtacctgacaccgcctggttatcaacagtagcacggattgatacaaacatttggtatcttaacatgatcattttcctaagctggagaatatcaggtttaatattacggaaaagcaaggagttcctagtctcccaaattgatgtaaatagacagccaataaaggtaaacaacttccacgactcatcttgggaaagaccctcatggagctttagcacaatattgataaggtcaaggtctgacaagtcgtggggcaccaccaagaaaggaccagagaacctaagtgctttttcaaggggacactcccaaaacagatggaaggaagattccacttttgcattacacaacaggcatgacttatctggtatgaacacgagcttctcacgaactgggaaggccccaatcaaaactctccacaccataatggataacctgaagtgcatattgcaattcaagattaagctacagaccccgtttcctcaatccccatcccactgaatacactccaaatatgcccttttacatgagaagcacccatccgacaccttcttccacgccagaacatccttattatgaggagggaatctttattttagcgattttttccctagatcaggcccaaaaattttagaaagtttaggcacattccactctgagccattaatagacagatccaccactatcctcgaatcaggcaattcggtctcaccttttacatgacacccttgaactcaaattacgatagtcaggggatccaaggttgtatccacgcgtcgatgatgtttccatttccagggatagatacacatctttttctaaagatgtctcttgagtcaaggattcctttccacacataagagtcactcccatgggtattagttgcccagaaggaattattcttgcaatatttggcaaaaaggcatttcacctaaagcctatcatcaccattgggcatctgccacgccagtttggataacagagctttattaatatcctcaaacctcctagattgaacattttgaatattaagaatttgagtataaaagggagagtggatggaagatttaaaaaaagctttgtaagtaattttatcttatgtaattatttatttgtgattaatataatttattgaaaaagtgttactaatttctacttaaatataatactttattatatatgttactgtacttaatattttatgtctaaacagatataaatagtcgtgagggcgcacaaccgtacaaatgtattgactaaaattagattcatttttattctactacatcttattacctccaccaaaaaaaaaaaattactgttataaaatgaaagtaaataaaatacaaatttatggctgtagaaaaataatatcatatataacataaatgaatcattcatttcattgttgattagcttcaagataaaaatttatgcaccttaatcacacacattactaaattttaacatagtatcagagtaaattaaaaacttttatcttcgcctttgacttctatttgcgagctttcaactaatgtgtgtcagtttctagtgttgagatctttgacctctttcaaaaaatctataaattttctgacgtgtacactacaaatttctcgatttgactttgtgagattctttcaaatgtcacattcgacattattgtctcttaattaggggtgttaatgaaatatccaatctaattcaatctgcatgatccaatccaatctaatgtgcaaagtgtggatattcgtacctgtgtagatttgattggattgtgaaatataaaattcgtacttgtgcagattggttgctgacttacatgaaaaataaccgatctattccaattcatgcctatatttaaaatattataaatctattttcataatttaaagaaaaaaaataataatttaaaaaattaatacatatggtacattggtatattagtacatatatatttcaaaatttaacatattaaatgtatatatttatatatattaaaaaatataatttaaaacataaaaaacttttctttctacatacaattttttttttgtttttcttggaatttgttatttatttattataacatattgttggagacataaaacaataataatatattttattttgttgttggttatatgaatataatttatattttaataattattaaataatttaaaataaaaaagttaccaatctaaaataatcgatccaattcgtattattgtgaatcggatttgattagatttgagctcttttatagattggattggatccaaaatataaaatatgtacttagtgcggatcgaatgcacataaccaaaatagtacggcttggatttgatgaatatctttactctcaatggttgttcattatacctactttctaattaagcccaagaaggtgtaagagaattagtctcagatcgctaatgtgttaaaaataatactatatataagatcaatgagctagttttcttatcgtcaattgaatttaaaatgaaaccttatgcactttactatacatgatcatcatctttatcctaaattataaccaacaaggatgaaaagttggagagattgtcaaatttttcacaaagagaccatgaataggtaatgtaatattttcttataaatttttttgaatagtttaattaacactaaaatgattaattcctataaaatatatgcatgtacctcgaattaaaattgaggggtataattatttacttataacagaatgaagactccgagtcagagagaccttagcgagaatttatggccttcaagattcttcccttttcacccaagttaccttcaatttttctctaagaatagaaggctacatgttttgctattcattgcaggcatcattgttctcagcattatagaatactagtgcgattttttcggtgcgatttttctgatgcaattttttttgtttgcgattgttgctggtgtgcgatttttttctggtgcaattttttggtttgcgattgttgctggtgtgcaatttttttctggtttgcaaatataagtcttgtccttcatgacatggtgtgagagtctaggttttataattttttctggtttgcgattgttactggtgtacgatttgttcctagtgtgtgattgttggttgctggtgtgcgatttatttgttcctagtgtgcggttgtttctagtttggcttttctggtgtgcatttgtgtttctggtttgtgattggtcctggttaggttttttctggttttgcgattttttttctggttgcgttggttcctggttttatgtttttgatagtcggtttcagtcatggcttcatcgtcttctctggtagaccttagcttgaagcgtgtgtcgatcattcctctacaggaggaggaagagcttgcagtcagttatgaggggccccttattgatgaggctgaggtagatacccgatggagtattgtgggacgtttcttgatggatacgccaattgattacatggtgatgcaaaacctaatggttgtgctttggaagcctggtatgggcatgtatgtgaaggagttaggaggtaacaaatatatttttcaattctatcatgaaactgacattcaaagggtgatggatatgagtccttggacgtttaaaaatgctccttgcatatttgaacggctgaaaccaggggatgttcctcgggaggttcctttgcatcatcttgatatatgggtgcaactacatgatattaggtcgggcttcaaaacagagcgggttgtttgggatgctgggaaatatattggtggctttattaagtctgatgagaataattttaatgggttttggagagattatttacgggttcaggttcgtttaaacattgaaaaaccattgaagcacagaatgaaactgcaacagattggtggcgactggttttggattaagtttcattataaatttgtgctaactttctgttttatctgtgggtgattgggcatacggatcagttttgttctcgattatttattcaactaacctcatcaatggttaaaccttatggcacattcatgaaggcaatgtcacgacgaaatcagtatgcgataggggctaaatggctacggtctggggcacctagctcatcaaatgttggtggcacgatggtggttgaggccaggcagtcggcgatgagtgcagggacgaattttcagggttccgttggtggtgttaacctgattgtcatgaatcatggagtgaatcgtgggcttattttttctccaatagttttgagcgacaataatgggagtaaaggatgggaggcactaggggatggtaattcaaatttggaagaggacgaaatggtctttttggactctaaacgtaaacgaactgataaggaagtttctattaggcgtgttgggccgaaggagggtgttgatgtgtgtatgggggatgctcttgctactatttcaaaaaatgtaaatttggcaggcacgggcgagctcgctcgccagtcattatgagtactctaagttggaattgtcgtgggcttggtaatccaaggactattcaattccttaaagatatgattcatcaaaagaagctcatgtttatttttctttgtgagacgctatgtttgaaagatcggttggagcttctaacatcacaacttggttatgagggtcttttttcggttgatgctgaggggagggggtggattagcaatattatggaaggataaggatgatgctgagatggttgggtattcccaaaatcatatagatatggtcgtaaggcatgatagctctcatatctggtgccttacagggttgtatggagaacctaatcgattgttgcggggaaatacttggaatcttatgagggtgttgaaggaagaaaatgatctcccttggtgtattattggggacttgaataatgttcttagccaagatgataaaaaaggtggtaatccttatcctaattggcttatagatggttttcaacaaactatctctgattgtaatcttgtggatcttgagcttatgggtcattcgtttacttgggagaagactaggggcaaagacagtttgtttcctactgcacggttgattaacatggtcctttccacatcgaatcattgtcctctatttttggatctatcatttcggttccaggcagcttctaggagggtgtttcgttttgagaatgcttggctacgtgattctaattgatttgctattatctaagagtaatgggaagcttgtgtatcgggtaacattattgacaaagtggcggctatttagggccctgttgttgtgtggggaaggagcttaactgataattttaaggagagaattcaaagttgtaagaccagaattggtctccttaaaggccgattgtatgtggagtctctttctgaatataaggaggcgaggaaacaacttactaaaatttatcaccaaaaggaaatcttttggtggcaaagatcgaagcaattatggcttagggagggtgaccaaagtgcgaggtattttcacgctgctactagctaaagaaggaaagataatttcattcatgaattaaaagatgagactggttcttgggttcattgggggtcggtgttggaaatatatattttaccaggaacttagat

SEQ ID NO: 36415 - DNA, 6693 bp, Cannabis sativa
  modified_base (6520)..(6524): a, c, t, g, unknown or other
tggggaagaagttctccggccgaagatgtggcggcgccggcggaggttccttctctcaatccaaacgaaacatgctcctccgccgtgtagattccttcaagcacttccattcctcaacccttgatgaaatcgtcgattatctccgttcctcttaccccgattacaagcgttgtcagctccaacctttcaccaggttcgtccagcaaaccctagactccactccacgccgtctcaacaaccctaaaccattggtctttgacgacgatgaagaagaagaagacgacaacgacgaagattgtggtggtccgagtagttcccgaaagaagcctaagaaaggtgctcctgatgagagcgaagagagattacgacgtatggaggaagctcgtattgctagaattcggaggaacgatcaggatagtagttcgtctgagtcggaggaagaagagtctggtgagagcgatgaggtgacttccgaagatgctgtgtatggagaagaattggagccgaaatttgacctaatgaaatcgatgttaagagaatcgtatacaccgaaatcttccaaggtagcggagaaggagaagaatattgagatggagcttcctgatcgagaaaaggttgggtttacgagtgatggtcgagcaccaaatagtttacctaatgaatcgaagaaggaagtaaagggttcgagttctgtaactgatgttgaggtgagggggaatgatggtccgaggtttaaggatttgggtggaatgaaggaggtgttggaggagcttgagatggaagttattgtcccgctttaccatcctcagcttcctcggtggcttggagttcgtcccatggctggtattctcttgcatggtcctcctggctgtggtaagaccaagttagctcacgccattgctaatgagactggtgtaccattttacaagatttctgcaactgagattgtttctggtgtctcaggtaagggaaaactgattttttttttcctttatattgattatttatttgttattattcttagtcaattttgtcatgattggtttgaagaatgaaaaaggaggtgctttaatagtgaatgaggtttgtagatgtccagaaatttgatttttgttttgggattttgagaatgttattgaattgataaatttgattaaatggaaattactgtaattcatacttggtcgtaaagttttgttttttatggatgaaatggaggtgcttttacattgaatgaggtgtgcagatgtctagaattgatttttgtgttgggattttgagaatgttactaattattaaaatttaattaaatgaaaaattactgtaattcatacttggtcataaatgttgttttttatggatgaaatggaggtgtttttgcattaaatgaggtgtgtagatttccagaaatttgagttttgttttgggatattgagaatgttactgaataccaaaatttaattaaaatggaatttttttcattgtggaaattatctggttatgttttctgtctgattcatgtgttcttcattgctttttcatggacccttatttatttaggtgcatctgaagaaaatataagggaccttttcttgaaagcacagaggacagccccctcgattgtatttattgatgaaattgatgctattgcttcaaaaagagaaaatttacaacgagagatggagcgtcgaattgtgacacaattgatgacttgtatggatgaatctcacaggcttgtaaagccgactgatgatagtgcagactcacaatctcatggttttgttcttgttattggagctactaatagacctgacgctgttgattctgcactaaggagacctgggcgttttgatcgggaaattgccttgggtgtgcccgatgaaaatgcaagagctgagattctttctgtccttgctaaagacctaagggttgaaggttcgcttgatctatttaaaatagcaagggctaccccaggttttgttggagctgatttgtatgcgctggctaacaaggcgggtaaccttgcaatgaaaagatttctagatgaaagaaagtctaaattaacaagaaattgtatagatgaggagtataatgaagggtggtggaaggaaccttggcttcccgaagaaatggaaaggcttaacatcactatggcagattttgaggtaaatacttgtgtaaattttatgttattctatccatccctgcacttgagatgtgattagttttagatgagtttttaccaaaacatagactaaaaagtaactaaaatgctctcgtagaatgatagtaacctgagatacttaccaaatggtcaaaactatctttcccagttcccaaatattgtagggttaggcgggaatcccaggtttttttatttataaattgtttatgtaatttaatgttttccgttgtctgatacagtatacttatcaaactttcgttggatttcctttttattacaagttcagtttcatataaaagaatttatacatacatgtttctgctactcataagacgagtgctgttatctttaaaatattgtttcaggaatctgttaaacttgttcaaccttcttcaataagagaaggcttctctgctattcccaaggtaaaatgggaagatgttggcgggctagatcttttgaggcaagaattcgatcgatatatagttaggcgtattaaacatcctgaggattatgaggtaatttttctctttattattattataattatgcttgatatgcttatgattatatttgtggcacggagagtcagattgtaaagtagttcaaacgaggttatggttagagtctaacactattacttgtgtctaagaaatataatgtacaacctgaaataaattttattgatatttattatttttattttaatttagaaattattttttctttgtttttgacgaatgaacattgtttagcatttgaattgtcaatcgtaattagtggagacctgatgcgaccaggcattgaactgttaattgtggtttcaatttgttggtttaattgtaacttagttttttttttcatactctgtatagggtttcggagtagatttagagacaggatttttgctatatggtcctcccggatgtggtaagacattgatagcgaaagctgttgctaatgaagcgggagctaacttcattcacattaaggtcagtcctcctacccacttttctttatagtgttatgcttttgtatttgtaacattgtacatgtattcgtataattctgtgccttctgctaacttgtagggtcctgaacttttgaataaatacgttggagaaagtgaactgggtgttcggacattgtttagacgtgcgaggacatgtgcgccatgcatacttttctttgatgaggttggttgttctctctccttcactgttcttcatttccggttgtaaactaaggacacactaatcattatgcattattctgcaatataaatttgtattgaattttagcaaagcttgatttgatgataaattgcgaaagtcttgaaaaagttttgcatagcttgtttctgattctggcgttccactatggtttttgcttaacgaatgttggcataatttttctcatgcttacactcttggcctcgacctctgttttatatcattgtaggtggatgccttgacaaccaagcgtgggagagaagggggatgggttgttgagcggctactgaaccaggttaaataatctgcgattttaatctcgatgtttgtacttgtcacagaaaataacatcttcttttttattattattgttgcagctacttgtagagttagatggcgcagagcagcggcgaggcgtatttgtaatcggtgccacaaatcggtaaagctcattgcctctcagaattatttgaatgttaagtacaagttctctaatatcttgtgccctttttattcagacctgaagttatggacaatgcccttctccggcctggaagattcggtaagcttctctatgtacctctgccgagccccgatgaacgcggttcaattttgaaagctttagcaaggaagaagccagtagatgctagtgtggatttgagtgccattggacggatggaagcgtgtgacaatttcagtggcgccgacctatcttcactggtttgtctaaacattcttaaattagaaagaaacaaataaacaaacaaacataatctttcttaaatgtaaagtaaaaaccttaaacattattatattttatgcgcaggtaaatgaagctgctatggctgctcttgatgagaaacaaactaccacagaagccaaattggatggagcttctgtactacgtaccatcaaaacacctcactttgagctcgccatgtctaaattatctgcgtcggtaaaagccaaggtatcgcttattctcatatttcgttgctccctctttttttcttgttaattatgctaaacacatttccaattcttctcattccattctcatttttgtattttgcagcaaaaacagtactacaaaatactatcagagagcttacaatcttgatttcatttcgtttggtaagaggtattttgttaatgttcataagggagctaagggagaaatacctcacaaattttgattattttatttactaacaaagttgtctttactataattttgtgtcttccaattttgtttgttacattttgattttgggttgattaataaggtggtgtaagaaatttttttcttttttagttccttgttgcatatcaaggttttgtcagaaaaaaaaaagtgtatccaaaattaaaaattgaagaaaacttgatcaagttatttggctatatatttcaaaaaagtgtttatttaatcttccacactattttgtgtatagtacatctgatcttaggattttcatattttgaatttaatctaatttattcatccaatagatcaaatttaatccgatccttcatgaaaatattaattatatttataattttttaaacaacatatatacatgaatgtggattagatttacatatgaatgaaacatctaatttgcaatttagattttccaattaaatctgcattttctagattgagtattttatgaatatttataatttagtgtataaatattatgagtgaaattgaaaggaaatttgattttttatgcttgatttaagggttaattggttaggaaaatttaaactatagctaattgttagaataagtccactttaccgaaatctcaaaactactcttctcaaaatcccacacctattctctctccttctctttattctctctgtttgcccaacttaaacacagccgtcccaaccccaaattgtcccaaacgccggttacacccacatggaggagaccaaccggcccacgatgctcccccaccgacccatggcgcaccaccaccgaagcaccatcactgttttttatttttttattgatttttttgtgattttagtgttgatagattttgttagatttagggatagatataggttttagaatctcaaatgtgtgattttgggcaaggtctaataaggttcgatgtaggtccgatagggtcaaatgaaactgtgagtttgcgaggtagaagacataggtccgataggtccgatatagggtccgatgggtccgattgtgtccaacatgaggtccgattgtgtccaacatgaggtccgatgagggggttcaattgtgtaaatgagggtgatgtaaataggaagtattttaggagtatcataaaaattgtcatatcctacaaatattagttattatgtgtttaagggaagttttttaaccaaatgtaagcataaaaaatcaaatttcccaattgaaatttattaaaaaagaaaaataccttcaaatatttagtgccaatcttgtgaattattagttgtttttttatattatttatttaattaaaatattcgaaatatgatattaaattgtaccgacaataatatactacctcttaagactattttcaataaatagtgtatactgtctcaaatttagttcaaaaaatgaatataggagggaacatattaaatgtttattaaaagtatataaaaattatattatatatataaatgaaattataaaaaaaaattattaattatattaataagtggcaaaattaaataaaaagtaatatttattgtagtgtaaatttagtccatactattatatttgtgccaaatttaacataataagtaacatgtgtcaaattttacaccacattacaccactattagaatttaattttgagaatgtagactaaaaaaatacatatacaccgtatattagagattttccaagagaaatttatatggtatactaatttttgttatttttttataaaaatactgtcagacggtattttttatttttttactgtgtttttttataaggttcatactgcagtatattgtgttaagtttttactggtgttttttagttgttctactgttgttttgagttgttatgttttgtattctactggtgttttataaaaannnnntatttttgaaaaaaaattcgtgtgatagtatttttgtaaaaattaacctaaatttcagtatttttgtaatttcccttatccaatgaaacacaaaaacggggtaagttgaaaaatgcctcttttattaatcaattaaccaaatttgcctctaattttatatttatttgaa

SEQ ID NO: 36416 - DNA, 6743 bp, Cannabis sativa
tctacaaataatttacagaattgcatttgaaattttgttccagctgacgaaaaattctgggtccgcatgcacacaattatgaatagcaattccataaatataacaagtaaaatatgattttacgcgagcatgatataatttgtaaatgttttcaaacctagacaacaaacttctacacaattacagtgaagtaaagaaatatgaacaagatgagtaatagtataaaacaaaaaaattcacagcatatcatcccccacctatataaatttgggtgacatctttagtcttgtttttacagtcaaaaacaaaatgcatgttgtgttaagtaactatggaagtaattgatccactgtactactgtagactaagctcggaaccagatcaaatccaccaccacatgttgggttttcgcaaatgagcttatacacaaatgcctcatatttgggaaatagaaccatgtgaatgaatgcctaggtacatatataaacgaaaaaagcaaaagaatgtctattgatgatgatacttaccacaaattttcctcaatcactgaccactacgcattgatgtaaaattattagttttgtgcccaacgtgtggtatgaaaactaataaaaggtaaatagatggggttcatactgatcaggcaagacaccaacagcattgttgctatcagctgaaccaaactgtagacggctagccaacgcagctccaactccaatcagatgattaggtggataattcatttgctgaggaactacttttgaaactggcgagcaactggatttaggggatgaagttgctcgggtacattggtttttgctttgctttagcgattgttgttgagagactggactgccctttcttctttttcttctcccgcctgtctgctgctgctgctgttgcggctgtggctgtggctgttgctgtttctcatcctgggactggaaaaatagtgttgaatgtttcctgtcgttctttatcttttccagcaaggcaatgcgctttgttatattgtcaggtgagagttgagtttcaagaccataaattttgatgcattcaactacattcattagagcagctatttcttcgtcagtggctgcatcctgtgagcagttcttaatatgtcatgattacgcatgcaacaaaaatggcagttcgttataaaaaagagaagcaaatcatgacactcgaaaatatgggatcgtaccttttcttcggctgatttcttttgcacacaaagctgtctggtataactcttcacatagtccatgtactctttcaatagtttaactggctcgaacatttctgttaactcgaatgcataagtgagtctgattgccgcaatgaatttgttcctttgaatcagatgttgaataaagactgcagtatgtgtaataaattgtaggctttacaaaatctcacaagcgcaatcaactaataataaagtatgaaaatataaatcatgttacatagggcagcaagcaaaatttaataataaacttacaaggaatcttatatgcagaagcaaggggacgacttagttctagagcatgtttattttgagtgatcgtatccagaaaactcaaaatatcatcatcatcttcaaagattggaaaaattcgatatataccaaggaaatgtagaaaccccaaaagctctaaagagttttcaatattggctcttatcttttctttccactcatatgctacctttattgcatattctctcaagtgagattcaattcgtggtgagattctcaatagctgctcaaacaaggaaatgtaactcaacatgacactttccttaaaaccaacatctccactcttccgaagtttagaaaaagactcttccacaatgaccaaaacttgttttgctgggtccggcatttgcagaacagataaaattttgtcctgtgtcaattcttcaagcaaaatatgctcagaacttctttcgctcgtggttgaaatggatttaaaatttgaagaacttgcggcagtgtcgtttgctccaaaattttgtgcttcctcctccatgtcaactgcagaaagaagagaatttggaacaagaaaataaaccataacaacaacacagattacttgcactggcctgtgtattcgaaagtctttctcaaaattataatagaaataggcaatcaattaatcatacaatgataggccactatagagagtagctcggaattggatactgtaagtattataatatactggatcaaccattcagatgtttaacccagtagttacgccaactctaaaattgaaaaattctttagcggttgtttctaagagaatgagaaaaaaaagtaaagattctctctctatagttatatccattaacttttttagcggttgtttcagatcatcaatggatatactactgcacgtgctatctcctgtagtatatccattgatgcgcaactcttccggcaaaaggtggatgaaaaccataagcttgtctcagaaatgtcaatgtagaaaaccttatgctgacatgctcatgtacacgaaataatggcattgagaacctacatatgttcacaacttcacatgcatcgtaggggaagaaagagaaagaatctttaggactaaatattttaacagttgaatatgagtaatgatgtgccagagccaggcaaagcaggtaacagggaccacatttgtctgggataagcaagtatacaaacaacatttgtgggtcccagcagcactataatgatgccataaataatatgaaagatactgttaagctcttactttcacaagattctgtggctgacacagatttttactagagaacataaacgaactcgtgttgtattataaaatattatattaaattgtgttgtatttcatatttttatataatattatattaaattttgatttatattaaaacataatatatatacaatataagactacgagatataatactataattatataacatacaatataatactatataatacaataatacaataccatataacaaagtgtaaaccaaacgaactcataaaaactccataaacagtataggtagaaatataaacagagaagctcaccatgttctttgtctgcaatgcaaagggcccgatgtaattcaatagcttctctgttctggtcaacaacatcaaagagactgagaacctcatcagcattaaaagcagaggacagtctaaagctagccaaaagctgcaaaaaacccagcacttccaaacttttctctttctcagtggtcacggtcatcttagccttccaatcaacagccaatttcattgcttcctctctcacttgagggctaatatcgggtgaagtgttcattaattgtcccaacaaaagaaggcagctccttcttacaattttcaggtcaagctccttattatcactacttgaatgcaaggggtaaaaccccttaactgcatctaataccaactttggagggtctggtgatgtttgaagaacagcataaagttcagtacaacgaaattcatgcctcctcaattgatcactcaaaagcatctgcaagtattgcccattagtgatgctgtattgataggtagcaaatgatagaaaatccgcagtgttgagattattttctgatttgtcaagcttaagattattttcttcagttactcctaataaaccagttgacttttgtatagattcaaaccctatctgtctccaagtaggaaactcattgacccttttctcaaataggtctcttttctctacttcttggaaacgttcttccaccaatctttgaaatgaagcaacattcttctctttcaattcaacctcttcgaggatttctttgacccctttttggatcaaacccaattcctcaatttttgattctaacgatttttccttcagttgaagattctccaccaaactctcaaattgcacccctttcatatcaaattcaaaagcacattcgtccactgattttttcaatgaaaaaaaattattcttaatcacttcctcatccatccgaacgaactcaagtctcttttcgattgactcaaattccgaaagctttccaagaatcgagaattgaatcgatttaagcttttcgtcattcaatttaatttctttctcacattcgtgaattgaacttctaagcactctgagtatctgttctttctgctcaatttcgttcttatgatcctcaaccacacctcgaaccgaacgatactgtctatccttcacatcgagatcatctttgcatttcctcagcattcctcgaatcgaatcaagttctttcttcttagtttcaacttcgtcagacctttccctaatacttctctccagagaatccaatctccttgtcctctctttaatacctttcgccaaatgctccatatctttttccttctctactaacgatttctgcgcctggtggtatctcctcacagtatcctcaagttcttcgcgttttttcttaatcgacaaatccaacgcctggttacgctcttcgattcttttctcgacgccattcaaattctctgctttcaccgcaatatccacggacaactgcgattccttggcttccaactgcttctctctggcttccacattcttctcccgctccacaagctcttcaagtttctcattgagcgttttccgaatggagttaaagtgttcctcaaggtctttccattgaaatgttaacataagcagtgtagaagcttctgtattcagaacttcgtaagctttgccgagactgccttgcttcagttctgttactttcaactccgacgctacttcttccatttgcaatataataagagacaaccaaatcgtaaggactaagtcactagagtatacactgaaaaatcactagcaagtgttgttccgccattagagaatgatgcttgaactcgaaaccctagaatccagaaaaatatatattttttcttcaaaaaaaaaaaaatgaatatgtaatgtaggacttaacttgaggaatgaaattaaattaaaatatttataatgttgagatatttccggcattatataaatttttgaggaaagggaggattggactacaacgtacacatttgtttaagggccactaccactacacacgttttccatttttatttttggccaattatttagaacctcacttcattttgaagtgtgagatctctcaattcaattagacccgttggattgaattctaaagtcaaataagttaaattctatggatggtaattgtacaggggtaaagtttttaaaaagatgagcaatccactaatttgtttgaaagtgtattttataggggagaaaaattgatttaaaataattcagtaatttatttttgtacgtttttattgtattatatctttcatcatctcaattcgtcctgagttttttattttcttttttaatgtcaatttagaaaagtgtaccgttacaaaaaagaatggttttaatatttttatgattatatatttactttaatatacggaagtttaattttttgcagtaataatagttaaattatattttagaactctgtaggcacttaaccgttaaatattaagtcattatatacgtgtcattttcttattggtatatttaaattaattttcttaaaaaaaataaaaatttaatgacttgaaccaatcagaaattgttacgtgtcaatttacttaacacttaacagtcacgtaccaataaaagttcaagaattataacttaggtattattattgtcaaaaaattaaaactgggacttaaatttaagtatttaagttaaaaattattcatataaatataatattaggaacagtttactgctaaagcattaaaaaatctattttactagtggataaatgccaacacttttttgtggcaaatgtactgcaatattattttttttaggagtgacaaaatatgtcatcatatcgtgttcgtgtcatattttatgtgactgcttctacatttcgtgttaggcgtatcgacccatttttgactcatgtctaattttctcaaccgtaaccctccgtaaaatttcgtatcatgttcatattgacccactttgactcgtttcactattactgaagctagagttgtagaaaaaataatagatttaagttaaattaaaaaaactcatatacattatgtatatatagatttttttatatataataataaaaataaaaatatttaaaaatattaaaaaaaaaattaaagaaaaatttaaaattttttaacttgaatcactaaatatgtatttttacataattatattattaatgataattttttattttattttatttaaaaaaaattgtgttaatttcgtgttaagcgggtcgtgtcatgtttgacctatttcattttggattaagtcgtgtcgacccattttcgacttacatttaattttctcgaccctaactcgtaaaatttatgtcgtgtgtttgtgtacaatgtcagaatccgtttttccacctctattttttctcatattttagtatgaattgttaagtttgacttttgactcattaatggtcatgtgtcagcatattatttttacatgttttagaattttcatcacaaaaaattaaaaaaaaatggtattattgtctattaataaacacaaagtataggtactctaaccacataatttactttatttattgtttaaaaaaaaaagcttttttcatttttacactttaaaacagtttttttcttttttcatttttacggaattctacat

SEQ ID NO: 36417 - DNA, 5850 bp, Cannabis sativa
  modified_base (1927)..(1929): a, c, t, g, unknown or other
aaaaaaaaaaaaaaattgtttgcatactgttggtgtttagtatctttcttggtatcatactcctattgatgtaattaaatactagtctcgtataacttaaaaagaaaacttttagaaaatatcattaattaatcttaaattgctacctataaaaaatgttaaacaccactaatatccaataataatgctctaaatttatttgttctaacatggaaagtcacatctccctcaatttattgaaaagcaatatttgaggtcggctcaatgaattgaattttcagttgtgttgctcacttaacaataccaataataaaaagaaagttgacaaaaaaaggaagcctacgtatatttcaaatgaaaagtgaaaattaaattacagtgtggttaattttaagagaatattgactcttaaatgtataatgagtaatgagctgctttcatcaacaacaataataattttgactagtaaagattgatcaagggttttagtcattaaataaagaattcaactttgtaatgtaatcatactaattcaagtcttaattagcacttttaagttgtcaattatgaacagttgcactagtcatgtggttaatttttattaacattaaggcacttaattatgtttaagagggaagaaaatcctttgtaggaattttcacaagatatccttgaccctacatgttattttttcccaaaaataaagttgatttcttggaagccactctaggaggccatgaaattataaacatatgtatactcccctatatatatacacacacagatggagtatattgaaacataaattcttcttccttcacagacaagccaatcttttttttttttttttgtaatatatataaatattcctatttctatgacacttccattttgtttatatgttcaaccatatttttcctaacatatttgtctccttctactctctctctctctcgagttgttttctgatttatagtttcatagcccagaaagatagcagtaatggcagaaattgccaattacagaataagcaatgagtttggttgtggtttcatgagtggaattttcaaccgttggagccactggtccaaaaaatcccctgctgttcattcactaacaagctctgaaaaccccaacaagcccaacaatcatggctcccacaaaaatagaagcaccacctcgccagagcccaccattgaagctgtgatgaaactacaccaaaaacccactaggaattcagtttcacagaggaaaattcaagggaggagaatctcagacgctgcaagaagctcaacttcttcctccaaatctaatggttcaggggaagagagaaagctgagaataagagagtccacacccaataattctctccaactcgctcgagttaacgataccaaagctctgtccaaaacaagtaccaccaatattaatattaatggtgggatggtgttgggacataacaatttgggtaacttgaagcaaccgttgagtaataataccactactcctccaacctgttcgtctagaagtactattttggcactttctaaaagccttcaagttcatcaagagatgagctatgcaactagcaaaaatggctatggaaacattgtgaggaacaacagtgatgagtttcgagggatttcgaataataagttggagcctgaagcgttgaagagaatgggaaatgaggcatacaaggaaggaagatttaaagatgctttggctttgtataatcgagccattgctttggactccagtaaggcagcttatcacagcaacaaaagtgctgctttgattggtttgggacgacttattgaagcaatttgtgaatgtaacgaagccattagaattgacccttcttatcacagagctcatcatcgtttgggaacattgtatctcaggtatatatatatatatataatannnatatatatatatatattattattcatgtttctttgtgtctattttctgtgttttgaaactgtgtcaaactaaaattcgtttcagattggggcaggcagagaaagctttgtattactacaaacaatctgggccttatactaacacaaaagacacgtacaaagctgaagctcttgaaagatgtctactgagttgtgacgaagctcgtaaactccaaaactggaatactttgttgacagagacccaatttgcaatatcctctggtgccaattcagctccactggttggcctcaactctttttcaaattttaataccatgtcttgtttaacaagattacaatctaacgttaatttgtgctttgtttgttcaagttgtttactttacaagcagaggctctgtttaggcttttaagacatgaagaggcatacgccatataccaaaagggagccaatttcagcattgatgtttgcaccaacttctttggcatgccttctagtgcttaccggttaatgattggatcccaagtttacttggcttctggcaggttgggtttgacacaattactatcaataatgttgtgattaaccttcataataagaatgaaacgaattctgaaattgaaaaaagggactcttttgcagtgctatgccacataataagatattacattgttttcacaagtgtaatgagtacattaccaatataactaacaattttccattttaaattaaggatatttctaaagggggcattcaatatacatgctatctatttttgatgaaaccacaatcagattggggtccctgccatttgattccatttaaagcttatctccaccattagcaaacttcaacaaagcactccacttctttttaattaaaaaaaaaatgggggagagggggtaagcaagagacaattccaaattaagaacgtaatgattatgctttagattaaaaattagtatatataaaagtaacatccagccccacttgatcaatttcaatttattccaaccccacttgatctaataatctaagtgaagttttaactctttcgggttcttcttcctttctgtatagcaatcagatcagctagttttcacaattgaaaatgataaaaaaaaaaaaatttgcttgtataatgatatatgtattttgtcttgttttgaaaaacaggtttgatgatgctgtagtggcagctgaagaagcagcaaaacttgatccaaataacaaggagatcatgacatcagtaaagagagccaaagcggtttcatcggcacgatcaacgggtaatcttctgttcaaggcggaaaagtactcccatgcctgtgttgtatacagtcaaggactagaacaagatccgtacaactctgttttactatgcaaccgggcagcttgtcgcgctaagctcatccaattcgaaaaggccattgaagactgcactgcagctcttgttgtacagccttcttatagcaaggccaggctacgtagagccgactctaatgccaaggtaatgcaaaccaagccaacccacatatgctttctctctctctcttaactcttaatatttgaaaggaaaaatcaagcactgattggagcaccagctggaaaaaaagaaaaaaataaaaatgtgtaaaaaaaagtattaagttaagttaccctaaggaagtaactggctaccttctagttactctaactttattacttaaaactgttttttaagttttctcataaaaattatatctttgtaaattttgccaaaaaacactataaaaaatgaaaattccccgtaataaaatatctttctaaaggaaaacaattatatatattttttttttattttttattatataattgttaaaatttaaaatataacatgtttataaaataaatagattttttaaaaaaactttatatatgtgtgaaatatggtatttttgtaaaataaaaatgcctatgactgattggtaagattgtatgattaattagttggagaggtgggaagctgcaattcaagattacgaatttcttataagagagatgccagggaatgaagaagttgggcgagctttgtttgaggctaaaatccaactcgaaagacaacatggtgaagacattaaggacatgaagttgggatccaacttggtttcaatctccagcactgaacgtttcagacacatagtaacttcacctggttattaattattcttcttattcatatgatttgtatacatacatagaataataggaaagagagagagtagagactaatgagtggttttctttttttttttttttttgaataacgtgacgacaggaatgtgtgtagtgttgttttgtaacaaagcaaaacaaaaaagagtgtttcaagcattggaacaagtgtgcaagagattcccatcagtgaatttcctcaaggtagaagtggaggactacccttacttggtcaaaacagaaggagtaaccaccattccaacctttaagatatacaaaaatggttccagggttaaggaaattccaggcaacaaccatgaactattagagaactcagtcaaatggtacagcagtactacttgaacactcacactcacacacacttttttaatatacagaaaaatcctcaaatttttgaacaccccataggttattaattatttttactgatgtggctttgcaactatttcgttaattgattgtatatttcttttttaatttacaaaatatgattgtatgcagtcttcaactataaattttccaactgttaagagtgaaattcgtttcagtttaattcgattattttgacaaggggtgtaggacaagtgtaatactaagtattgtcaccttcttatgaaaaaaaaaatgggttttttttattttttttatttttttatttttacactttaaattagtttttttttttctgtatttttcagaaaattttacatcgaaatccctataggaattaatggaacaacctaaatttcaactaaaatctaaatagcaactcacatagaaaccactgaaaaaaggtattagaacaactcaaatcgtaaatttaaaaaaaaaaataaataaaaactaatatatgaagtaatttcaaaaaaaaaaaaaaaagagtccatacatagataaggatgagaaaacttcatcacatgaataaaccatattcagtagtggtggtccaagaaagaatcattactcaaggataatttagtataaatttaaatctttgattttaaattttagattctaaatagaaattttaaatttcaatttcaaaaaaaaatacattgaacattcagtataactttcccaagttgttaatatctattttctgtgaatagattcgaattgtatgtttatgtatggaatatgagttttgtattttgtgaccaggatctacttggactattctaagaactctttattgtaactaaacctaagtcatcaaaggaccataaccgcaatattatatctatgaaatttgtatcttgttcatagtggttttgacaagatcattctctgcaaagagaaaacatgcctacatttacttgaaagtaggatcatctgtatttgaacataaggatgtacatttaggattggatatgagttatcattaaattctttagacaattactctagattttaccttatgctaagaaatttgaaatgtttgggaaatttcatgaatttctagcaatgttaaaaaatattaaggtaagtgattaaagatcatgcaaactgataggggtggagaaatatttggtagatatgcaattcaaagataattaagttgaacttcgaattatatccaagcttacctccatagaaatttaatttgcatattgatgatagtataaggtctatgattagttactaatagctgcctaagtccttctagggatatacctagtgataggaaaa

SEQ ID NO: 36418 - DNA, 6357 bp, Cannabis sativa
catattaaagtataccagccgaaaataataataaataataaaatatttttgtcaattaaatatgccaaaaatgaaattaacagttacaatataaatttttaaaatattccaattagtttaccatattgaaaatataattcttaatatttcaatttattatgtttaaaaaactttaaatttatttttgacacaataaattatttaaaaaatttacagaaataatattgtaactataatgaaaacaacttaaaaaaaatattttagtaagtatttttaagcacaaaaactaactaaaaaaaattctaataagaaggatgagaatatcactccttggcttctagaaaaagtggccaaatctaatttattttaattggacagcgcgtgggcccacgtacgagtggttctgtaaaaaaaaaaatatccgctttaactgcgttatcatatttttgactttaataataaaaaaaaaaacgtagacattggcgagtttcgaagcccataaacgcatctaattactccaactcacctttttttctcaatctcatcatatcatgtctcccaataattatatgaaaatgtataaaattaatattcattattgaaaatatcaatatatatacaatttcttcttctttttctcttatacttattgagtacttattcaaagaagtgtgacgaagaagaagaagaaaaggaggcagttttttgtggactaaagtggaatcttatatttattattatatataagcatataaagatttcacagagaaattaaggagagaatttcacagggaagatgggtacttgtgtttctagaccaaaagggtgtgttggaaagagtttagatttgtcaaaaaagaaaaaattccggcgaagaagaactgtccagagacgggtttcgtcttcggatcgatcttgctctaatcctgcatttcaaggtttgatttttatatttaatgaaattatgatttctggtttgtttgattagttctgttatttgggtttgagctgaagaaagagagggttttggttttgtattgatttcgggaattgaatgaatgaatgtgggttttgatttttttttttttgaatgaatgaaggaacagccagagcaagtacagatctttcatgggttgattgtacttcggttaatgaatctgaattggatgaagatttctatagcgtccgtgaaggtatgtgattttgaggtgttcttataaagaaagataattatgcaaaatctgatcttgatttatgtgcagattttgtgtccgaaaatgggtcgagattgagtgtttcatcgcctagagggtttttgaatcgaaaggagcacagtgaaaatattgatggggtttctaccgttgaaagtgatgaagaagaagggacaacaccaccattggataattgtggtcttcttccaaataattgtttgccttgtcttgacaacaaaaagatggctggtccttcaactttaaagaaaaaaatgccttcaaaactttcctttaaatggagagaagggcagcattctgatctctcattaagtgagtatttcatttaaaatgggaaataattgagcttagtttgataataagttagtgattgtaatgttgatattttgtgttttcttgtttagtttcgccaaaggttcttcgacaaagaccaatagcaggttcaacagttcctaattgcccgattgagaagagaatgcccgattgttggtctcggattgatccaagcacttttaaagttagagggaaaaactatttaaggtgagtacaaattagagaaaaacttgttggaatgatgcagttcgattgctttttttgttgcatattaaatcctgatttggttgcagggataaaaagaaggaatttgctccaaattgcgctgcgtttgagcctttcgctgttgatgttttcttatgtccgaggaagatcgatcacattgctcggtttgtggaacttcctgctcagaatgcctctggtgatgttccttcaactcttattgtaaatgttcaggtacattgttaactttatctattagtatagtatattcgaactgttaacaagtttatttatgttaaaagtacattatttgacattttgcaggtgccattatatccagtttcgatatttcaaggcgagaatgatggagaaggaatgtcctttgttatgtactttaagctttccgaaggttattcgaaggagctcccatctcactttcgagataatatcactgtaagatagcattttgtttcctaattttgctagttttctgttttaggcttctgctcacatttattgactagccatgttttgtcttccttttttagaaaatgatcaatgatgaagttgaaagagtaagaggttttcctgttgatacaattgcaccctttagggaaagattgaaaattttgggaagagttgcaaatgtagaggatcttcatttgagcacagctgagaagaagcttatgaatgcttacaatgaaaaacctgttctttcgcgtcctcaacacgaattttatttggtatagttttcataattacatatagaaatttgttgattaccatgaatggtagatgtaagtataatcttactcaaaacacttgttgactgactctctttacagggagaaaactacttggagatcgatctagatatgcatagattcagctacatttcgaggaaaggtatcgaagcattccaagacagactgaagctatgtatattggatattggtcttacaattcaggtaacttaattgtcaaataaggtatattaaagctttttcatgacatcttgagttccataactgatgatactggtttgtgctttgaaacagggaactaagcccgaagatttgcccgagcatatcttgtgttgcgttcgactgaatgaaattgactctactcactatcatcaactgggtttttgaatcaagaggctctatatagtctagtaggtgcaattatgtgaaaggtttttcagtcattttctgaattgatcagcatatcagcctcaaaatttgcctgccttttcttcctttactatttttcataaacaaaaaaaaaaaacaacaaaaggccaagtttaacttattttgtgcctaggcttgtggtttggcagcgattttttcttcctctttcgcttcaatttttgaggtatattacattcatttgtacataatatccgaatgtatagttatatttcacaaaatgaagtgaaataagaaaccatgaaagtgtttctcatcaaatttaataagatgattcatgtgattcctccacttgttttcttttttcatggccattgatatacaacatgatcttcatattgaattaattaatagtgtgtacaaaatacacgaaaatgtcatacaaaaatatgcaatgtttgacaaatttggtgccgtgttgactgactattttgttatgttgtgcttatcaaatcttcttttaactggtcgaacaacccaaagtagatgagaaaggatagacttataattagatcaatattcttacctgtgtttgtctttatcacaactaacactatttcttcttatggtttaggcagcaatgcactagaaagatgaaataatattcttgtgtttacacttgtattaaaaattcaacttcacaacattatgacgatgtattattattattgactattgactttcatcatctttaggaatgttaataagtttattatagttatacttttcgttcaaaaacaaatggaaaaaaacaaccaagacttaagaatttttatgctgttctactgttatgtaaacttaattagttcatgactctgtcaaagtataaataaataaaataaaagtaacatttatggacctaaatgatacaatttagtatatggtcttttctttttgaacaaagacagtgctaatcatgagtataggatattaattgatggagccattgaggaagagaccaactgagaaacaaaaactgaatattatataatacatctctttgaaatattggcattaagctattgaaaatgcaatgttatccaaacaacactgacttattattcaacaattgaatgtacatataatacatgctactctaagtaatatatttccaacttaattaatcttttctttgattttagtaaacacaattttttttttttatatatttttttgttagtttgaactccattataaagtcattatacttggaatctttttaacttaaggttcttggaagcttcttttaactatagctggatagatgtttcagggaagctagtcgttctccaaaaaaaggagtcttggaaggctagctatttcccgaatagtagcttcacagaagctagtcatcttctaggaaagagagtcttggaaagctagtcatccttcaagaaagagagtcttggaaggctagctgttccccggatagaagcttcacgaaagcattttctcatccttctaattaataacacgactcgcttagttcaggaatgtgttccacattcggagagtaactttgtaagtgctaacgtggagatcttaattgtaggagtttgttaaggcataacaaacttaactgaaatcaattacaaactatcgacttaagaatctcatcttcagcacctagatatactctcatgaacacgaagaacaatacacaaagaagagaaatggtactcttcagtagagcaagaattctcctcaagttatagagagaagctcaagagtgttagagagatagagaggaaagaaagagagttattttttgtgttctctgcaagagaatgaggaaaaacaatttgaatagagagagtttatagcgattatttgtcaaagaatgtgatataaaatctcaacacctttgtaattattcaagtttggatatagtggaaagagctaaactttcagaggatagctcccaaaaattagagtgatgaaccttactaaaaacttctgtgtttgatatttcattctaattccgcattattttgttttgaattgtaaaatgagttgtgaggggaatttaacaaaatatcaaaatatattcctctattttatataaagatgacaatattatcctctacatgtttagcaacaagaaacatgcaacatgtcatctcttacattttcaacaggactaaatgggacaacatgtggtaccacacctagtcaacttattcaaaatcaactccaaaagtttccattttattttttggatgtttggacttatcaatgtatcactttaattaagacttgttcaaaaaaagaaaaaagatgcgtacaatgaaaattcaaatttcagtactcttccactatgtgaaaatgtaattttgtttacatcaacgtatagaaatacatacacactatacatatatttaaccaatcttattaagagttttacaaatatatatatataacaagcacttgtgattgtgaacaagatttttgagttttcaatagcacaacacacaagttcaaagagagggcctcatgagagagtccttttatgattgcggtcattaagggttgaacaaattaaccttaattaattactataattattattattgttttctagctgcatttattttcattcttttattggatcgttaagattcaaactgttaataagttaattaatttgagtgcatattcaaaattaagcaaattaaaggaattaattaattaattaataacaaaaaaggtaagaactacttaatctacatcttgaattcgtacgaaaacgtaacctcaattaatttcgtgtaatctagcaaaaaaaaaaacaataatgaacacaatgaaagaggatgggaattatgatattcgtgaaaataccaataaagggtgacaataataatgatgttaattaattacaacataatctgaaaaaatatgatgaaactataaactatatacaaatgtaatattaagatagatgatgaaggacattaatatacataggaaggaggttttgaattaatattaagtactggtagaagattattaattaattgatgatgatgatcatgatcccatacatcgtcccaacaaggcacataaagcacatgatctttgttccctctgatcaatattattctgaggagatgtattattattattattaataatatttgatctgtgttctacattattattattattatttggaccttctgttttcttgggattcaaggtagaacaagataccttattattaatattattatgatgatgatgaggcccttgatcatgaatttgaagatgattatcccatatacgacccgatgacccttgtcttctgaaagacaccacagatctttgtaacgaagtcattataattaattaattattattat

SEQ ID NO: 36419 - DNA, 5890 bp, Cannabis sativa
  modified_base (5839)..(5846): a, c, t, g, unknown or other
gactaaaattaattagtcgcaaaaaattttgggtgactaataaatgagttttaaagaccaaaaaattagtcggtgaaaatgagtttttttgtagtgtttggtcactcaatgcagaggtgttgagtcttgatgaaggtgtcggccctgttttgtcattcaacaaagttgcgattgaggaaggtaagaaaagaatggatttgtgtcttgttggtaaggtgatcggtcctcggccggcatataaagaggggattgagaaagcaatgaaaggggtgtggaaaattaatcaccgttttcaggtggaagaattgagttcgaaaaacgtctttcagtttttctttcgaagccgtgaggataggcagagggttttcggtggtggcccgtggacaattgacaaacaattgatctgttttgtgaaacaaatgggattgggtgaaatttcaaagatgaattttgattttacatcgttctagatttccattaatatgtgccattagcttgtatgactgagctctttgctaaagaatggggagaacagattagtaagctggaggatattaagattgtcaatggaactatgaaagtgaggatgcgaatcaatattactgaacctcttaaatgagggttgcgagttgcggttgatgatcaaggtactatggtttctctaatatttcaatatgaacatttgcctgatttttgttatgattgtggcatcactggccacaaggcgttggactgtccactgcgggactttgctggggataatcccaattttgatagtggaaggtttagttcgtggatgtgtgctcctggttccccacctcgtgatcgttatcgcttcaataaaaaaagagatgagtctccgaacaacaggccaattatgactatgggggaagcttctagaattgattctgctgttgagagaaaccgtgcacgatactctggtcccacgccagaagaattggcaccaacctctatctaggaggcacgtgaacgagaagaagaattgcagcaaactactgctgtgaaatagagtgaggccgatactcctgttgtacaccattcgcctgagtctgctcggatggtgcaggggatgattgtattggtggggacaaggtgatgatggagactgttacgggtagtgaggctgctgtggtggatgttgtacccgagaaaaagaaaggcaaggaagtggctgttgatattggcttgactggttaggtacatgcctccacacatgtaaacgttgaagagaatgttgaagttgtacttggtgatcacaacaaggatcgggggagtcaattgaataagggaaagggcgttatgtaccattaaactcagggtgaactttctttccgctaggtgctccaaaatacgtttgagccactaatcaaagcgcaaaagtcaaaaacttggaaacgtgtcaaatcttctactagtcatggatctaatggtaattctaagttgagctcttttcttattagcccaaaactatcctatgttattgtggctaatttaatgaataagttcaagtcccagagctggcggtagtggtaaaagaaaaatggatggtgattatactaatgaagttgtgaaaaagggtagaaccgaggagatgtcggacatgacccctgggattttgaatactatattcgcaaagtctgcggagcagactcgccaggagccatttgtcacttatgttggaatgcccagggattggggaaccccgatgcgttgactgccttacgagcggtggttcgtaagttttccccaagtttagtctttctgtctgagactaaactttatggtggttgggcggaaggaatctagagacaacttaattttacaaatagttttcatgtagattgtgttgggaagagtggtggtttgttattgttatgaaatgatgattgggaggtgtatgtgaaatcctatacagctggacatattgatgctttggttaagtgtcctggtcaggatttttggtggttcagtggtttctatggtagcccaaaggcgagtggccgatcagattcatggaggttgttgggtcgacttaatgatctatttgatcttccatggatttgtgatggtgattttaatgagattctttcgatgaatgagaagaagggtggcgctaatcgtagcatgtcggctatgaatgactttcaacaagctctagataaatgttctttggttgatttggggtttgaaggacagtgttttacgtggcttaaaaagagacaaggtggtgcacatatgcaagaaagacttgatcgctatgtttgtaaccaatgatggcatgatttgtttcctttagttaaggtcattaatggggatttccttcattcggatcatagacctattgtggctactcttgagaatattattcggcttcgtttgaatgacaagaagagaagctttcagtttgaaactcattggttgaaagatgatgaattccaagaaattgttcttaggacgtggttgtctcgggatcttcctttggttaatcaagatagcctgattgatatctttggaaagtgtgctgatcagttgggtgcgtggaataagagtaagtttagttcgattcctagattggttagagaaacccagaaacaattggatgacctccttagtgtgtctgcaccgttggttacaatggatgaggtgaagcggttagagttaaatgatttgttatcccgtgaggagtgctattggaaactgagatcacgagcgaattggcttgcacttggggataggaatactaaatactttcacaaaaaggctacgggtaggaagaagaagaatgcaatcgttgagattatgactgaagatggtggcaagttgagtacggaagaggatattgttggggaaattgaactatattttggcaccattttctcatccgcttctcctaatttacaacaggtggaacatggtattagtagtattgaggctaggatttctccggctgagagtgacatgcttgttgctccatttactgctcatgatgtttggggtgcggttaattccattagggccacgaaggctctgggaccagatgggtttcatgctatgttcttccataagtactgggctattattggtcctcgtattactgctgtttgtcatgcaattttaaatggagaccaattagttaggaagttcaataagtcaaatgttgtgatgatcctgaaagtcactaaaccaacgattgttaaagagtatcgagctattagtctttgtagtgttatgtataagattgtggctaaagctgcagctttaagattgaaaggaactttgtccccattgagttcattatttcagagtgcttttgtgaggtagagctattcatgataatgttatggtggggtttgaactgttacattcacttttcaagaagaacaatggtgttagggggtttatggctttgaagttggatatgagcaaagcttatgataaagtcgagtggtgcttcttacgtcaaatcatgtgcaaattcagatttccaagacgttgggtggaccttataatggattgtgttacaacaccagagtatgcttttttggtaaatggtaagcctagggtgtgtgtggttcctactagagggtgtgacaggggtgtccgctttcgccatatttatttctcttctgtgtggaggctgtattatctcttcttagacaatctgagttgaatggcgagttaatgggctttcagtgttcttggtctaagcccttggtgtctcatcttttctttgcggacgacagtttaatctttggtcgtgccaatggtagggaggcagaatccatccgtcagattctttagtgttatgaacgtgcctctggtcaacaagttaattttgataaatctgcaatcacattcagcccgaatgttcaacatgcagatcgtacaactttattgggtattttaggcttggggtctgtggcgactcatgataagtatttggggttgccaacggttattgggaaaaataagaagcgcacttttactagtatttgtgacaaagttcagaaaagggttcggggttggaaacggatcttcttctcagctggtggccgagagattcttattaaggcaattctgtaagcagttctaaattacctgatgagtatgtttcagttgcctgttgctacatgtgataagctttgatctatcattttacacttttggtggggtacaaagtgttataagaggaaaatttcatgggtgaaatgggataatgtttgccaaccaaagtcgaaggggggttaggctttaaagatctaatgcttttcaatcaaggaatggcggttcttcggtgaatcaatctacttggtggaatgggatgtggaatttaaagataccacagaaagtcaaaatctttctctagcgaatgtatcattgtgctctccctaccaattcccaacttatcaaacgtaagattccagttcaaccaatttgccacagatgtggtgaggacacggagactccagaacatgcgttagtgttttgttcttctttgcttcctatttggtcaaagcttcgggtttggagtcagttaaattggtgtaggaatggttcgttggcggagcttgtggtttgcttatttgaggtgcttgagcagagtaagtttgagttgttgtctatgatttggtggtgggtgtggtatgatagaaactccgttttttttgggaagaaacaatcaggacaagatctgatatttgagttagcaaaggatgcgttggaggagtttcaggaggcgacggtgctttctaatggtcgggttttgggtggcccttgtgatggtttttctgggggtgggtaacggggctgctggtgtggtgttgggacgggggcggtatggtgtgcccgacacgttggtctcctccgaagatgggtgagtttgtgttatcggttgatgctgcagtcacaccagggagggggttcgctgggtttggtggggttattcgtgggggtggggtgtggtgtgggcggcgtgggctgtgggtagagttggggattttcaggtggtagtggtggagctccttgcattgcatacgagcctcatatgggcggccagattggggtacaacttggtgcgggttgagacggattcctctgttgttagttcttggataaattgtcctactgctattattatgtttaaacctattattgaagagattcattctattttagctgctgttggtggtggttcttgtcgtgccatcttgcgtgttgcgaatggtgtggcccatgcactagcaaagtctgttaatcgttcggtaggggttcagttatggacagatggttgtcctagatttattagtgctcctgtaacagctgattttatttaattgaatacatgctttccttcaaaataaaaatataattctacggtccacctccgaaaagtgtattggtacactctatttgcgtttttaacatcccaatagttataattttaatttgtttacactttagtaaacatattatagttatttaagatttttttaaaattttttaaaaatttattatatagaaaatagaattaaaataatcttttcttttcaaataaaaatattaaagatagagacatgcacaatttttttgatcgcatatattgaattattatgagtttctcaaaaactctgaataattattaaaaatattataaaattataaaaaaggaaaacagattttctctctattctctctagggtttttcttggcggccatttctcgaccttaagtagggttttattcgagttttgttgattcgtacattattttcgattttactggggttgttattatcctttttgttggaatttattttacnnnnnnnntagatctactcacaagtatgttgtctaacaccctaaatatgaac

SEQ ID NO: 36420 - DNA, 7997 bp, Cannabis sativa
gcactggtaaaagtaacttttaccggcgcatttcgcaaactgcattggcaaaaaggtcaaagttttaccagcgtacatttgtagtggctaaaatcttttaccagcgcatttaggcgctgggaaaaatcatttttgccagagcttttcattatgcgctggcaaaagttctaataccaacgttaatttgccaaccccttttgccaacacatcaaaagtaaattctattttaccagcgcaataccaaacttttgcaagtactaaaacttcataatacataaaaatttataaatcacaattgttgaaccaagtttgaagtcataaactcaaacatggtcgacaccacacacaagcctcaaattcacatcaagcaagcatacacaaccttaaaaaaacttagaaagctacactaaagtccatccaacctaaagagcaactatcacaacaaattgcatgcttgaactgtggtttcttgatgattcttctaaggctgaaaatagggaaagagaaagagaaaggaagaaggtcgtttttttattattttattttttttattttttcatctttctcacttaattgtctaagtaaatctaatacaaaacttaatttaattaactcaacattggccagccagctgccaacacaagaaaaagccacttaatgacaaggtcaaaatgaccaaaattccccctacacacaactaaagggtaaaatgacataggggtaaaatagtttaaaactaaaatcccgacattcgaaatgtctatctaatttgccccgctattactaaaatactaaactttatgaaaatgtgattttatcagccgaacgtcgtgttccaatgttgcggaacataaaatatgaaaaacatgaaatttcatatataacataaataatacacctagaattcaaatatatctacataaattcataaatcatgattagaaatctaatttatgaattaaatcctaattatttgctaatttccatattaaaattaagcggtctttacacaattggttatgtggactcagattttgctagagatctagattcaagaagatctcaaacaagatctcaaacaggttttgtttttcaactttgtggtgtagctggaaaataaatattcaaactacagtagcaatgtctacaaccgaggcagcatatatggcatgtactgaagcaattaaagggccatcttgcttaagacacggtgagagaactaagcatcaacaagaagactatcatagtattctgcgacagccacaacgcactatacctcagcaagaattaaatatttcatgaaaggaccaaacacattgataagatgtcagctgattaaaatccagctgacatgtttactaaagctcttccaacagcaaagttcaagcactgtttggctttgctacagatcacaataatatatgatttctatgctgaatactcattgttattggctacattaactgtctaagtggagatttgtaagtgttagactgttaattcatatagttaaatctggatcagggtttgtccaagattgtatattgctaaaagtcctctgttaacagtgatttgtatttattaacaaacaatcaataaaggaatcatattctttctaagttgtgttcttgtatgtttgtgacttaattgtgttgttctggcaatcatatctggtttagaagattagtgtgtcaaggtcgaacccaacaatagtgctaatgattttgtatattttgagctaattacttatactttcggtatgattataagttgaaggattgttgataactcgtatattcatcaatatcatgagaggcccacactagtgatttaatattttgataatagatataaacttgtgtaagtcatcataaatttcttttgctggtttgtcactttaatacaaggagacatgacttattgattatgtgctttacattgatggtttaactaatttattagatgctagaactccatgcaaacacatgtttaattatatgtattatctatttatttatgaactagcattaaattaattaataatgtcccatgaaatgattgattattacttatcgccatctctcatggtgtgtgagacaatgcataatttgtttctccactaccgaaataacaagtatatatctagatagctagtgggaaaatcttatatctctggcagagaaatataaaaatatatataaaacagtacaaggagtggtatatattatagtacttctgaatattaatgatttatactaatggtacttctcatattccatcatatcctccatgacatatttccaaaagagaagaaaaaagagagacaaacaaacactccaaactgtacacattacatatacgtacagagaaaacacaaaatataaataaagcaaaaaataaaagtactctccacagaaaaaagaaacaaatgatcaaagatgatcagaataaatttaaaacaaaaaaatgatccttctcgatctctcaacctagctctagcttcctaaaacaggaattaataataataatcagtaagatgacaatttaaaccatcatcaaattaacatcatatatatatattatattgttttatacagcaataatttcaattactatattattatataattatatattggaaattggtgcggatgatattgaacctctcttgatggtatccatgttggtagtttcataaactggtagaccactggaatagcaacccaggtcatagttctgcaactcaaacagatcagaactggagtcactatctccaccatcatcatcttcctcgtttatatcatcatcaaattttctcaatacagcaattacttttttctcagactgatgaaacttgatgttactaactaaattatctttctgaatagacgaggatgatgatgacaatgcgtttgatcccttaccattattcttgaccatgttctccttctgatcatgatcatgatcttgctgagacgacaacaagtcctttacagcttgatgatgatcactatcattttggtgatgagctttattgctgttgttgttgttgctgaacttggacaaagttgaaagtagttgcttgtgattatccgaaaagcttctgaaattcttggtgggagttgattgggcaatataaggaggaggtgttctaaaacccgagcttgaagagttataagaatacaaagaagaagcttttgaatctgtagtcgtagtagtagttgtagtgctcccaaagtggcttatgctactccttctttttcttcttcctccgcctccgctttgatcatcctgatcgtaatctttcgaggacaaagcattagatttggattttattttcttcttcgatgaggattggttaaaaagggagttcaagaagctggccagtctcccacctggggagcttggctgcttatacttcttctctttgatcatttgcttctccatcattaccaccccatgatgatggtgatgatgaagagcatggtgatcatgatgatcatggtgattgttaagattaagtaggcttcttctaggcatgtctaggcttattcttcctcctgatgaggatcctctagtactgctactattggtactccaataagctctgctgtgatgatcttgatccttactactgctactactactgctacatatcttctggttgaatgacgtggtgccacatgattcgttgtatccggagaagtacctcgccgcctcgaacacgtcgagctccccggagtcattcctcttatggaatgattttttgaagagtttttctggatctgctgggttgagtgaacctgccaaagacatggttgatgatgatagttttttttttcttaattattttttgaaagtgtaatgtttgatacaacacttgtttgaaatattaagtcacaaatatatggggtgaagggtatttattctatggaagaaggaatacggatatgtaaattagttggatttgtgagatgatgatgatatagagagagagagacagagacacagagatagagagatagagattgtaataatggggggttttgaaatgattgagcgtagtgggaagctagctttatattaataataatattcaatttatttacatatttgttattgttgtatttatgtttaattatgtaattgtagaagattttggaggtttttggcagggacctacttgatgttaatatgtgctttttaagctatacacatcaagaaaaacagtggggtatacattaatacaagtgaaacaatgaaagcttcttctttttcttttgaacatttcctattttattttatgttatatcttttattcatatatggatgctttgacaactagaggtttatgttgggcatggtgcaggggggcacaagatagattgtgcttttccttggattctagggcttctagtttgtattcatggaaaattttgatagctctcaagtggatgttggccatgttctatggcctatatatgagaagctatacatatatgaacgcatctactacactagctgacgttaatttatattgtgtataaatatatacatatttattgaatatatatgtgtggtggatattagacatccaaactaatttctttccatttcattaatatttttttttgggggggaggggaagagagagaaaaggagtgagtatactttactaagctttaaaatcactctttaattgaaaaaaaggtaattgttataacccactgcactcaattactcggttagatttagtgatttaccatggcccagtaatatttggttgcctccttctaggtggagcttcattttcatgtggtaattatataattacatatcttcaattagcaaccaaaagttggcaatttatgtccaacaaatttataaatatgagtgtgtgtgtgtgtgtcaaatgtgatctttacttcctagaatctcgaaaacttgagagataaacactatgctctttttctctctcaaaaaaaaaaaaaaaattatgtaaagaaaagataaactatatatacaagaaattttgagcttgccccaattttaaaagcagtaatcaagcaatcagtagctagaataatccaaatgacatatgaataaagctaataattaattaacatcagttggtacatgtaatcccagttagtcctattgtttttccagaattatttgtttcaaatgactgaaataataattaaatgagtggatcaacctgaactacactgacagcacacatttttttcttcttttgattaattttggaaatccatccttagtctttatcatgcatgcgctttcaaataaaccaaacaaaataagaaaaaataattataatataataaagaaaaatctgaaaaattatatttgagaacttctaaacaagtactaaataaacttaagtcacaccaaaaataattgagcagtgacccattaatttaaagcttaaaagaatagacacatatctaaacaactttctttttcttctttttattagagagagaccattggggcagtcaatgtgtttggcccatcaaaatagagtccccattccttgttgtcgggacagtgaaatgtgtggtgtctcacaccactcgtgcattgataaatagattttgttcaatcctatattaattttcaccctaattagttaaaatctctaatttactataagtacgtaccacgatattattatatcatcagtctgacttacatatatatagtaacaacgtaatcaaattgtattgctgtagctttctcgtatatatatttcctataattagatcattagtccagagtcctcttattgttgatgatgatagtttcttaaagaccatctaggcatggtcaattttttctacacataataatcatacgtatatacatatatgaatatatattgtggaaaacaaattatggtcccctcactactacttctgcactttgatttggaaccataaacacaactctcagcacacttcaagctcaaaattttctcaatatagtatcattttcagcattcatttctaccaaatctgctgtcacaaccaagccgagtcttctattactaatagcacgagtggtatttaaggaaactttgttatcaactaatgaaaactagaagaaagaaaaaaataaatgtgatcgaatatgttcgtatttattttaggccacctgcatatccatatgcatttttcgggaaaaaaatggaccagtttgactaaaaaaaaataagaacataaaaaaagattgagccagtatccaaagtcaacaaaacgccaaacataatcaacaaatgattaataaaacatcatgttatctcgagagaaattactttatcttcaagttacatgattatttcattaattactgtgttaatcaatactttcaccaaacatgggccaaagcattttagactaagaggaacaaaaccaactaataataaacccatcaagcagaatttgcagggagacataaaattttatgtatttatataaacagagataataatgtatacataatattagtagctgcatgctgtcattgctgtcatttattatcatatgtggaaagctaggcatatttggaaaatgaagttcctacaattgtagctactcttgctgctatttaaaaaggatgttttcagagagtttatgtaaaatctaaaacatatatataagattagtagtatagataatgatttgttcttatatacttgtaaagtggactgagttgatgtcctttgaattgtaatttttctcatgtaatacaattatcataacttactaaattaaaaaaaaggtatacaaaattgtacaagcggatcaaaatattattactagtacatataagtatacattaaaatgtatgatatggccaggcatctgaattctgaagtagttgattatttttattagggcctacatataataacaaaataaaggctccaaattaaagaaatatactccacaggacatctctaaataagtttggcccgttaggagaagtgtatggatcagattatatataatggcttgtcatattcttgtcgccacacttcaattttttttttttttggggagggggcttatatagatatagctagaaagatatacatgtaatattgtatgatatgatcatacatgaagaagtagataatgtttagttgctttcttttattttacaccatgcactctaaaagtcacctttcatggccatcgttttcccattagtcccatctatatatttgttgtttggtttatgtattcatgttttcagtgatcttttcttttatagctatatacttcatatggctcactctaaaacactcaaacttacggttgcataaattattgttatataatattataatgcgatactgaatcactgggacttagattccacccgattctatgataattgaataaatcttgttttcttttccttataactaaaacatatatttatatataaagaagccaataagtgataattttttctatattattaaaatactatttttttttcttaatcaatcaggcctccttttgtttttcttctcaatcaatcaggcctccttttgttattctttttcaagaattaagtttatttcataaggctacaaacttgatatattttctaaagtttgtctctacttattaaatgtaggtgtgtttgtggtgcgggccatgggattttttcctattctttttgttaaaaaaaataaagcgaacatataattttcgtaattcttaaatcgcaacaaaacctataaaaatacagtgtgatgtggaagcgaatcatctagcctatctaagttttgctatttacaaaaatattagaaacaaatgaaagttttgatatatataattgtgccgaatatgattttttttttttttttaaaaaaaaaacttaaaaatatgggacaaatgataaaaaataagagaaaataccgtaaaaaacataaaaatacatatataaattctaattctata

SEQ ID NO: 36421 - DNA, 4575 bp, Cannabis sativa
accccatttccatttccttatctctactctagttggaccttcagtatcacacaagtggctcaattatgattcgaaaacctacaaaacatctttgtcaagaagggtcattttgattcatcagcttagcttaggattccaattttcatagataattgtgaatgaaaaagaatcaatttaattgggactcctcaataaaaaccaaacacaacaaatgcaaaattagtcaagattttaagaccagaatgaagatttataatatttacaagaactaggtagtttttcagcatagataaaaatctagaaccattgcatgaataagagacacgtatctgtaaatactttaaaacaggccaaagttaaatcttacatttaatcaacagtggccaatgttggactggttctttcttttccagtcccttattagcccccacttgagtacttctggaaaagagactacataatctatcactcttggagaagatgaagttgcagtaaagcaacccagttcaggacttagtatttatctaagaggttgaacaaagaactaaactaagaaaccgagaaagttccaaacacgacgatggctaagaaaatacgaacttcccgatgagcttcccctatgcaatttacaccacttgcctatgaaggcatgtcaagaaaggctaagatcaagttctgcattcagaggaaccagagcgagtcttgctttggcagtggatccactgtatactccaccggtggtaagtgaaaaggagagctgaatctcaagtccacaatgttgtcagttggattgttgtcaaatgaagaatcaaatgccttgcactgattatcgaactgagcttctgacattggaaaaccaacatggggagaagatgatacattggcttgctcagatgtgttgcttcccataacaccctgattataaaagttatcctccatttgaaactggtaattttgctgtgaagggatatggctatcagtagcactaaaatttccggagttcaagtttttggtctgtgggggtgaaatatttgtgtcatagaatgacatgagctcagaaatcatcttctgtccatcttcaggaagaccaagccctgaaacattcaattgagttgcttggttcattggtgcagcaggaggaggatgaggcttaggttgggactgaggcatggaaaatgctgctggtttgtcattgctgatttgaaagcttgacatcccgaaagcttgtgaagaagtattagagcggtaggggcagttcatttggtgattgtttcttgatgtcctatcaaggaatccaagtcggtaattatgatatggacattgcaggttttcgcatgtgtaaattttatgatccaccctcatctgggactgtgactcttcagccagaggcttcctcttttgaacaaaatccgagctcatttctaccagttctcccttaattttaggaatcactggtggttgcatcagatgtgcatctctccctgcaacagcacccatattgaagaaactgacatcacgaggcttgcattcctctacttcaacattaggttcgaaattcaccccttcaacatcataatcactggtgtcactaatcacaaaagatccattgccactacctgacataggtgggcatctatcaggatacattttgcgggctacacattcttcctggtttataatggccagccaagtagcactctccttagcagtcattttatcctgcaagcatttagactgacgaacaagcttccgaatctttgcaatgtcaggagacatatgcttgatcacagctgtgaggaccccaaccttccaagccttcttcaaatcatgaggtttcttgtatggaggagacccctggtctttaggtagacccaactgaggccaccaatcttcattaccatcgggccaccaaggaggggcgatgcctttttccagtgggaaacgcctctgtgggggatcacagtgctgcatcaatgctgacagaagtgaaccaagagtagtgtcttggagctcctgcaaggtgtgaggagtggatgcaacagcaatgcattcctcgttctgaccggggattgagtgatctgcctggtacttagaaattgcagctgggccattgcgatcaaaccttactttttccttccaccaagcacggagattatctgaagcaccactaactggttttcccttctccggaatgattccatacacaaaaccttgagctttacaaacttccatcattttcaacatgtacttcaaaattccatcttgtgctcttgacattttcttcctccttgcttgctcttgggactgacgctgctttgcattgtcaactccttgctttcccttattttgctccttgagccgcctcaaaagcattcgatctctccacatccttctctcaagctcgtcaacatccatctcttcatcactataatcctcctctcccactggttctgtttcatgttctaaagcctcatctgcttcccgtggaggagctgaaacaaattcaaaattaccagagaaccccatttcttcgaaaattcccatcgaacacttagtgaatcttttaatccaccaatacagatcagctcagcaaaatcctgctctatatactttttcactcaaatcactttctaaactttgcccaaaaatacaacttaaaattttctatatgatctcttctcctgcaatttaataaattgaggaacaacttcagtcatgacttcaatgagttaggtccacaaataatgcatcagatacgttggattggtaataaagacttcaattgaatgtaaaacaaactaacaagaaaataaaaacaataaataggggaaaataattgaactattccatcataaaatactattagtaaatcaataataactccaggcatttaacttaacggttccactttcaatccattagaaaatcaaagctagtaagcccactaaagagtcttaaagttggcaataagattttcaaaataataatatacattaaaaaaaaaaaagcagagataagatgaacaaagatttatacaattaattacgataaataataaagaaaaaagtaaaaaaataagttcagacagccattaactagataattataatgaagaaagatttctccaaatacctttacaaagccatggaaacaaaacgaagtattactagtcccagatccagcactcccaaataataataagaaaaactaagtaatgatattgattacagcctaaagtataaacctttgggtttacacaaacctaaaagtctaagtctttgggcatacacaaatctgtaataccagcaaactaagcaaaaaaattgactttaatcatcattttttttaaagaagactttacgatcattatatatatgtaaatatatttgccatcatctttgaccacccaaaaataattttttataatccagcagtaatttcggtaagagtacccaaaccatgttgaaccatgttacagatcaggggaaaaaaaaatcgaaatcatcaatagcaaaatagcttataaacacatgtcgtacattaattcacagccaaaaagatcaaggaaacgacaagattttgtatatattgaaaaaacaaacataaaaaaaaaaaaaaatagccaaaaacacgacccatttccgttaaaccatttcaggaactgaaaaacaaagttcattgtaagcgaaaaaccaaatcaactaaacaaacgaaaaatgaaacacagattctcaaaataaaaatactagaaaagatttcattgaaagaaaaaaaattacagtacctgatgataatgatgtttgggattattttttggcagaaaccatgaaagaagaccctcgtgcgagctctgaaagatctctttttttttttcaccaatgtttttcttgaagaaccataaaataaaaagaagaggagagagaagagaatctcaagttttagagagagaaattcagagagacaagagtggcaagctacagaagtattttttttggtttgttgtggagttaattagtggaatttaaccatggttaagttaattataactggggttaagggtgtcaggtgtagggttggctttctggatatggaaatttaagactttttagttagtataactgtagtagtagtgtcgggagggatgatcttgtgtattgtacttttaaacatttcaaccatgaaatttatcaaatgtctttccttacataagacttacttaactgctcttgtcagccttacccaccaaaaaaaaagggtgaaaattaaattgtaaaggacaatatgtagatttgaaaaagaaaaaaaaagttataatatcttctaacatatgaatagattttttttctttttttttacaaaaatatatactgtgaggaaagtttacttttaccttatcaattatcatgcatgcatttaagtttgtttagaaaaaatagtgctcataaagtaaaataaaagctaataacaaaatagagattttagccattattattactttttctgtataaatcacttacaataagaagatagagagcattttcccacccaacccataatgtaggtccatctttccta

SEQ ID NO: 36422 - DNA, 7064 bp, Cannabis sativa
  modified_base (6905)..(6906): a, c, t, g, unknown or other
tccactaggaggctgccacaactggggcatgatacaagcagtagcctggaaaaaccacacacacacgcaagttgtaaggctattaaaaatatcaaagcaagtgacttgaaaattcaagtcatgagcagccgaaaaacatacctttcccgacggatttctttcactacgctgccatttccagagcttatgaacagcatttgaagtgagtgccagcaaagttaggccattgttcgtgtaaatcagcttaaccacctacatttggaattaagcttattttctcagtttttgtactgttcggagacttaatgcccttttatctaattaaaaacgctgcaacccaaaatattaaactattgtttagtgtattaagcaaataccacaaattaacttacctttgcagcatttccggaatcaggcaatcgcaaaggtttaataagagatggatctgcaatatctggaatcttccagctcttaattttgtctacatcatcaacaatgcgtggtttaacatcgacaagtctgctattttctgcaggactctgcaattataaagccaatgtaaacttgtgagcaagttgcatcaataagttttatgcaacttaatcttataaaggctgaacttacatgactactgatagacacggaaggaggcattatattaggacgttccatgctttgagcaacagcaggagaaacattggacactgggcctagcgcattaacaatcagtggctgcatccaaataataaaaggtcagtaacatacccaaaacaaaattaacatattgctgtttagagcattgggcaacgatcgttcatcattttctgcgaactgacaaatgaatatgacatagtgcagaacatcaaaacacagttcaaagatatatagagagctgccaacaagaacccattgtcgatctaaaatcactgtgcaagcatctcatatgataaaatattcgaaatcataatcttcacattttttttcaaagtcgcttctttcaaaaatcttaatgttggagctaccagcaattacatttcttccacttttctaaaatcactgtgcactcatctcatgtgataaaatatgtgaaaccatgatcttccacttttcttttcaaagccgcttcttccaaaactttcaattggagctaccagcaatgacatttctcctaacaaaactaaaatctaaagtgcataaatctaacaaggaaatgatgcgatgactaatttaagaaatcatttcgtgattaacaaataaaattgtggaaaatatattatggttcatgtaattgataggtaaccccaactatatccaagcctttgtgtcagaacgatccagatattttatcttcactcacacatgtcatgcttttaggattgaagagagctaccttagaattgataggctcagaagggcctcggctcttatccatagccctgctctccagcatccttatcaggcgcaacccatcattgttagctaaaatcttaatgccgttgtcatttgttgtgactgccaacaatgacccttctttgttaaatctcaatctaggactagcctgcaaataaaagtaaacaataactactgttaaagctcaactcttctaaagtgttattttacaaacgacaaaaaaaatgtgaagaacagcaatactaacaggcaaacccccatcggcatcaacagctgtcaacatgttggtactgtccatatcccagaacttaatttgaaattcgtcaccagcagctaagaaccgatttcttgttgtgtcaaactgaacaacacctaaagatctcttcctaaaaccagaatatgtacgtttgatagctccttcactttcattccactctacaagatgggattcgccctccttacttgttccgcatgagaagagcctgccacaagaagaattcacaaactatattgtaaaacctctaattaatattgcatatacataaacaaccgatatgttttctaatatgaagattaataacgaaataccctattcagcttatagccaatagaagtaaagaaaatgagaaaaaactaaattaatacaaattacgatgctttccaacaaagcatctgttcatctattgagacaagtaagctttacctagttccatctgcactatatgacatcatagtgcaccattgtccaggagcatcataatccactcttgaacccaagcaatcataaagccaagctttaattttcccatcaatagcagttgaaaatatgaactgcaaatgtacagtgttaaaatttacaaaaacaaattggtgattgtagtaaaatgaaaaattggatgtactacaatgataatgaggatcttaatgagatatacctgaatattttctttgtaatgaggacaaacagaatatactggagcttcgtgaccttcaaatatatatagtctgcgtccagctacagcgtcccatacctgtacaggagcttatacaagttatactacgaagcctaaagatactctaaacaaaagacgagggtatgacagcccataccttgatcatcttatcatctccacaagtaacaatgcaatgttgcttattgggatgggcaaaagcaatgtcattaacaccacccacatgagcatcgatctgaaaaatgagacaatcaatatcctacaattgccaatggagaaagagattacaaggaatacgatttacctccaaatgttgtcggagttctccagttggattgtaagtatatatctggacaatgtgctttgaaaatgcaactcctataagatgttaaatgcagtaagaaccttaatagtattctcctacaagaatagaaacaaaataacatgctcgccctgaataaaaaaggctacacgtaccaagcattagcccatctgatccccaaacacaccgattcacagatattccagcatcacttaacaaagctgactgaggcatagaaagaaaaaaaaaaacaagttaaaaggaatatcatccataattgaatgcgtatattaggatgtactaatggaaaaatatatatttatcgggaattctaaaataatgaaggtaaaaaaaaaaaaaagcgtacctgcaatggcattgaagcagattgtatatcccaaaccttaaacggtttatgtaccatcctctcccgagagccaacttcccaaagactaatgtcaccaacatttgtcccaactacaaagtaacaaaaagtccaataaataaacaattttacaaaattgttttttatcagcaaaacatttagtcacaaacctagcagtatagtttgttgctgaggatgaaaatccatgctcataacattagatccttgactaagggtccgcacaagatttttgggaatgtcatcttgtgaataagcaccagaatgcattacaccagagaatgatacctgtaaaaagcaactgtgagaatatttccattttctcctgctccccctctctttcggtgtctctcaaagagggcgaggaaaagaaaacacatgcagcaacctaaagttgataattgaagcttaaacatggaaattacataagaacctcttcctcacctcatcagaaggtccagtacgaatgcgcttaatcaagtgctctgagtcagctgattgataatccatccccgtcacacctgtaggagtccttgggtgtttcaagaatgcagctacatcggaaaaaaaatggtgaaagttacatcaaatctcaaaataagtcagcaatccataaattaagttgtagatttaaaataactatgggagagagttcataattatcattcatacaataaatcgactggcatcataacatattgtacacaatcataggcacaagaaagaaactataaatagcagttggctgacataatcaaacaaataacataataggaaacaattaagaattacagactagcaaacgatattcactctagaaaattgtgtaagaacaaagaaacaaatttacataaatacattgtcgacaaaagctcgatggtcctctaatacaatctgttgttaatttcagcaaataacgttgaattcttacccgcactagattgctggacaagtccaggaggtggtcctgccacagaaggatgagacaaagatggattagaattcgacatccaaccagcaatggaagtaggagatggggacacaactggttgaaatggctgcacaagataaaacgaaacagcatgagtgttaggaaatcgtgcaagttacttgggcagaaaagataaaaagagaactgcacttacaccgtgggcaccaataggaggaaatgcaccagccttgggaattggtccgacaagattgtttgtaggtggaggacgagatccattagcagtagggttgcaagaatgatcggtaaatagtgtttttatatcagggtttggacgaggattcttgcaaagttgatgctgccaatttagactgaaattctagctaaatgagattcaagtaaacaaagcttatgcagaatataacattggggaaagttcataatttaacgaaaaactaaataaatcaggacaatgcaagtatcacctctgattaattaaggtccttagacgcgaacttttgaaagctgggaatgcaagtttatcacggaacaaaggatttgcctcaattaactttttaagttcgataagcatgatgtttcgagctgattttgtgtccccatacttggaaagctgctcattttgcctgtttatacacgataccaacaacaaaacttaataaaaaccaatcaatcaatcatcgaaattaactgagcagacaaaatgtaacttacctaaaattatcgagagtcagtaactgtgtgatctccttgaaaagttcctcattgaaagatgcaaaaaccttaagatcctttacaagaatctcaacagctttagctctatcctgcctgttagagagacacagaacattataccaacatgcaaaagagaaatttgtaaccattttagtttatgaagtttcttcatcaaaccaatgcataccaatctacaaccaatacataaacacataattcaaatcctcacctatcaagagcttccaaatacttttgtttcctgatttcaaagaaaatcttcattgaataccgattatcttcaaccttggtaaacccgcataaatagcgctcaacttcatcccactctccagcctggacttgatcctcaaaatgtttcatattgaagaagaaaccagactcttgctctaatctaaaattccaaaattaaacacacacagcattataaacacatgaacaaaatccaacaattctcacgaaaatgcttaaaccccagttcaacaagtatcaaaattttaactaattccaaacaaaatgagtacaaatattaaaccccaaaacaaagaaaaggaaaaacttacttgtgaacagtctccttgaacttctcctcatctaaaaactgtaaaattaagaacaccaattccctacttaacgaagacattgtccccggtaatcctaagcgctccagtgcaaagatccaagcttaaaccaccaaaaatttatatttgtgggtttttcccccaaaaaagagccaagaaactgtaacaatcaaaggaaatgcacttcccccacaagaaaattttcaacttcaaacttaaccaaacaaccttttcaaaccaactcaatcaaaacaaaaaaccctaaattttgaagttgcagaacaaagatctcaacacacagagaaagagcgaaagagagctcgaaagacaaaccaaatcgcagagcaaaagtttcactcgaatctcatctcatctcatctcatctaatctcatctacacaacacaaagatacaataataatatatatatatacaaaaatcgttttgtctttctcactgagaaataaccattttttctagggttagggtttctgaaagcctcttttttattattccttttctctctctctctcctagctaaactctgttctgctgcagcaccaccaccaaccctcactttctctctctatataccattttatatatatatatatactctttctctctctaactatatctgtgacaaggacaacaaagacaaaggttctgctctctctctctctctctcctctctctgctgcttcttcctcctcctggcttttgttagggcactcaaccatctttctctcactatattatattatatatatacatatatataaaaatagtacctttattttctctctcctctttttctcactttttttctactttctctctctatctctacaaactacgatataccctttatgcataaataattgtttctctctctataaatatatatgtttgtttgtttctctctctaggttttttgctttctctctctacctgactttctctctctactgttggaaaaagagagagagaaagaagacttggactttccttgagaagtgagagtgagtgattgtgatcctctgtgacgcggtcttgttttactctctgtgatcgggttttttattggttgccactaaaataattattattattatttgctgaaaaaaataattattattattaaaatatgtttctttatttttatattaagtattttttttattttatttattcgaaatattacaactttattttataagtgtcaatagtaaaataatgatagttgaattgtcaatttcttattataattttttaattaatttttgtaataatttttcaaaaaaaatatttttataatagtgttttttttaataaacttagcaattttattaactcgcaatcgttaataacaatagaacgcacttcgttagaataattctccaattgaagcacacaacttggagagaaataagaataatggctaaaacatgagccagcttgtttgcaaatcgtttgacaaaatacaactcaacattatttannggtaagagaagagtacgaacatcatgaactaatagaccaaaagaggatgacaaagtaatttagctatcagtttctgaaatcaattgtccccacaaatgacagtcaatccagcttaaagcttcttttatgccaacaaaatcatctatttcaggttgcac

SEQ ID NO: 36423 - DNA, 7873 bp, Cannabis sativa
  modified_base (6101)..(6120): a, c, t, g, unknown or other
  modified_base (6148)..(6149): a, c, t, g, unknown or other
agggtccaatctgtaacttttgcaaaacagagggtccaaaatggtatttacctttttctttttaaaagttatttaattattaaaaactttttttaaaaaaatagtgtggtctatagtgtcccattaaatttggtgggatactgtagacaaaattatttatgagtataactttaatgtttcattagagtatatactatatagtatgaaactacactatatttagtgttttagagttcgattagagatgacctaaccattacagacattagagggccaatttggatttttgtactttaattcatgtataataccaccataactgtaacatcaatatataagaaataagaatgcacatttttttgcctttcattctacaaaatcttcaatttaatttatctaattaacattaaatgttaaagaaaaaataaaaaagttccaatctcaagcatgaaattaattgaagcaaggatctaaatattgacccatttcaagcattaatactatgaaatatatacaagaggatgaaactacgatctgaatctgatcacgagtgtgagcttgatcatatatatatatatatatatatatttagacagctccgtcaatcacaacgggttgttctgtagaaacgttgccgttttgctttgacatatgaagagaaaacttacaagcgtctactgcggcctccactgacaggtaaaaattctccttaccaatcttatctacgaaatgtgactgtatgaacttctccattactctaagtctcgggtttactatagtcatctacaataatcaattcccaaaagaaaagatcagttttaattttggataattaattttttttatttttatataagaaaaaagagtcaaatggattggattattgaagggcttacctgaatatgttgtgcaaacaaggatctgtgaatctcaatcaatgtctctatgccggtcgcatcaatagttgtaactcctatcaaatatgaccaaatttcaaatcacgaaacagtgtgttagctagatgagtgtgtctgcgcgggacctaataataaaagaccaaatatttgtcgttttcgttctagcacattttggtagtggaaattccactatacatataatacttgcgtatacacttttgattacctgtcaaatctaacaaaacatgctcaatagcatcccctgagttagaattcgcctgctcgtctctgatccacctcaaaatcctacacacacacatgacacaactacaaggtcaaacaaacttgagcaactaatattatactaatttttcactaattagtaatattagttaattacctttcccttatgtaattgcaatttgcaaagtaaataggtgaacctagttgcagcactattatcccagggacaactgtggaaccggggtactgctcggtgtcacggtatatcgtcgcgttttctacttttccaagcttacaagtggcgggcctagccacgtatagaagagctctgagtaaaccaagtcccacctaagcagagagtaaccaaaagaaaaagaaactaattaattagtgtgaaaatgctgaaaatcattgaatctgtcaagtccaacttgatcacaaagactaagaagattaacttctacaaaaatgacactggttagttacgtttcgtgattgaattgttagtgatgagaacatgagataaattatatgtatatgtacttacagagagcatgaggccgatgtccatgctaataaaggcaaccccaaagaagccaaccatgcaaatagtaaaatcaaacttgtcgactttgaagagatgaatagcctcgtcgtagttgatgaggccaatcatggcagacatgataatggcagatagagcaaccagtggtgtgtggctgaacagaggagccaagaatagcagcgtcatagccataaacactgacatgattacgttcgacattgccgtttttgccccagcgttgtaattcaccgccgtcttcgaaaatggcccttcaattttataatgtaaacactcattaattaattaactaattaatgttaacatatacaactttattataaagtaatgtgtaccggtagtcaaatagcatgaagtgaaagaaccaatgatgttcatgaagccaaaggcaatcatttccttattcccatcaacttgtaaattattcatgatagcaaagctcctaccaatagctattccttcctgtattaaacagaattaattttaaaaatataaaagtacttaattatttgacaacccaatattatttatttaacaattattagtagaaatgtagtgtatataccgccaaagcaacgaagcccgttacaatcccagctttgagaactgctggtaaatatttggggtcaaagttcaaataatgaaatgtaagtggatttatgcctttcttcagatcacccacctaaaaccaatgataaagttggaattaataattgtcagaagtggaaatttagtattattcttaaaaaacaatcttaattgtagtaatgaacatttgtgatcaaaacaatttttggcataataaatcaaaagtatatgtgttataaatagtacatgcatatggattttttttttttttggcaaagtgcatattgataaattaaacataaatattgattattaaataaatagtacatattgataaattatgactaaatgctattatttaatttaaaaaatatatatttgtactagaaaataccttttaattacttttttttttttgaaaaaatattgcaaaacaaaattgccaaccataaaataaagattttggtcttgtactaaagaaaaatttgccaaccataaataatatatttctgtaggtattattgtaatattagtaaataataaaattatatttttaaaaaaaatcaaataacatcaataatcagtaatagcaaaaaagacgtgtgataattattactttgttaaaagctaattaattacaaagtatggtctcataattaatttaagagagtgttataatttcttggtgctttgagtttgagtccacacaacacaagtgttattattaagaagagtgggtaaatttttacttcaaagttggtagcacaccaacttattagagaggacaaattgacaattcttattattagttaggattaggaataaattcattgtttgagagttagtaatataagagttcaacgtttaattagctaaaaaaatgttttggtttgggatatacaacaactaccaccgatttgttgcttagtaaattatatggatgtgttaagtaaaaattttatcttttgaagttttttaatatattttttatatttcaaaaaataaaatatgttaaggaaaatacgtgtagcaaattttaattttattaagtgagcgaatagcaaagagaatatatatataatagtgtatggtttttttatttatttattttgaagtcagtatgattaaaaattaaaaataacttaattttgtttctataataattttcaaaatttttatttttattttaaaaactaaaataaaaaagtactttcaaacttttttttccaaatattttcactgaaagaataaaaaattattaccaaaacacactttaattattttaattattatttctcaaaaagattcaatattatataagaatcgtgtagatctcgtaagtctcatatatcttagagaaaatcttataaaataaatttgaatatttggtatataatataaaaggataatcttatttttggtagtataaacgtaatacgacaccacttacagtttgtatgccatgctctgctccatggattaaataagcaaatacacagccaactatgacaaccaccataggagacatcgcagatacccaaaatagatgtggccttttctgcttctgaaatttcctcgtatatatgtaaatgtaaatattatataaatgtaaataagagaaacatttatttgtattaatattatttatatttatatatatatgtaagcttacaatatatctggtaaattgaaggaaaataaggaagattgtgcccactaacgcactctcccacttccactgcaaaaagaagattgactttaattaattcaattgccaattactttacttaagtttctttttttaataataatttgctagttaattataaggtagttgcaaatctcattttatttttggaaaggagattcaaacttaatatatatatacccatctgtccactttctagaaaatttatgatacaatttttttttttaatcttccaatttatcatgaggagtaggtaatatggtcatatcattctctagcaataagtgatgcagtgtctatatttcaagtcttctagaattttaacagtacttttgctttatataatttataaataatgatttacacatttccaatttttcacacacaaattaaataataaaaaatattatgtagtcatactttaaaattgagattaattttatatcatagtgtaatttgagtaaaattttatgaatatatctattattacttattataatattttatgtgccatcatcataattatgccttgtacaaatatataatgattattactttcgataataatgttttaagtcactaaccgaaaattatatatttgtaactatatatatcatctatagtcacaatataatgattattttttgtaatgacattactatataagcttggaagtttggatatatatagtgagtgaatataagaaatgacaaaaccaaattattaaaacctcatgtctattattggcgattgcttggaccacagagacgacgttggttttggtagtgaaatgtttcaatcccaagaagcctttgagctgttgacagcaaattatgacggcggttcctcccatgaaaccagttatagttgaatgcgataaaaaatcaaccaacactcccaatctgcaaaacttcatttatcattaaatttttctaaataattttctttttaatataaaaaaaaaaaaaaaacaaactagttggccacctttagtgaactagaatgtcgttctcgtttaaaaatggaaacaaaattcaatatatattatatatatatttgctcagaagataaaatcccatatttgtttttttttgtcagaagataaatctatttttagaatattatttttttactcgtttaaatcgggaattattttatgatcagtttttcaaggataagatacgagcctagtttttaaaactaaataataataataataataaaaataaaaaacaaaccttagaaaacctataagtgattgaaagacgccggtaacaaaggcggcagtgaagaccaaatgaaggtacaatgttggctctgaaagcggcgacgccacctttccgatggtttcagagatgagcaatgaacacgccgccactgttcccaccgctaaatgctttgagtcaccaaacaccgcatatataagcggtggtacaaaactcgaatctgaatttaattaatattcaaatccataaaaataattaattaatatattcttttatgttaaaagcacgtgtgtcaaatttattattacataatatataataatataaaatacttacaaagaccgacgatggcaggaatgttagcgagttttgcgtaactgattccctgtgggatagcaagactggtaatggtgaggccagcaatcaagtccattcgaaacagacgcaaattatagttgggaagccaatcgaagattggaacaaagtacttcacagctttcttggctcgacggaatggattctcttcgtttcgaaagcggctgaaagggtcgtcgggaaagaatgtctctttcagatcggatcggagggtggtgccgaatcctctcggctccgagaacttcaccgtcgcggcgttgttatcgaccttattcagttgagtttccatgtagggtcacgagggaaccggaaaattaaagcgagtgtgtgttggtatggggagggcggtttgaggtgaaagagtagtagagaattattgtgtgttgtgtttgtgtatttataagggaaaaaaatacttggtgtggaaatgaaagatgtgtaaataataataataataatannnnnnnnnnnnnnnnnnnnaataataataaatattattattattatnnttattattattattattttccaaaactaggtggcattttactatatggtgttgtttttgttttgaaattaaatcaaaatggtcaatttggttttaggataagtatatgaaagattaggaatttaatattgattttcttttattattatttattattttttttaacaattctttttttgttattattttgactaaactaaccttgagcaatttagagtggaattctatcgtgttgggatatgtgaaagatttttcctatttaatgggattaattgtactaggacagttttatttttattttttgaattttttaagaaaggagaattaaaaggaaaattgtactaggagagtttagcctggggcaggtagttcaatttgagtttttcttttttgggctggcttcatgtaaaggaagaaaataacatatataatataattctagaagttgaaagaaggaaaatagtgggatattgtttattgtatcacatttaatttatttttaatttatctcaatttaatctaattatatattaaatattaaattttatcatctgatctcgcttaattaattttataaaatgtcaagacaatcagctaaactcttaatataggtagttataatcgattatacatgtggcatcttgttagtaaagctattagagtccgttacaatagaattataactatcattctctttgtgtgaagagctctgctctataaattgtaatctctagttaatatttcattttcaatgagaattttagcaaatgattctctttgcgaatatggtatcagattgaatccttactttcggttctatttttctacatttcttttgaccatcttcttcatgcgacaatagccaaatcacacactcgaagctctgtcaatggcgagaatgaagatacctttgttgatcacattccaaattgaataaaatagtgatcattagtgaagagcactatgttattatgatcctctagatatgagttgattgaaaagagattagcgtttcttttcaaaatcaatctatgttccatatagctacatctacatgtatttccttaccataattaatgataaatcaaaattatcatggacatatatgatgaaaataaaatgggaagttcaaaccattatttatgtattttattctctcatttcaactaagtttttagctaatcacagaactgataacgcaaaggaatttaatcttgcaaaattccataccaatgaagggatcatcaattaccattcatgtgttgatacttcataccaaaatttagttgtagaaaaaaaataccaacatattcttaattttgctagagccttatttttttaatcttagtgcaacatatttgataaacagaacaccatctaaaattctctacaagaaaaccccttttgaaatattacacaataaaattccatcttatgatcatttaagaagttttggttgtctttgttgggatttataccctaaaagtaattatttaatagataatatattatagaatatatgaaatataattataagataaatgaatacaataattatagaaatacaattaataaatatctaaaaattctttattcatatggagatagtataattttgtaagcttgtagaagagaattaagattatacaacatgaatagaataagtcggtagtgtattaaagtaagagatttttaatatgaaattaccaagtgcggtttactata

SEQ ID NO: 36424 - DNA, 2690 bp, Cannabis sativa
aaaatataattttctttgttccaagtgtattcttgaatttggtaataggaatagaatcatattaaaccataatcaataaatgcaattgaaatcgaaagccctaacttttaatcatcgttaatttccttattgatttatttgcttcttatttttattgtttctttattattttctaaatttaattttctcttaattttgacataaccaaatagaagtaaatgtttaattttaaagtacttaactacaattctcgtgggatcgaccttactctttgtgagtctattatttgttaactacaatatcaaataactattggacccctatcagtcttcaacctaaaagcttttcaacttcataaagccatcggactagtatcagaccggcatcaggcctaacttaaaaaccaggttctcgctcaaataacagatctgaccaaatctaatgccgaaattctaacaaaattcacaaatcacaaataaaaacatacattttaactttaaatctatacctatcaataatctcaaaaccataaatcactaaaaaaaacaatgaaaaaaaaaaataaaaaaaaaggctacaaaagcttaccttcaacattgttaggagctcggcggtcagtgggttggagtggcgccttggatggtcgtgggttggcttcggtccattgctcggtggtcgtgggtgctttgggatccgttgaaagaacgagagagaatagaggaagagagagagagagatgcaatttaaaatataaaaaggatattttgagatttaatgaaaaattaatctattctacaagtttaaatatacttatgtctagtgtaacaatttaagcctaacaaatacataaaaaattaaaattcttatattgattgattggttttttgtgagatcagtacttgttttggttaattttagttttgtaaagctaatatagtcggttttggacataatgacaatttggttctgtagtactattagttatcttattggtctaaagaaaaagtagatataatggtgatacttcaatggagactttatagataggttctggctcttacatcctacaattattctcatattttttatagtatgaaaagttacatacacttattaaagtatttgagattaatctacttcttttctttattttgtagatgttgtgttggtgggatggaaattcacctctaaatgctattaatgtcatcatgaatcttataggattttaactagtttttttattggtctaaggaataaattatatacacactgaattctaacagtttagatcattcgttttttaatgcaattgttttttaatatttagtaagtatttattaatgaaagtttttggtaacacttttatttttaaattttttattcacaaaagtaaaaataaattttttgaaaaaaaaaatatgctttacagtcacttctattattcaattttaaaattaaaaaataaaaaaataatttgtaatgttcatttttatttttattttttggttttatttaagtcaggtctgggtctggtctgggattggagctggagtcggagccagggagctagggtcggcttcgagtctaggtctggggtcctaggttcgagtccgatctagggtctaggtttgtgtcctagttcgaggttcggcaccggtgctggcgctggggtttgagtctactctggtgtcgggatctgagtctagtttgtggtccaggtcgaggtccgacacttgggtcgaggtttgagtctacggtttggttccattccaggtttgggttcaattccaggtctgggtcggggttcgagtccaggtctagggttcgggtctggggtctaggtcggggtctgggttagagttcgggtctggatcccgtttcaagttggggtccagctctgggttggggtccggggtttgggtttggggaccggggttcaggttggggtcgaggtttgggttcggggtcggggtctaggtttgggtgggtctgaggcggggttagggtcggggttggggtccaatttccaaggtttaaattggggtcggagtaaggatgcacacggggcagagaattgacagagagtgcttcccccgtctccattcccattaaggattttaatccccatccccacatattttttatcggagatggggcggggaatcccctaatggggcggggacggggacggaacagagaatctcctaataaaaaaataaagtttataataaaaatttaaatatataaatatattaaactacataaaaaattttaatattacatattaattattattcaatgaactaattattatccaaaacataacttaaaattcatacaaataatactaatataataaaaaatgcaaacatacattataaattataaaatattactagaaatataaaataaaatactaaatgggtcccgtcgaggcgcagtgtgtgggcggggtatgttatccccgtccctgacatgtttaacattcgaggataaaaagtaatctccgtccctatcctgttccccatttagacggagaatccctgccgtattaggagcgggttcttgcggggctcgtccatgtgaggaaaatgtgcatccataggagtctaaaatattgattaagaagaaaaatctgtttaaaaattttacaagtaatttttttttgtttttaaaattttgaaaatttt

SEQ ID NO: 36425 - DNA, 3417 bp, Cannabis sativa
tagggcacaaagcccaacacctgggtcctaggggctccaagtttgggtacggggtctgagtcttacattaagtatttttttttaatatattaaaactggatcggattagattcgatctgaaaaagtattaggcggggcggggtggatctgatccgagatctaacaagtatctgaatgttttggatcagaagtgatctgcctaatgacaccgaaagagtcctagacaccaacaatactttttaacaattttcatacactactaaaaaactcaaaattctcgacatttttacaccgtcgagtaaagaattcgcgacagtctataaaactgtcgcctatatgagcgtcccaaatactaagtagaatagacgacagtagaaaaatatccttataaaaatattcctgacagtctaaaattgtcgactatagttgatactataggccacggtttaaaaccgtcgctatagtggattgccccccaaaaaattatcgttttcatcctcctcgaaaccacttctagcatatattacatctgctccaaaacctttacaagattcatcctcctccactgtagttgtgcttgtcttcatcctcgtcaaattttttcttgcaagtttcaactttcttttcacttgacgatccttgaaactttcttcgcattgcaagctttaaatttattttaaacacacagagatcaatatcaacaaaccaaatcatggctaatagaaatttaaacaacaaataagagaatattgtgcttaccgttgtgctaccatgagagagcagaggaaagggatagagtgagagagagtagagaagagggacgacgtgactcgtggtcgcaaaggagagagatctcggaaatgaaataaaataaatttgaaatttaagatgtgggaaatgacatttcagatccgaaacgcgtgaaattgaagcatgagaattgtcaaaagtttaaaatcgttggcaattcccttttacaaatacatgggagtttttaaagcatatttaaaaaccgttgcctataccttccgacagtttaaaactatcgagaatattttatttttcttgacggttttaaatactcaatttttttaacgacaattctccgaaaaaaaaaaagttaaaaccatcgcaaatattattttttgtagtaatgataatgtcccatcgagatagtattaagtatcttaaatgccttcttgaataatgcacgtccacttctcgggtatgcacaaaaccatctttttcgttattgtcttattattactttttttacaagctcaaactcccatgaaatagaaccaaatcctacgtatgattctcctatatagcatatacccttttataaacgccttttataaacgctataaataaacgctataaatatatatatatatatatataaaaataggattagtggttattatccttgattaatgtgttcaaaatattcttttattaagtactatctcatgatttcttaacaatatattaacagttttcaccaatcagttaacattatccttatttgctagctgccaattattcaaatttatccctcacatgtgcatccataaacaaaagtactacatattaatgtacatttatatattagataattaaataaaagtaagagattgttttgaattaattattttattcacatcttaataagctagcttcgtcatcaagtcattacgtacaatgactgaatgacaagacaaagtgtacacgtattatccatattccataatatatatcacatgatcagcgaatcatattaaaagctgagctgaaacatcaccttaaaagtttcttaaagttaaagttgaaagaaaagaaagaacaacatccctatttatatcaaacaaaaactcgaatatattaatatacaagaaagcaagacagagaaggaagaggattatttgaagggattcctctgtcaatattattgtcttttgagaactgatctttagagagcgcgcgaggccttgtcggggggacccatcaagactctctgtcctacgtgtcaacccctaaacctctttacacatcaacccaagtaaaaacgacaccgttttctttattgcacttctactagtagtacgtaagagatccaaccattagcattgtcgtttcaagtagtattgtgttaagtatgtctctttcaatctccataactaatccttctccttcttcttcatatgccatctcactttggatcttcaactgatgaggaagatctctatcgattaactcgtcaatgtcttccaacacctggcaatctttgttgggaaagctctcaactctccaacacaacgtgtcgatcaactgggacccatgcatgatccaaaactcggatgaggaggatgatcttgaccgtccacgtgtgctcctattattagtccacggcttcaagttcatacaaggttttaatatctccaccaagatttcgtcaaccacatcgaacactaacctccggttcgaccggagtcgaaactgggacgaaagatgtgcaaaagtagttgattcttggaggtagaaggagttctcgagtcggtgaaatattgattggtctaatgggtgtgagggagagaaccaattggtgaaggacacgtgggatgttctcgctattcctacacggaatagtattctggaaatgtactggttgaggtccgaccacctggcgccgcggctggtggaggcggtggtggtggtggttgttacgacgtcgtttgtagtgtctcggggttcgagcacgtgggactctgtttggtgttggtacttttggctctgagaactagataactgtgacgacctacgtttcgattcttgggcattattagatacctctgttatttctgcctgctttttccaaaaacgcaacgtaacaaaggataagttgaaaaaattatgagcacagaaattattgaaattcaaaaattaatataatgaaacaaataaatgggtttaaattaaaaaataaaataaaattgaaatatagtttttggacctgtttattatgagagatgggatgacttttcttgaccgaaaagagagttgggacattgatgttattaagaagattgttagacaaaggggtcttcttgcatttcttgtcaggaatattgtttctggtagatgttgaagaacgaacaaatgtctcttcctgcatcttttgtagccttgcaccgaaccctgcttcacgcccagcttttttcgttgatgttctacttttttggtgaaacgacgtcgtctcatgatggcctcctctctcttgcaatgcctttgacttgactgtagctaatttgtccggcgcaagtgatgaagatgatgtcgtcattattggcaatggccttgaaatttgaatgctaatttgatctttactactggcgcataaagatgttgttgctgttg

SEQ ID NO: 36426 - DNA, 2574 bp, Cannabis sativa
ttaaagtgtaaaaatgaaaaagcttcaaacaaataatattaatatttatatacatttaaatcaataaaaaataaataatagtattatttattaaactaaacttactaataccgttaaatttaacataatatttttatattctttaaatattccgttaaaccaataaaaatggttagataaccacattttatatataaagatccctgtttttttggtgctatcttttattatttgtatattatttttgtgttgtttaattattttactttaatgtaattttcttattttttttgtgttaatgttatagaacaccttagtctataaaattattataaaaagaatatttaaaacctaaagtataatttttttaaaaaaacaagtagatcttgtttaaattttcctttttaagtacatttttgtggtatttggtatatatctatacaagaagctatagtagcatttttatataagaagcaatatacatatatcatacatatagatttatattgtctccattaggtcaattcaaacatattaataataaactaatttattatatttgagatcacaagccttttgaaaacaaaaggctatagctgatcatcaaaacaacgtcaaagtttgttagaatttgaattagatttagatctcaccttcacaatgagtttaattaataacgaacacatacataaattaacttaatttgaattccttcgactaaaaaagcacatatattctttgtactcttgtctagtgttttcactcgaagaattagtatatatattgaacagataatgtgaacggaatttgtcagatatttcttgtattattaatcccaaaaatccatacacataaacaatttaaataaattaataagagtactatagagataattagagagaaaagaatagcacatgataccatcacatgctgtcactgacatcatcataactggccacgactaaccctcttttcaatgttcccaacattcaaacatcacgtgtttatattccccaatacccttctaactcgtttaagctaccattttcgagtcattaccatctcaaatttacattaatacccctacattctctgccctaattcttcatcaaactcatacaatagatgagggcattaaagtaattaagcaagccggaataattgtaaagtggtaaactagctgaaaccagtgatttgtggatcaatcatcgaaactttataaaaaaaaagaacataaaagaaaaacttaataataataaaaataaattaattaaaaataaaaagtcttggggagatgttcttaaagcctctaaaccattggaatattagaataaagaaaaggaattttaaaaacaaaaaaaaaaaggtaagagaaagaaaaaaaattaccctcgtgaaaaacaatgcttcacaccttttctttcgccacaagaaaatataatatgcctccaaaatggtccatttattgatatatattttctatagaatatgacttatatatgaatatgaggctataatatagtatatatattagctagaaaatcttttatattattatgtattatatagtttattattttcttttatggaagtattattatatatatatagttaagtgtgcgagtagttcactaaaaattactccaaaacaagaggttatagctggctcttatgtagctagttcaaaaacatttagtaggatcatatatagtattattaaaatgataaaatgaagatattctaaggccgcatgactttgcaattctcccataagtataatagccaggcactactatattattctaaatgccttcttgtaaatatatatataaaattatatatttatatattgatttaatatttcattttattatgtattatgtcacgcgaaggctattgtactgtggatccagccatatagcccacttaattttttagattggaactattcatattctaagaggcaaaaataataaattcttcaatggtttacttgtgaaagtggactttgagacagatatggaagtgggtatagtcataattcgaacatggtatgttttaaattttgttttattattaagtgtatttattttctgtgatgacaattacttcctcatcatgggattttttttttcttttttaatattagaaaaaaaaaatgtgtttgctgcctcgtgggatgattaaattacataggggcaagttgtctttcaccttttggcactattttatatcaataacaatgaattcgttacaaattaccataagcttattataattagttaaataagctgtccattttaattaatattatctttgggctatgacaacctctagtagttaatatttgcagtacaataagatattgcaaataagtaaaatgagcttttgtacgtagtatattcaattatatatataatttatcatataagcttagccccaagatgatggcaaagtcagattgattttccttttaagggatctctcaattggggtgggtgggttggggggagttaatatagtgagagaacataattgttgagttgcttgaaaggacaaaagccaaaaaaaaaa

SEQ ID NO: 36427 - DNA, 5460 bp, Cannabis sativa
caattttgaattatatcgaacaagttatgactaaaatactagtagagtccactctactccaagtgcttaagctcgccccaaggattccaccactcgcccaatagatgtagggcacacccaaggggcctaggactcacccaagggctccacgcctcatgctaaagggctccatgggctccatgccttgctaaggggctctatgtcataccaaggggcttcaagcatcacctaactaggggttccatgtctcgttaacaggcgagaccttccatggctcgcccctcaccactcatcatagggtgtccctcaccaacggagcttcacatccctgccctatgtattaaaaaatgagtaaattatgctgtactttttatgtactttataatacattatgaattgtattaaaattactatttataagttaaagaagagattggataggatttgatgatgatgacaaataagcactttaattccccaattaagttccactcacaaatcacaatcactaacaatatgtatatacataaaatctctcaataatattaattatataagaaatgatataattaagtgggtagattagatgttatggcaacatcattaaaactttccatggggacagtttttcttaataaatagtactacataaccaccttttctctaaagcatataacatacaacatatataacataaatatcaactttatatcaatctgtatatatctttgtgtgacaagtttggcaaaagtatcatcatattgtctttcaatatcactccacatatattattaatccattatatatctactatataactaacacatatataataaaaattataatatatactattactcatgtgatttgaaggaatcaatctatatattatttcatgtttagtattctattcagttaatagattgactcgtaattttgttaaaactttcttgttcaaatggggtattaaaaaaaagaagatatttttactaaatttatgtctataatattagatgatttttcttcttaataaagtttctaataaatatatatattatctcatcattttgttcacgcaagaaaatattagagtacgtatattatattatttttaattaactatattatataaatatgtaaaattaatagatattattattttatggtttttaagtttaattattgatgaaaagtaacaaaataaccaaacatgccaacgatgatttatgtacttttgactattaataatatattataaataaattaataattaattaattaataatcgagtcatgatttagaattaagatctctttgatagtaatttctattcattataagtgtaccacctaattaagcactgcccaagttcaatccccatctaattaagtaattaattaattaaacaataattaaaaaacatgtatatatttagattaattaaccccataattaattatattattaattaattaatagagaaacattgcacttggaacacaaacattcatttttggatctcattattattatgattaagattgatcaaaacaagatgtgtagatcatagagagacttttaattaaataattactatttataaataaataattataaacttgacaaggttttattgtcaactataagactgaaactaccctaatcattacttatttttagttcaaaaatgtgtatatttgttcaaattaagtaattaattaacactaacgtgatatatcttaataagatagtcaactgttttttttttcatctatagtatttcaaaaattaattggtttctctttacaaaataaaaatataaaataataaaacttttttgtaataatcttgtattatcgttttaatttcttacctaaaccaagctctaatcttactcttgaaaattgaaacaattaatttcataaattttctttgacttacaccaacaaataattcaaaatactgacacttttacaaaagagaaccaagtgaaatagtaaaaaatttaaaatatttattttcttacactattttacatactacctcgtctgtattttacatatatattaaacgataaatattattttggattgtaaaaaaatatgaatctattttattaaataataattaattaaattttgtgtttttcaaaataatataagtttgatcatatcacactttcaaattaaattattattaagttataattaatagaacaaaaattaaactcgttatttattttataccactttgaacaaatttaaaacttttacaaaatacgtacaataaaatttaaaatattactaccttacattaaatataatttttgactatttttaaatataattcataatagatatataaacaggtttgttatataatacttttaaaattagattattattaaaatttattttcacaaaaaattaatttagactcctatttgtatcattttgaaaaaaaaataaatatttattttattatttaacaaaataaaaaatctataattaataatttttgcaaaatataaaatacaaaataatatttactctataatatatgttaatttgatttagtatttctcaaaagacaatatattttttctttggatagagaagcaccttattcaaaagacaaagtaatatatgcatggtcaatatagtagaaaatgacgtgtcatatacagaaaatatctatcgtacacgtggcatgatgatgaggatgattgagtggtggatggtgtcccacccacataaaaagggacccaaacagatctcatgtcgttttcgtcccattctgcactctataccataccctataatatatgggaagacttgtccctttccacatgagcccactactcactcactcaagggccttttcgtaatattacaaccccatctaatatacacaacacacatatattcctcaaattaaattatttttattgtaaaaacactactataccaaattaggttcttaatagtagagagagagaatattaggttgtaattaatatttgtaatatgacatcatttatgtatgataaatttaattatatatttcgaatgcatttataatagattttgattatttaagtagtgtcacttgattcgagttacagattacttaaccaatttgaatgaatgtatcaaaattttatgtgattagttttacattgataattgtaaggttataattcaaatgaaatttatcatatcataaagctaaagccaaaacctacaacctaatgaaaatgagaggaaataaaaaatcaaaagaacacatatctataatgtgtaggaagaaaaaaagaccttaccaaaaataaattcaaccttgaaatgtgatgggttaggagagcccaccttaccaaaaataattcatttaaaaacacctatattagtaaaaacaatataaagagagcctcaaaactccaatacaaaatatgcctaaaaagttcacatgaagacctacttactctattctactaccactagactttgactctactatatcaatcaaatatacatatatatcatagctatataatagggtacgtaatagtctttcggatcacaaaaattataaattttataaaatagtaccttcaaacacaattttggataatattttttttaaaaaaatataataaacttacatatagaaaatgtaatcagtactattataatatctctaaatcatattattattacattttattttaataaaaaaaaaacaagtcataatactatattattaaaatataacatttaatttatcatttaataaaatagaaatacaaattttagaatatctaaaataatatgtatcccaatattatatagtgaatagtgtgatagtttagaatgtaccatataacacatgatctccacccattattttctagacctactactcttaactatcataagtaactttctcactcatatcaaatatattttttttctatatatataaatttttcatgaaaatgaaataaaagaaaaacaaaataataataaaagaaatgttgaaaaattccaaaagtgatgagattgtgcaccccaataggttgggttgggttgggttttggaccacagccgcacccaaaaaaaacccatatataagtggctcacagcttacatgcactgtatatgggtcttatttttcctaatatttatttttttataaattaattaagaaaataaaaagctcatggactgaattttttttgggacaaaaaaaagtatttattattcaattaaggttgataatgataactataattgtaaaaacgtgtaaaattatgttaatccaatcctaatcaatctcatacttttgagttttgagactgaaataatgtcatatttgtctatatattactataatatcaagtaataatctccattgaaataattaaaatatatgtcaaaattggtcatgttttttttttcttttataattattattattattattaagaataatttatagcgtagatacttaatttaatttttggattacaaataaatatttaaatttaatttttaacggtaatattacttagttatatttttaaaattttcatcataagtacctatagtgttattcatctattatcttttattagtatatttaaatttaattataaataaaaataaaatttaataaactttcaaaaatataagttatgtattattagtataaaaatgaaacttaaatatttattaattatttttttaacatatgtaaaaaaacatttgatttggaagatatgtttttgtgtgtgccccaattaaaatttttgaaagtgattgggattgtacgaacatgcaactaatgacctagcttttttttgcctatgtaaatgagccatctttatgtctgatcaaagttttgtaaattttaatttaattaataattaattaattattataatgataatcacttccctccaagttccaatgcccccttcactacataacatccttatataagaaaacttaactaataataataataataataataataatttagaattagaactactatactatagtatagtttttaaagaattacaaaacaaaatctacacaatatcttgtgattgtattataatattataacttacttacaatacatctgtaaaacacagccttttcataatcaacttgattattataaattataatctaatatttattattgagcttcttcactaaggattattataggaattcgttttcaaccatatccacattttttattactattatttattttttagctaacaatatatattattattttaattttatgattgtaattacaataaatttcatatacattttttgttttactttaagataactaagattaaataatatttatacttgtgacaatattgaaaatttgaaacccaaaaaacttataaaactgaatgaatgttgtgaa

SEQ ID NO: 36428 - DNA, 4051 bp, Cannabis sativa
  modified_base (4013)..(4021): a, c, t, g, unknown or other
gtggatgatggtcggagacttgaatttaattgctcatccgtgggagaagtgtggtgggaaaagagtttctggtcatgatacttcgattctccagaatttcttgttgaagacagggggtgtcgatcttggttttcgggggtgtaagttctcctggcaaaacaataaattttttggaggaattacgagagaaagactcgaccgtgcgcttgcctcgggagattggattacaaggttccctacggccaaggtgttgaatgcacctattacaatctcggatcatggttatgttctcattgacacgatcagggggcgtctaaggggtatgaagccttttcttttctttgaggcttgggcgagagaaaattcgtgtgaggataccattgaacaggcttggagattgagaggtaacaggagagatttcatatgtggaaggttaagggatactcgttgcgcgctacacaaatggaaaaaagggggtttttcggagattgtgatgttttgataaaagaaggtgaggagaaaattggatggatccagaaacagcctttgtcagaagatttattgcgagaggaagcttccctgcaaactagaatagcagaattgtggattcgtaaagagtctatgtggagacaaaaatcaagggaactgtggttgaaagtaggtaaccggaactccaagttttttcatgcgtccacagtcattagaagacgaaggaccgagattactgccattaaaaacgctgtgggtggatgggaaacggagtctcaaaaaatagggactgttttcaatggattctttcatgatctgtataactcggatggagcggttttagatgaatctttttttgaccttttctctccagcagtcacaagggaggagaattttatgattaaaactatccctgcaagagacgaaatttggaacgttgtggctgctatgcatcctttgaaggctccaaggcctgatggtatgccgagatgcttttatagaagatattgggatatagaagggagtgaagttattcgaatggtgcaatcctttttctctactgggtctttggagaggcaattgaactacacctttatctgtttgattcccaaggaggagaatgcgtgttctgtggataagtttcggccgattagtctgtgtaacttcacctacaaaattatctccaagattatagctaccagattaaggggggttattgacaagctaatctctccatttcaatcggctttcgttccagggagatggatagctgagtgttctattctgacccaatagttggttcacacgatcaagaggaagaaagggaaagggggtctcatggcaataaagcttgatgtgcttaaggcctatgatagaattgaatggaatttcctccatgaagttctcaaaggcaatgggtttgactctcgggtttgtgagcttataatggaatgtgttcgaacggtgtcctactcggtgttaatcaatggagtcccacaaaagaaattcaagcctaaaaggggtcttcgccaaggtgacccgctctctccttttttatttctcttatgtcataaggtcctttcaaaactgatccttaagcagcaatctagaggccagatacatggcatatccatttcgaggacgaccccgattattagccacttgatgttcgccgatgacattattttgttcgttcgggcaaatgagaggatagcgacaaatctcttggagtgcatccatagatatgagtcgtggtcgggtcagaagtgtagtttggtgaaattaagcgttctttttttcgggaatgtgggtggtgagctcaagagtaacatcctcaaaatactgaatgtaaaggagtgtgatggcggagagaaacatcttgggaatccttttgcttttaagaggaggaagagaaaagaatacttgtttctgaaagagaaggtggtgaagaggattgagggttggaaagccaaacttctatcctttgcggggcgtactaccttggtgaaatcagtagcactttcgatcccgctttatgcgatgtctactaacaagatcccggtttctacttgtcgagacattgatagagtaatcagaatatattggtggactgggaataaggagaaggaccagtttatggccttagtggggtgggataggctgtgttctcccatgacggctgggggtttgggatttcagaagctagaggctgtaaacaaggcattggtggccaaattggcctggcagtgtgcctaaaaaatggacagaccatgggtgacttgtctaaatgagaagtattgcaagaaggaatccttttggagcactagtgcaagagcaagtgattcgacattttggaaaggcatcctgaactctagagatataattcgaaaagggtgcatgacgttggtgggaagaggggactcggtggatatatagacgcaaccatggatcccgtggctggaatacgaggagttcattgaactccttaaccaggtgagaccgaggttcttaaatctcagatccgtagcagacaagactaatgacaatgggagctggaacattgaattacttaaagagatgtttggagagactctaggtaacagaattggagctatcaagcgtctgcctcatgatcaaaatgattccctagtgtggaaggaggcggctgatgggacattcactgtcaagagaggatgcattgctacgcagtagggtagatcatttgaagataggaggctttggaagcaagtttggggaaaggaagtccactctaggcactcgatgatgatatggagagtgatcacgggttgtgtgcccactggagataagttgggctttgtgggagatctgtcttgccccttctgtgacaataatcttgagacggttctacacatcttctaggagtgtccttgtgcgagagccttatggttcagtggtccgtttcccatgtgttttggggaaggcagtggtgattctcctaagagaaggttgagttggattctctcctctctacctactgagcttgttgaccgggttttcaccttcataggatgcttgtttgaaggcatttggaatgccagaaatgaattcttattcaaaggtaaaagggtcaatattgaaattgttagatgctgcattttgagaaggtatgcagagtgtttgattctcgccaatgctgatctcgacatgggccaaagtataacagcggaggtgccaagaggggctataggatcaaacggtcaggctttttgtgtgacagatgcttcttggaaggatggcgtagcggggttagcagttggtgtactggagagacaaagtaacacctcctggtggtttgcgagaaacgccacagcttcgtctgctgctgaagctgagctcttagcaattcagtgggcgcttcaaattgcaggtcaaagagagttcaagtggtttgcttgtgcctcggatgcaaaggtgttagtttcagctttgaatgagaggaagttccctccgatgtggaccttgaaacctttagctttggaggtccttaatttatgtaacttgtttgaaacttgtaagttttattttatctcccgaaaagacaatgttgattgtgatgccttagctagatgggcaagagggaacagtcagtgtaatggctacattaatagggagggatcccctgttgtgattcccaattatctactgcaataaactcatcttagtgttctttttctttcaaaaaaaaaaaaaaccaactttaattataacctaaattattattttttcttctcttcacctcactatttcttcttaagatttcttttcataaacttatctacatcttttctccttaaatttgtcaactactcccttaaaatctctaaaaataaaatcttaaattgtaatcaatccaatctcaatagataaaactaaaaaagtcttttagtttaatcaccattccgataagttttattatctatattctccaatttatataaatatatcatactatggaagagatttcaatggttacatttttattnnnnnnnnnatggttacatttttttaagccattggatta

SEQ ID NO: 36429 - DNA, 7586 bp, Cannabis sativa
  modified_base (401)..(410): a, c, t, g, unknown or other
agggcacaaaacccaacatcatttaattccgctgcacccactgtaaggtttctcttaaactttatatgtgtttatttttattgttttagatatttgtattaggatgttaaataacatgcatggtagtaaatctagatcctgataaaataattccaacagacaaatctcttagaaaggaagagtaagaaagaagaaatagtgtaattctcaagcataagtttggaatgaacaaataggacattagttgttttcatagaaaaataaagttggaatctgtttacaaggaaagttctagttttttattagggtatataggtgcggtagacggtggtaattaacccgaaggagagaacgagatctaggctcagatcttattattactctgcgacagaaaggaacannnnnnnnnnatctgagcggaaggagtcatattattccattacaatcaatgtaaggttttctaaactattacgtgtttaatttcatcatattagagatattcatatttaggatgttaatgaaacatgcttgttagtaaaactagctcctggtaaaataatctcaacaagagaagcctccttaggagaaactttgaggtactttacaaattgtatacaagcactgaccaaaagataagttagtactcgtatatgtcttttagggcaagattccttggatattttggaagcctaaagaccattcaagcttggagcaaactccaagacattgtcaaagcaacatcaaatgaaaaatgttagtttaatacacagctaatggaaaatttaatgccactggtctcatatgacattgtccttaagcttgggacttcattcagcacattccttgaagacagaagcttccagaagccttttaagcataaccaaatctacaaatcaatagatatagatatacaaatttcatactttatatttattattattcaaatataaaagtacaaaatattttgtattcgaacttaaatcaaaattcaaatataacagatttccttaaatgtaagagaagaatgtgccgagctttatgactataaaaacccctgacctaggcatggaaaagggattgctctcgcttattttggatcggactctaattttcgccgtgcttagaaaccctaagagaaaaggatttgcttcttttgcctcttgagcaaccttgaagagaaaaagctatctgattcattgtaaaagggacttgtcctctcatttgccttcttaaattttagcaaatttaaaagagaaaacacttctgccattctaatcattgaagaataaaaagcttattactgccattctaagaacataactctagtcgtgttctttagcattgaaaataataatatcacaagtgaactagcctattatcaataaaagggggtaaactactataaattcatatacatttttccatcctaaaaatcttaaaaccatttgtttagaccaccatcaaagtcttgctcaatcattgtgttttaccatcaaagtcaacaatttccataattgaagggaaattttttagaaataataataataataataataataattcaatttacaaaatcttacaaatatctagaggagatatttatcctataatttaattatcaatttaaccttttaagatatttatccaataaattaattatcaaatttaagcttttaaaataactttatgtacttccaatattatacaaatttaagaattatagatatgctacatctttatatttataatattttgtcaatatagtcccaacattgttactcttttacttcatttctaatatagtgaaattcttggaaaatttactaaaaaagttaatagatatcatcaacttagactacagaaagaaaaataaaacattaacaacttcaacttatttagtacataaaagggataaaaatcacacaggccctagctgcaaattacattatcatacacaaagagcataataaacccaatcatttatggggattaacagagcctgaagagaagtagctaaaaactaagtgctatattatgacactatatactctataattacaaaacaaataaaaatgaagcttgttttcttaatgtatctattgcatcaatttatgatgatactaggtggaaggtaatttgttttgttttgctcctccaagctgaggccctcacaagtaactagcttcacaacagaatgaactgtaaggttgttgtttctcttctgaagttctgaaaatcccctacttaggacttgattcacccaatcttgcaccactttgaacccatctgataaatatgtagctgcaagtaattgttccatgacattagactcaatatctaggatacacttggagtgaacagttctttggaagctatcttttatctcagtgaagattttctcagcaagtaaattgaaatcgaccggcttgaaaaccactgtttcatcaacctggtcaatgaaatctagtaaccaagcatcagagttctcagaaacgtagtcattttcagagcttccctcatttgttagttcctgcagttcattttcctcagcaggaaggttgagatctagatgcgccgaagatgtcttgtgtgctcgtttcactgtttctgagttatcacgctgctgcagaggttcactgacaccaatcaacttccttttgttaactattgaatttgaattggtgtcaggtagtatcctgctttggcttgctccactatctttagaagcaccttcaatcataatcctcagtggccgaccttttacatttgagattctttcctcagaatatttggatgagtccttagtagaaatctggatatgatgctgctttgagactgctgaagttgtcaagaagattttgttacttgtgctaacttctcttccataggagtcagaaaatttaccagttgagatagcctgcaataaactatttcgaaccagtacatcagacttgtgaatattttcaaggaagacaactgccaaaggcttcttacacatttccccagcaatacaatcaacaacactcttgcctctaaattttacatcacaagtgactgattctgattggatcattctagtttctgagctcaaatcaacacaaataacattctcccggcttccatatagtatctcggcaagagagtaagcaattttcttcttgctgcttctatccggtccgatgaaattcaaccatatatcccctctctgacttcctctggttcgacagcgaactatagtttgggtaacaacacttatggcctcccattgccagccaacactctcaaacatagctctaaagagcatcttcacatctcttggatcaaattgcctaagattatccagactagcagatgttgactgaggtctatgattaaacagataaccattggctgaattagcattttccaagcaacaatctgagatgtcttgcctaagctccaagtgatattgattttcaggtttcttcaacttgttaaaacctcctgatatgaaaattcccaggcctaggtctgtggtcacagaagttgcggacgcaggagatctttgatttccatcaccattgcttgaattggagatactgcaacgaggagacctggcaccacccgactcgagatcttcatctttagaaggcttttcccatattccagatgaaaaactctctgtcttctctttggaaacaggaaaaggattgcttgcttgtgatgctgaaaacttttcaacatccgttggcaagcatgaatttagatccatgtgcctagtagctccatgtgaggaaacatcctcattagcaacaatgtccctgttatttttgccagactggaacccgactatagttggatacaagtttgcttcaggaaatcgtctagcatcgtgagaagcattatcctcgttcttctgcagccctggaactttgacattcaatagatctccatcatctttggtctgcactgaagagatacaaactggtttttcacacaaatactgtgaaacattccgctttctatataaggcgaaaccaaaactaattcaaataaaagtgttattgtttccttaaagtgatacacaccttcacatccaattccttcttagaatttagtgctgccatttgcaaccaagaaggcaagctagatggacactgatctgcaaccgaagaggtgatgcccggctttgacacattagatatttcatgctcagaattatcactgtgctggagagagcgggacaggcattgaaaagaactgcttaaagggaactttacatcagatggtgctgaaaagaatccaccaagaggaacaaatgtctccatcaagctgtaagtttatccatgaccataattaaaatgctaagtaagataagagacatattatacaaagggaacatcttcacactgaaaaatgctatcgaaaggtttaaaattatcgaataagagacagctaatacaaggtaacattgctaaaagttaaacttacaaaggtttttttggacaaagctaaagagggaagcacttaactagattgttatccctccagttaacttagtatcagaaaactagttctaaacaaaatttgtagctagcgctaaaagaaaatcgtactaaatgttactaaaactgtctaaactaacaaaagaaggataaaatttccatattagaagaaacatatataatctctctattgatagtgacatgacaacgattttttttttttttttcaattaacatccttttctttttaagaaagcaaaataagtggatgataaagaatcacagctaactaaagtttaatgagtctttcctaccacgcatatatctccacagctaactaaagttagccccagcaaaatactatcctagctcagaaagaaaagtaatctaaaataaatgaataagaaggtcaaccctcctgagaataaaaaccctctaaatgtgaactaaagtagaaggtcaaccctagagaataagacatctttaaataaacattccgaaagtttatgaattcgaaaattatgatgtatcgatgatgtgcctcatatattaattaacagctatattagttataatcggattattatgatacaaaactttattcaattaattaaaaatattggcagaagcaaacaaagtcatcacgtaatatttatcagagtgtcgttttagaagaagaaaataaagatattgatgaaaactgctgaaaagagcgagatgaggaaattttttattttatttttttacgaccagccaaaacacctttttgataattaattaatatatagaatatcaattaaataagtaaagcaaatccaacaaagcagtaatcatgcaagtcacaaaatcaagaaaactgtacgtaaaaagtagttagtacctagacctggtatacgattcaggcatggaagatctgagagaggttatgggaagaagttgaaggtcccaatctttctcaatcgacggaaacttactcacaaacttcaaatagctctcgtagcttgccgtggcaccgattatccacactttcccggtctgaagctccaaaaacctcgttatttggtcgacgacattgctcactattgcaacatcaaccgttgaattttcatccacgaagttcttcaaatcaccaaagttcacaactaaacccgacccagaacactgctcgactagctgacttacctcccttaactttaaactcaaagaccctttttctgaatcttccataatcgtcttcgaaacatcattttcgatacaaactgtagtcactccagataacccaactggcaaaacgccatcttttctcttctcaagaacctcagtgaagctccgaagtgcatcgtaagcgcatacacccacgagaagaggatttcttcctttgttccggataagtatttctcctattcggcggcaattcccgtctccgtcggatacgattccggcggggaaaccagggaaggagaagctggagctccggtttacttgattcggagggtactcggtcaagttacagaggaaaacagggggtcccctgtatcgcgaatatctgaggagttgtgaaaaaggtcgcaaaatagcgagctttatctcggagctccgaaaacccgcttcaccgaagacccggctgacaaccgggtcgtcaagaatcgacagagtaagatgttgtagctcgactttgacgcaagaaatagaagactgttgaggaatttggtggtacatatggtaattctcggggtgccttctctggttagcttgggagcgtttaatagcggccatgagcgagttggacacgggggggtcgtcagctagttgggtcgacgagactcggtccaaagaaacgctgaggcagagctccagagccttaaactggaggcgaggggagtaagctgagttacgggcacgcgcgcacgcgtctcggagaggcgacgacggaagcgagaggagcgccgagaccgcatgaagcgacgtcgtttgggcatgaccacggcggcgagccacggccacggcctcatctagcgcgtgcgcagcctccggcgtcaaacattgcctggccacactcaccgccgtaggcatcaccccggagcatatacaacgaagttaactgttttcgtaaactaataataataataataatattaaaaaagaaaagcaattctttaatttaactgattacggaggttagaactcagaattaaaatctatcttactttctttggtttattttttactttattgaaggaaacaaatatatttatataatttgcaataaaataagtttgtaaagagagagcaagagtggtttcaattatttattggagaattgtaagagagagggaggagtataatataaaagaaaaaagagtataggatgttgctgttgttggggttgggtggtggtgatgtaaggtggggtccacgtgtaatggtgtggggtccacgtggcgcaatgcaattgtgaagggaggaaggaacaggtggtgagtgagtatagattctataaataataattatataattttccaaatatcaatttccatagatctttccttttgcgttttgggcactcagcacagtagaggtcgtcacctcactcactcactaccccattttgttatcattcttacttttaaataataaataaaaagaaagagagtgagagatgctgtgtccacttactttgagtgcgctaaaagtgacagtcagcgttactgtactgagtaatatgcttatgtgtaattcaatttagagaaatactaaacagcactctccaatattaacaaatatattagttttttttttaatgggaaatatattagttaagaaaaaagaaattaagaaatatattactacttaaggatattgacgggttaattaattttttagcggtaaaactattcaaattttacttttattatgttatttttatttatattaaaatatgatattattaaatgtcaacacttactcacgatgtgtacacaagtatacgtgacaaaataaatttaattcaacaaacaaaaaaataaataataaaagggaaatttgaattttcatgcttaataaactcataaattggtcttttaaactaatattatgtataat

SEQ ID NO: 36430 - DNA, 5079 bp, Cannabis sativa
atgttgaataaaatggattacattgaaatggagttttatttacggcataaaacccaacattaagtcccaatggaccccgtatgacgtggactaataataatcagggtagtagtaccagtcatgagaggctggactgggcggttggaaatgctctatggcatatgcaccacccaaataacatccttaatcacttggattttttggcttggatcacagagccattcaaatcctcttgaatagccctcatcagcccccaacccaagacaacaagactaaacggttccttttcaaaaacgtttggctcactgaacccacctagaatgatgttttgttaaaatcttggggatctaatgctctcaatgcctctcccatccaaactctccaatctacccaattggcttgtgcccagtttctctcaaactggaagaacaaagctttctttggtttccaacaaagaatttggaaagcccaaaaagagcttgaacatgccaaaaacttgaatgacagttcccccgagactctgtctcgacaaaagctgttttaagcaaaccttgacactcttctttttaaagaagaaacttactggaagtaacgatctcgcgtacaatggctccactctggagataaaaacactcgtttctttcataagtcgacttcaaacaggaaacgggccaatcatataaattcccttactactgaggatggtgttttcctcgacgacactaattcaattctttcactcattgagtcatactattttgatcttttcacctctcagtgccctcaggaagctgacattgatgctgccctctctggctcttttcctagaattgatccatcacattatgaaattttagatgaagacttctctcccactgaggttaaaaaggccctttttcaaatggcccctgataaatccccaggtattgatggtttcaataatcaattttataaaaagaatttgcatgtggtggggaaagatgtcactgaggctgtcctaaattttctcaataatctttctgatatttcccacttcaacaccactcttgtcaccttgattcataatatgaaaaatcctgtcaccctcaaggattatagacctataagcttgtgcactattgtttacaaaattatctctaaagtcctagctaacagactcaagttagtccttaaccccctaatctctcccaactaaagtgcttttctaaagggtcgcctcatatcagacaacatcctcatggctcaagaaatcttacactctattaaaaacagaagttagatatggctaaagcctttgatagagtggaatggatctttctgagcaaaatcatggttaagtttggattcactcccaaattcacttccttaatcatgaaatgcctaaccactgctaccttcaagttcaacctaaatggtcattctttggggcatgtggttccctctaggggaattaggcaaggaaaccctctttcgccgtatctcttccttctttgctctaagggtctttcatctattttaaagcacgatgagctcactgaagatgcttttggtctaaaacttactcgcactgcaccaaaaatttctcatctcctcttcgctgatgatagccttctattttgtagatcgaatatccaagcttgcaatgctatcaaagaggccctagcccagtatcagaatacatcagggcaacttgttaattttcagaaatcctccatcttttttccccaaatactagcctcacgtaccagaccctcatccaagactacctacagatacctactaccaatcatatggacaagtatctcagatttccccaatgttttggtagatcaaaaagtcattccttcaaccccctcaagaacggaatttggtcttatctgtcaaaatggcaaggtaaatttctttcaaaaggggaaaaggaaatccttcttaaagtgttatccaagctatacccacctatgcaatgtctgtttttaaacttcctgattctttctacagttttgttgagaaagaaatggctaatttttggtggggtgctaaggatggagaacgaaaacttcattggaaatattggagatccctttgcaattcaaagagcataggaggactagggttcagatcgctgaaacctttcaacaaagccatgtttgctaaacaagcatggagaatccaaacaaaccaatcatccctccttgctacactattcaaggccaaatactttcctcggtctacttttttggaatcctccttaggccactcgccttcatatgtttggcagagcttacattagggtaagtccctcctaaaagttggtctctgtaaaagaattggtaatggagataccactaaaattctagaagactattggattctgaattgtcgttttctccccatctccctcccaagtcatcttacccatgtctctgatctactactctcaaatggtgactggaacatcccccttctccatagacacttcccgcaggacattatcagtgagatcctctctctccccctcctaataatagccaagttgacacttacttttggcagcacaccccctcgggccattactcagtcaaaaccggttatcatgttgcaaaaacctccacatacatagcccaaccctcctcttccaattctgacacccttagacgctggtggaaatccctttggggccttcatactccccctaaaataaaacacttcatctctcgtctgtctcataataccgtacctactagtgaaaacctttataatagaaaatgtctccaatctcccatttgctctcgttgtcacatatactttgagtctgtcaaacatgttttgtttgattgtaaggatatgaaaaaggtgtggtcaagtaagccctttatacacgctctgaataatttaagaggttcacatgtgctagatatacttttatatattcagacaagttttccacctgaatctttttttaaccttttaatttgtatgctgtggaagtgttggaatagcaggaatgcatttgtttttaggtaccagtgtgggaaccctagcaggattcagtaggaagcagaagaatacttggccttttaccagcaatcttaaaaatacaacatgatccagtctcagaaacccgaccatcagaaggaaacacaatggtcacctccagctgcaggcaaccttaaactcaatgtggacggagctgtttctggaaaaagaggcaaaacatgcatgggcgctttagttcgagattcgttgggacaagtggtagctgctacagctatgagtcgtcaaggacagatgccaccaaaaactgcagaaggatgggctttacttaaagctctacgatgatagtattctatcgagctatggagctattgtaaattcaattctagaggtgttatcttcttttcccactgtctcccttcgtcatatacgtcgacaagggaactcaggcgcgcacaacttggcacaaatggctataggattagataacacttggtgttggaatggctatgacccctaccccatgcctttgtaatcactcttgggtcattccatctcaacaaaaaaaaaaaaaaatacttatgatgtgaccacttcaaataagcacatatattatatatcattatttaacgttttcaaatttgaataggaaactcaatttgaattataaaataatgatattatttttttatctgataatttaaaatatgtgaaatactattttaaatattatcaaatatcaaatgttattcactaaatgtcagtcaaataattcatttatttattatttaaataataataataaatagaatttcaagacataaatctatcacaataaaaaagtgataaaattctaaaactatacaaaatggtatcaaattccaaatgagctcatcaaaattaatcttgaaatattaaaaaggtcattcacctcacaaaatttaaaagatgtcattaacctcacaaaaatctcaaaatggtaattttacctaaaaaaaatttcaaagtgcactaaacttcaaaaccatgacaaaaattaaatggcgcattccaaaaagagagaggtcattccctcataaaaaaaaaaaaaaatcggaactacgtttgacttgatgcctataaaaagatacgtaggcaacttagatactaagactaagtgcagtcgctgatacagcaaaatagtattaaatataaatctcaaaattccatgaaagatcatacgtacacctaggaatttttttaaattttcaaatagcaaaggattcctgaaagtggtcatctaccgaaatccttatattcaatttctaaaataccgtattctgaactacaagtgacttgatccttcacaaagaaggatgtagacagttcggttagttaaatggactgagttcagctgcaattccaaacttaccctaaattttcctaaattatttcaaatctttaatatcatcgtaattcaaatcaagaggtatttcctttaaacgaaatgattgtaattaagagattatttttataatcttgaatgggtcgaacttaaattaataaacgcataggtaaaattgtgttttgcatttatttttaatattttaaatgtaaactttttgcttgacatgttgcaacaaaaattgtcactgctattaattatattaatttgatatttttagatttattattttaagatatatatgttaaattaaaaatacaatgtttgttaaataaaatataaagttaaatggttagagagacaataatatattttgattattaatttattattatttttattggacagagaaaatagtattaattagttagggagagaattgagtaattggaaattgatgttaacgtacgttaaaaaaaaaaaaaaatctgttaactattttaataaaatagcttgaaattattggtggcacagatggaaatagagaattgaggacattagattttttttcccttgagaccgcctcatgacacctctcattgacaccgtaggtgcccatatctttatatattaaaagtgtctatctaacggcaattcttggtttaacgattcttggtttaacgattcctttttttatttag

SEQ ID NO: 36431 - DNA, 15904 bp, Cannabis sativa
  modified_base (227)..(231): a, c, t, g, unknown or other
  modified_base (1485)..(1494): a, c, t, g, unknown or other
  modified_base (10391)..(10392): a, c, t, g, unknown or other
tgaacataatttaaaataaaataaaaaactaaaatgggaagaaccctaattttatcagcccacactctctctctaccttatatcccgtgtggcgttggcttagtcggggaccagacatctccgcggcggtgatccaagcaaaccataaatttggaattttcgagtcctgaaacgcaaaatccagtcctccctcttgcacccgatctctcaagctctctctctctctnnnnntctctctctctctctctcttagccaccaccacacaccaccaaccgaaacaagccaaaccaccaccgagcacgacctcagtcgcgcctcaaccaggaccacaaccatactttgccggacctctaaaagcttgattttcctcacaaaaaccttcattttcctcacccaaaagcaatgggtaaatgtttcttatacaaaatatggttagtcttattgtattgcatgaatctatacattatttgttgtattatgttatttttgtgacctgaaatgaaagcagagtttgtacccaaacactgttatttttttttttttttctgaatttttcaaatttttgcgattttgtacgtcattgtgcgattttgcgtgtgatgccaacataaatcaaaggtcaggcatgacttgtattatttttggcgacattggacgatgtcttggcgatgtttcacgattttcacggttctgcatttttatgcgatatgcttacatcattatgcgaaattgtttattatttttaatatcttcttgttgtgtatatttgtgtgccataatgtaatattatttttcttgtgcaatatttgtgtgatatttatgtgatattgtttttttattgtgcgatatgtcttgctaatgtttaatttatttacgtatttgtttgtggtttgttttggacagatttaactgtattagtgcatgtactatataatggtgtttgggctgtagagggtttcaactgggtgttctattctttaacaagtaagataatgatgtttgacattgacactacactggaaaaagtgcatgaaattttgtatgaagagttggatgcaaaccctttggtgtataaattaaaattagaagtctgttacatgtacatgaaagacaccaagtttctactggaggttttagtgaaagatagttaactacgagtgttcttgagcatgaaggcaaaaatgagtgttgataacttattgccactatttgtgactaaggtgaggaagaatgtaaatttggagcatactcccccagctgctccccttcgaagtattgttgggacctttgacccaaaaactgatctaggggttggtttgaatgagcaactccccaataatatagatgatcacatatccaacatcgcatttgatcattcagatgagttcgatgctccattttacaacaatgatcttgtggtagatttgagtgcggatgatgatgtggctatagaagtacctcccttgaggatggaactaactccnnnnnnnnnngtagagtgacaaagaagaccccccatagtgagaatcgccaaacaccaagaactagtagcagtcggtcaggtccttctattagtactcctgcaactaaatttggagtttctacgaaattcaaacctcttatgtggacaaggaaaaagatagagaaaaataatgtatatacaacatcccttagtggtacgccttcgagggagatatatcttggcaagttgtaaaaaaataagaaagaattgaagaatgtagtgggaatgtatgcattgaaaaacaattttgagtggatggtaagtaagtttggcactgatgtgttttacgttacttgcaaggatgaaaattatgaatagagattaaaagggaagaagaaggcacgttgtgacatgtttgaggttactgtgttccacaacgaacacacatgtaacctggattctaaaaattttaatcaccgtcaagcagcaccgtgggttattaggcatattagtaagaacaagtacacatcagatgaaactaactaccaggagaaagacatttatagggatatgtttgatgagtatggcatgaaaatgagttatgagaaggcttggaggtgtagagagaaggtagttacgtagaagacaaagtatgggggcacaatgttagttgttgttacgtacgatgtaaacatccaattatttttggtagcctttgcaattgtcgacaatgagaatcacgactcttgaaagtatttcttgcgaaagttaagagaagccattgggaaggttgaaaaccttatgttcatatcggatagcatcaaagcattgaacatgttgttaaggttattttcccataagcatgccattgtgcatgcttcaagcatattactataaatgtcgttcacaagttcaagactgatgtatgtaacaagcaaatatgccttgtagcttccgcatggaacaaggcggaatgtgatagacattttgaggtgctcaaacgaatgaattctgccattgctacatacatcaagcaaatagagttcgagaagtgggctcgcccttattgtccaagaaatcggtacaacatattgacaagcaacgctgttgaaagcttcaacaaagtgacagaagagttaaaaaaatatctaataactattttggttgaattcatcaggttcacacttgaaattgatttgctgatcgtctcgaaaagccaactaagtgtactacccctttggctactacttttgaagatgatttaatagcacaacacaaagatgataggttcaggagtgtccttcataatggtgcgcaattatttaacgttggtatgggtcctaaaggtgagagaggtggtgatatggacttagtggagagaacatgcacttgcaggctgttccaatcgctcaaaatcccttgtccccatgcatgtgccacatcaattagttagaatccgagcctatatgcactttgctccccctattacacaaaagaaacgtggattaagacctacgatgcaacaattaatgttgttggcgaggaggatgagtgggtactaccggaacataagtgtcggggtaccagtggagaaaaaatcggcaggtcaacctaggaagagcaatgtgggtagaagaccgacgaagcgtcgatcgtctaatggtcaggtggtagtggaacctcgtcattgttcgctctgtggcggttcagggcacaacagagctacatgcaaagctcaagttcgaaccttttctctaatagtttcttaactatctatattagttgcaaaacttgagtttggatcacatttatgtgttgtattgctggttgttgtttaacaggattgtgtgaaccatgttgaatatttaacaggtgccatgtatttttttcttactttttgcgatattgtgcgacatttctgcaatatttcttcgattattttttataaatgtgcaacatttgttgatatttgtgcgacgttgttgcgattttatttttcatattttattaatttaccacatttatgatgtttatgtaaaatctatgcgatatttgtgtgattttactttctatattttttgagttcttaatatttttcatatattaaaatatttacaatttctatgcgatatttgtgcgatattttttagatttaatattccatacttagatctaaatatttttttattgttttcatattttacgatttctaagcgatacatttttaaaattgtacaacgtctgtgctagtttaaacaaaagattatgtataaatgaagtaaattacaaaaatactactgttgtaaactaatcccaaaaaatatgctatgcagtcaactaccaggtcaaattttagtaaaataagtccacacaccacctatgtctaaaggtgagcatgttatcatctgtaaaatactcaagcgaacgatccaacatgcagtgctcaatgtattcaacaacatacattccacaatcgccactacaaattaaaaaattggaaactattagcaacaattaagttaagtaattcataatggactacaaaattaaataaatagaaaaagagagatttatcttattttcgtttgcggaacaatttcggaggtagctcttctataatgcattggttggagctgactgagatcacctaaattaactggaagtacataattatttaattgaaaataaccactacccgcaataaggatgcaaatagctcagtataaggcttcaaatatgacttcatgctctcctcagtcgtggcaccgatatcaccgtcgtatatgacaatctttcagttctcaatatctacctctatagccacccaatggtgttctttgggaaggttcaacacaaagtagatacattcttggttctcccaacgcggcaagtatctatgctccatccagaccacataattaacaatcgattgatcccatttgaacgtgctcccatcaccatcatgaaaactctagtacatttggaacatctgtgaagcagatgtgtccaaaaccacacttctgagtgtacacttcaggaaagagcttccatcttcttctcaacaagtgggtcatgacatcaacttgctgcattacaaataaaaaaaagtcagaaaaaaaaaatagtaccaacgtcgcacaaagatcgcacgaaattaaataccattctgtgaaatcgcatataaatcacacaagcatcgcatataaattgcacaaatatcgaataaaataaatgcaaagtaatattatatcgtaatcacacataaattgcacaaaaattgcactaacttaatttccaaagtgtcacattgcacataaattgtagaggcatcgcataaaaataacacaaatatcaaataaattaaatgttacagacacaaaattcatattggcaactcgcataaaattgccaaaagattgctcaatgtctcagacacaaaattcatattggcaactcgcataaaatcacacaaatatcgcatacatatcgctcaatattacagacacaaaatccatactggcaacttgcacaaaatcgcacaaatattgcataaaattgcttaatagcacaaacacaaaatccatactagcaactcgcacaaaatcacacaaatattgcaaaatacaaacacaaaactggtgtacaacacataaatcacttaatatcgcacaaacattcaaaaacccaaaaaaactatatcccctaacctagattctttctcatacacaaaaaattagaaactgaaagtttaatcaacaatatatataagttttatcacagattctgaatttaaatgataaatttaaaaaatcaatttaagaaaaaaaaaacctagttcaagtgttcgagtgggttcgtggacggtggcggggacggtaaacggagaatggttcgaatgggtttcgtgggtcgctgggttcgagtgggtcttaggtctcgttggttgcgtgggtcttgtgggtctcgttggtcccatgagtttcgtgggtctcctgagttgagtgtcgctgtggtcgagttgttcgaatggagtgggtggtttgaatggagggagtggttcgactgagggggtggctttggtgcggtggtgaaaagacagccgagattgaaagagaaagaggagagagaatgaagttagaaagattggggggaaatgaaatgaggggtacttttagaactaaattgaaactaaagaataactaacctatgtttattttgtgagtataatataagaccatgtgtgacattttagcataaaatgttaaatttctcatataaaatctaaattttcttaataatactcagtgcaccaaatatattgatattattttttaaaaattaattaaaccatgtaatataaacttgctaatcgctttttttggtaaggaattcttattagaatttggatataatcaaattgtgtttcattttaatttgtcagtttaaatatggtctatatgctaaatacattttaagttttcttcggatataatataaaaataaataaacatgtaacattacgaacaaagaaagtacattactatactaaatttttttcaaacgaacaattattttcggatataatataaaaataaataaacatgtaacattacgaacaaaaaaaagtactatactaaaattttttcaataataacgaacaaataatgttaacattgcgaagaagactttctttaactgaaacaattataatgatactaatgtaaaataaaaataaataaataaaaaacaaacaaaacccactgcactatcttcagtagtgtgtactgtgtagttacgacaaagctaataacaagggacgaaaatcgagcgaacaacaattctaatatgaagccgcaatatatgtaatgtcaagttgtacaccgctcacccaaaccattatccctgttgtgtatgtatgtatatgtatatgtgccaaagaaaagggcaatggtgtcgatgaaaaaatggaggagctgataaatcaaaagaagggttaaacaaactgaacgtgaaactgtacatgatttgtaaaatgttgcccagctctttaaattatcataagcccatgtgatcagctctttctctatctcagtgatggccccgtctaaggacggataagaatcttccagacgtcgacttacgtcgttcatctccttcatctgccacctgttcaagaaatttactttcttttaaaccagtttaggaccacaaccagctcaaacaaaaaatcatgtcatcttaaatctacgtgaatttaatgacttaattctgttctactcattctatacattacaaaaaagttaaccataaaccgtgcatgcattgcatacctctttggatatttgttgcagtgtatctataatctcagaaaagtcaggcctcaaggctggatctcgttcccaacatttcccaaggatttcaaccagctttggatgagtttgcttcgggataggaggccgtagaccctgaaaacaaaatagataacaagtcaatcaacagatgtggtgtggttccttctatttgtcaaatatactagattagaattaagaatttaagagtcaaggaattgtcattgtacctgttggacaactccaacagctgcttgtaatggagttaagaactcgtacgggagctgcccatagaagagaaataattttttattatatattttttaaaaagagaagtggcaaaaaaataaaacagccgtgtcaaaatagaactgtaatggtttgcagtggcagtacctttccagtgagtaattcccatagcacaactccaaaactgaaaatgtcagccttgtgatcatatggtttgtgttcaataaccttcaatgcaaaataactgttgtaaggaaatgacatgataagtgcccttcacaaaattcacttagaataattgtgaaaacaaatctgaataatgctaggtataccaattatatacaagataaggaacatagaagggaacatatttttcttttttgaccattcatacaggttcatgtcacaaactgtacttatattattatatctgacatttcatcaggaaacttcattcacaatatccttgcaacccagaagaaagacatggaacgttaatcaagtacactgctgaaaatgcagaacaaataaacaatatcaaacaaataaaaatagctctggctgcctacaaaattctggacatgaaacatagcaatctggctatagtgcagaatccaacaatattacaatatgaaaagcataacagctaacattaaactagtgaaggaagtgtcatatgattgtgcaagggtattgttatatatgttatatgtatctataattttattttcaatagaatgtaaaaaattaacatatgcacacgagcaaaagatcctgaaaacccaattaataacacatagatttaacgaaatcagctcacctcaggagccatccaccgataagtcccagtttctgctgtcatgactccagactgagcttgtactctagcaacgccaaaatctgcaaccttaacaacctgcaaggaaattatgtaaattattaatctcatttttttaaaaaaaaaattctatgttctggaaaattttgcacaaagacagacaaaaataaattgaaaaatgttatggagaatatacagagaaaaccacttacaccattttcatccatcaacagatttgcagcttttaaatctctatgtattatgttattttggtgcaagtagttcattcccttagaaatgtccgttgcaaccttgagcaagtttggaagcttaaagaaacctcttttcttatgcaagtagtcatacacacttccacccgacatatactctgtataaagccagaaatatatagatttttaaaaaaggtaaaaacacttcaaacagaacaaagaaactttcagaactaatgtgcccttcagataatataacagaagatattactattcacctgtaacgatacacatgcttggaggcttagtgcacgcaccaatgaactgtacaacattcttatgtcgaactttcctgaaagttaaattaggaccgagagaagaaaaaggcttgattactacaaagtaaaagaaaaagcacaaacacaaagaacaataaaaagaaagtattcatctacctcctaactcagatgcctccaaatccatctaaaacaaaaaggaaaaaaaaactgaggagaagactagctaaggtttgatgacattcttcataaggaatttggcattgaaatgccaaacatacaatacaagcgttggcatccaaatttagttctattcatctaattattactctatagcaagactaccacctacattggttccgctacgggtcaacatgacaaagcagattagagagccatgcttagtgtaagagtacaaagtatatcatcttatgtacctcatgataaagacctcctgggcaaattctcgctgcatatctgtatttattcgctcaggcttgaggattttaatggccacttcctgactacagtatgtacctttataactgatttttttaaaaaagtatatgttaatgctactgtaaatgcttaaggaaaaataataaaaaaagcatgtgtaaaccaggatttttacttacagatcaccataggacccagatgcaaccatcttctcaaacttcaaatgtttaagatcaatttcccaaacatctgttccatcatcaggtatagtcaaatgatcgggttcacatttgactgttgaatgatcagtttcagaaacaggagatgtctgacacattggccagggctgtccctgcataaccagagaagaaatttcatgtagaattttggaaaataaaatgccatcatagaaaggagagacctaatcagcaaacatgaaagtgaaaacacactgggtatcctttatgaacataaatttttctataaggggtgaggaggctgcaagaattacctcgattttcaatacttccatttctaaagcatctttgagttgctctgttccctgtttcaacgtaagtaaatatgtaaaatggaaagtcaatgattttgccacacatactaggaacaaggagaagtcaatagaataccagtgagagtcatgctaaattcattgagtacatcacaagaaaattttaaaattttgttgtcagtaaaagtttatatagtggccaagcatgttgaccattctcttggcaccatattattcacagatgattagtttatttgcagtagaaaaactgtggccagcagcttcagttaaatattttaaaaatgtatacacatacctcgtaaggccagccatcaacaacaaaaacatccaaagagtaaccatcggtagttgaaaatgcatgtgcttcttggatgttaagacccatctccgcaagcaaagaagtcaactacataatagcgtaagatcaccgtgtgattaaaagaaaaattactggttaaaacatgaagattgaactcaacaaaaccaatgtaattcaagctggcacattagcctaatatggaagatacatctatatgaaatgagtcaattcagcagacattaacaagtaaaatgttccattcactaacagaaaccaatcatgtacattgcattgataataagaaaattagggagtcacatgaagaaaacttggagtttcgcttatgtttatgcatgattagtacctgactcagtaactttggcttgtcatcagttgacaaagttatctcatgcatgggtctgcatcattaacaataaaattagaattgtattagaaatataccactgacttcataaatgaaagaagaataatttcctttaaccgatgataaaaaatcattataagcaagttaaaaatatttaggttaagtcaatggttcaattgtcaaaaataaggaagatgagtattatctgctggagtgaagggcatgcaccaaaagttattattattattattatnntttttttttttgaaaaaaataacaaacaaaacatgtaagagtttgtgtttatacatgcttttaagaactatatccacgagattccaacattgatgctgaaagagaaaggaggtaaggaatggggaaaaggagaaaggagaaaggagggcctggacctggtcaatgatcacataattaaaataaaatcttacttttgctcaaaaataataggaagactaaggtcgaaactcccagacattcaaaagaaacatgatataaaatgcagcagcagccttgaataaatttagatagatagataaaattactgatcaataaaaaaatcgaccaattctagattctaacatcaaagaagtataacaacaagatctttggccaaagagctccagtaaactaatccagttaaaacggtttagggaaagtcatacaaaaatgctcagatatacagaaacaaagaaaatcaccgagcatattgtgtgttggcatgcacagaaccttcctcatcttgatcatcggaattacttgcttcaagtgcaagtgcttcaaggtttggagatgatccaaaggcaggtggtggatgtacactgatatttgaaaaccagtaagagttgtcacaattgttgagagcaagataccagcataaattaatgcgagcaaatgaagcaaaaattactgtctatttccattcaatatcaattcaattggattggatgatttgtctaagctgcagttttaacaacttgaataacttaaaagggtatataatacctttgtctcgcagtataagaactttgcgcaacatcttcactaggcgaacctggaacgattggagaggtagaattcccatctgaaatgggaggaacctacacaaggtgaccaacacccagaccattaagcttagaaatattaaaaagggataaaatcaacactagcagctttcatctatggctaataaattttcgtattacagtgtgtttttggatcaactgacctgtacaagtcggacttcaatggcaggtctgttagcaggattatgagccaaatgcagtaatcttttatgcacaagaacgtcttcagccctctccacattcacatctaatgcatacctatccaacaaaaataacacaaacaattactatccaaaacgtaaacaaacaataaatttggcattattaccaacataactctggaacttctgccacttttgcgcttatatgaaaatactactctatactcgacaaaagtagaacagaactaataaaaacaaatctattccctaaactcaatccaaagataatggatgtattaacatcatcagacaagtaattacagtttacagatgataattaattttaaagcaagcgattacgattaaaatcattacacaactaattttccatacagatttcagatcaaccaaaacctcgttattgaaaatagtccataaaacatacagtgttttatgcagaaacatgcatagaaaacattaaaaacaaaattgaaaaaggttaaaatagagtagatagaaagccatgatagggtaaagttaccgggcaggaaggcgattaaaatgagcccaaagttcatcgtcgaaaccaggttgaatagcctcatcgttcttggaattcttgagacgacgaaggacttcattgtaaacctcgagtttctgtcgttgttgacgactcctaacaggcgacgacgacgtttcgtgtactctactcccgcagctctcgttatcatccattaccattgaagacgggaatgcaagaaagtgagagaaaaagcgagaaggtgaagatcgtatggcggtttacgtgaaatcgtttgccaaaggaaaaaaactacataaccaaccagtgagagagaggattccagagaaagagagagagagatttagagaaaattacagcccttttaaactcgaagattttattcctaagaacaaaaaatgataattttacttaaaaataaaaccaaaaattattagtatttatatatataaaatctctgggtttctttttctctttctttcctttttgctcctcatatttgtatgtaaataaatatgtttcctggtttcgaattgtttaacggcgtagtgcgcacccaatgaatcatgccaacgtggactcttaccccatactgatccaaccctcctaaattcttattcctaatctaattttgtctctctcttctttattaatatatttttttttacatttaaatttttttactgcatttaatttgggaaatctactctggtgacaccgaagattaattaaaagatgagatctcaccttctatttctgttaatatatactattttactagttgaagatagagtccgttaatatataataacaattaacaaatatgaagaatttatttttcaatagataacaaattttaatactagcttttcataaaaaaaaaaaaatcaatactagtttattttgtcgaaaataaaaattatatatataattaaaattttaaattatcagctatgtaatatttaaaaaatagctctactatttcaatcaaaatactcacaactttctttacctaaaaagcaaagttaatttagtttacttgttgcagattgtatttctctcttaaatgatttaaggaatgtttctcttatctttgttaaacgatctgcgaataagaccgccaattatttggctaagcatgcttgtttatactcaagttgtaattatagtaagggtttgtccctacggatttgcaagctattgttatagctgatttgcattaataaaattactactttttcaaaaaaagaaaaagcaaagctaatttgttcagaaaaaaaaaaaagctaagctaattaatttggattaaacttcagatataaaaatatatatctgttttgttaatagctatttaacataaaacattttttctgttttaacattacaatggtgtttttttttttttttttatatttttaaattcattgtaaatatctaaattatatctttttattaatattttttataaaaaaaaatatttttctattattatttaaaactaaaaaataaaaattatgataaactaaaaatactaaggttcatttatatgcttacagagttagtcccaaatatattaatgcatttttgtcttaatatttgtgagccacccaatcagaacttgttacacattttatgaatattattgataaaattcataaaaagtttaaaatgattcataatataagtggaaatggataaaaaaaaaatattatttattgaatatcataaaaaaaattatacaactaaaatataccccatgttgatccaaccctcctaaattcctattcctaatctagttttgtctctctcttctttattattatttatttaataatattttcttacatttaaattttttactgcattttatttggaaatttattctggtgacaccgaagattaattaaaagttaatatatactattccgttaatatctaatacaattaacaaacatgacgaatttctttttcaatagataacaaatttcagtactaatttattttgtcgaaaatataaattatataaataattagaaattgaaattatcaatatataatatttaaaaaatagctctactatttcagtcaaaatagtcacaacttcgttttcctaaaaagctaagctaattaatttggattaaacttcagaaagaaaaaataaatatatatcttaggtagttgttgtcagtagcacatgattataattattaattaaaaatttattatttaattagtttaattgatgaagataattcttaattaatcccaatgaatccgcgttttgaagaaccccacctccattttaaccaataaaacgtctctataccattcacaacattaaacttaacaattctcacaatattttacccaaccaaccaaaagagtgtaccccagggtggcattaatggcatattctggggcgcccacagattctggataagatcgtacgaaaatgacaattctacccctcattctggtgggtcagccttaagccacacagactgtgcctactcactctttttttatcacttaccgggttccgcctctggtctttttatatccacgattaagggggtggccaacaatgactccgggttgcttggagcactggtcaacttttagggtaaaagcgtaattttgtgtcttgatcgccctgaattaaaagtaaaatgtacgttgaaagagttagaacagttagagttgttcggatacttcttgtattgtagtggttgttagaaaccatttgggtgaggtagtttgggttcatgtgattaaattggactatgcaaatactctttgtggtgagacggctgctttttgcttaagtttggataccgcaaagctcaacggtcataagttcgtcatcgtaaaaagtgattttaggatcgtaatcaactcccttaactgtatttcatcgtgttgggagattgagaactaccctagctctttagatattttaatagttatattttttcttgtattttaattgcttaccttccaaaaaataatcataaggtctaattattttattaatagacgatattaaaaaaaataaaaaaaaagagttagaacagttgatagggctgcgaaaaataaaaggaaaaaaaaaccaatcatgtgagaaatgtgaggggcagaaaaggacatttgcttaaatatcttggttttcttgatgcagtcttctaaggtggagaatgaactagactgataagaaaaggaaataaaaatgaaaaaagggcaaccttataaatgttagtctcacttttctgttgtgatattattgtaattcgaccaataagtagtggcattttgggattttcactgtgttttggttttggagtttttttttggaagaattggttttggagttatggtttacttactttactgagaatctgactcagcaccatctaatatttgctttttggatcattactgaaacttggcgcaatccaatttgctgagtcaaactttttgtgtttgatgtacctttgggaccacattttttcacgtgttaaagtccaaaacccccaaagtttggaatgaaaaatacattttaagagataataattttaaatacggggtactataatgtcaactgaacaaaatgtgaaaaatctatagcaaaggttgtcatgtacagttcaagctctttcactgtagtttaaatttctttttctttcgtttttttcttttctttataacttatagttttgaaatatacactttagttagaatcgacaagatatcaccaaattaactgaaagtttccatttgaatacaatacttagagcatctttcgttgtgtgctaaattagtaataaattgctaactataacttattctagaaatatattatataatttaggggcgttgatccgattcaatctgcattattttgttcatagtctttttaatccgcattaagtgtggattttattttttgaattcaattcaatccgcat

SEQ ID NO: 36432 - DNA, 6735 bp, Cannabis sativa
gttttaaatttttggtttagggaaatttttttttgattttctaagtatagaaaatcaaatttcccttccaaaatagtaaaaataagaccttgaacttaaattttaacaacgtttttttttaatataacgaacttgaagataattcctaacatgaatagatttagaaaatgcaaacatatcataacacctttagattggattattattaaattttattttgacaaaaaattaattcaggatcctatttgtaccattttagaaaatacatggtctcttttgtcatttaacaaaacagagggtccaattgataatttttacaaaacatagggtccaaaatagtatttacccttatttttaccgtgataattgttgtcataaatttactcgcgctttatgtgctcgtccgacctgtatttattcgtgttttttaaaatacgggttgtgtcgtgtcgtgatacaaaagaatatagatagtgttgtatcgtgccaatatttctaaagagtaggcttggtattttcatgtcgtactcaaattcgtgtcatatttttctcgtgtcggtctgcatttcttatagaggccagcctatttttatatacgaacttaaattcgtaatttacttttttatatatatttttttagaattaagaacttatatgtatatttcaaaactttaattatatttatataacttttaataagtaatattttacaataatcatacaaaaaattattaatattattagaatttgaatatttttttattacactctataaataaagtataagattttttaatatatcgtgtcgtcttttttgggtttttcgtgtgtcgtctttttcagactagtctatttgtgcttacgagtcgtgcctttcgcgtttctcgtattgtgtcgtgcttaaggatacatattttttgtgtcgtgttcaagcccatatttacaacaggaaatggtggggtcttcagataatatatatatatattatacgtataaactatatatatatatatataatgagagatctggtgatctatctcattattttattaggagagaaattgttgttataattctgactaattattctcaatagtggtgtcgagttgaagagcattattattattattatttgtatatatttggtgcatatatagtgatagtgggtgacactatattcttccatcttctttaatttcatctcatcaagcctccccatcacttgtaatggggatcgaatttgacatggacacacaccaacaagttgaatacaaaaataacaacagtagttgtgttgtgtgcaatatccaaattataaagcactacaactatttcttagtcattctcatctttatttttttttttcttttcttttttgggccctttactttgccctacgtcaatgattaacatagtaattataactttacgaaatcacaaaaacataaatactacttattaagcgttgaatgtcatcatatagcaaaaattattccatacaattaaattacacatattaattgatgtatcatgttatcattacttgtacgtaaattatttgaatatatattattgtgtaattttacaatacatcccattaaaacagatattgttttggtatttaaatgaattttttaatttaattttttttatagttgtttatattataattatttaagatgatattttgtcaaattttaattaattcgaaataatttacaatatagagtctaatattcaaaccgcctatttcacatgtgtgcaacagagtttttgaacgtcgaatcctatttttagcgtgttaattttttttttttttttgaatttttaaaattttacaagatgtcttaaataactacaacttaaaaagccatagaaaaaattcagactaatttttttctatatgttaaaaacaaataataatgcatcgtacaccattttcaaagggtgtattgtagaattttcttatattatatgtatacatacataattaatatgaaaattctataatgcacccctttaaaagggatgcaccaatacacctctatttattttggtatccaaaataaattttctgtatagtatagttatttaaaacatcctataaaattttaagaaattataaaaaaaagtaatacactgaaaatagggttcaaacagtgtattgcatgcgtgactattttattttatacgcgtgtgaaatagactgtttgaacgctactcatattaaataactatatataacgtacacaaatataaaaaaaaatagactaaattttttttcaaaatgctgaaacaagtcaaatatgtacaagtgtatcgttttaagggattgcattctaaaagcaattttttaattattatttatatatttatatattataataaatacataatttaaaactctaatcctaaatttctaacctacatccattcttctataactataactataactagttgagctaggctgaagtagattttgtaagaacatccattaatatttggttaaaataataatctcattaatgaaaaccaatggctccattaaagtatatgaaaaacaatatataatatgtgggcacaaagttgataagaatcggaggcttgcactttccgcactcctattacctgacttaaaggcccaacatgtgagaaagagggaaagattctctgcttttccactcaattttttcattttaatttaatttatacattgaaaaattagttaaggtaattaaagattaaatcacaatcacaaacaagactcatgtgggttccacttgatcaacatcgtccacttagagtgggacccacaagatgaacaaccaccctattaatgttatccacatgagatttttttattttttttgggatggagctcactcggataaagaggtggcaagacaacctggacccgcacattcctctgttatcatctgttcatctttgacctttgactacccacttatatcacactaattgcagacaattcaaaacctaattaattcacatctactttctcaagtacccctcttatttttccaatatttccttttaatcactacaattctctttttttacaatttttcccaccacttctaataaaattattactattgctacaatatttagggttaatttttactttctaaacttttttaactatcatttcacttgcacgtaactttttcagtttggtaaaatcttctaaattattgaattgttagtaaatttaaaatacaatttatttttcacagttaactactaacgtaaagtgcttatatatacactcttgtacacgtgacacgtttatattaatacacttaatattattatttaaaaattataaaaaattattatatttttattttttatttttctttaattttaaaatgaattttaaaatattaatattaggtgtactaatataaacgtgttacatgtataagaatttatatacaaacaacccatattaatcgaataacacattaaatttgttaacatttcaataattaaaaaagttttatctttaaaatttaaacttaaaatggttaaaaataaataaaattataattaactttttatttagagtttttatttctaggatccatgtttgagtccgaccttgtaacatgaatgtaccaaaatgaagccaattatcatccatgaatagtaaaatatccattaggttcgagaagtgtgtacaatagagaatagacaatgctaaaaggtttctttttggtcattaaaaattaagataaaagatctaaagttctttttactattgaaatttccttatcaattttcttcttttaatataaataaaaaaaactccaagcacttttcatcttccatttttcttatatgtcttttcgaattatgataacaactgtaaagatttgttgaaacgttgaatccaattataactccactttccattttttcaattttatacctcaataaaaattaacctctccctaaaaagaaaaaagaaaaaaagagaaaattaaataattgcttaaatattattaaaaaagaaaagtacaagaaaaaggctttgtcatcctgttgatcactcttatttcttggggtcatcaactttgaaaagattacatgttaaagattgagatcttagcacttttaattaaaaatggttggtctttccattcaattacgatgttagatttgatttgccatcataatgttaaattaagcaaatatgtatatataatgacataacattatttttcgagagcattactttacatgagataattgagaagactggatcttaatcatttaattgttacttaattcactaacgatatagtactttcttaatttgacacatttataaaagaaaatacatgtcgaacaacactcagaagaagaaaaagagatcaaatacaacactactagctagctagtaggacaacaagaacaagccaatgctagttgatataggagaataatgtataggtgagactttttgacacaacacgaaactgatatgagttggagacacataaacacgacccaacacaaaaaaatatgtgcttaagcacgacacggcacgatacgaaaaaatatgagttcaagcacgacacgacataaaaaatataaacttagacacagcacgatacaaagagcttaagcacgatattgcacgacaagcctaaaagcacatgtaagcacgaatagaattagttcgaaaacacaacacattaaaatgtctaataatttaattataataacaataataaatatttatttattaattaaaatatttgtaatattcactataattattataattattttttatataattgcatgtaattattattgaaaaaaaaaataattaaaattataaaatacacatatatttaagtatttagttcatcaattataataaaaaattaaaatatagagtatgaatttgagtccgtataaaaaatagattgatctatttaagaataacaggtcggtttgaataaaatactacacgaatccgagcacatacgaaattatcgaacttgcttattgtatcgagcctaccctataaaattattgtatgatacggtatgacccatatttttttatagcacgacataattcatatatttcatggcaacgtctggcacaacttatattttttatggcacaatttatattttttcatggtctaatatgacacgacaaatattttaaaaaatacaaaaaatataaattgagttagcacgatacgcacgtatttatagctaataggaccttgagttaccaaataggcaaatagaattacaaggtgactacggtttgtttattaatgaaataacattgcttttgttcttacatttgtatttagaagtttttttatttttatattttaaaataatttttttaatgtatttttacgaaattttatatagaaactcttataacaactaatgaagtaacttaaattacaactaaaatttacatagcaacacacatataaattattggagaaacggccggaatacaactaaaaccgtaaatttaaaaaaaaaaataaaaaacagtttataaagtaatttcccttttatttttaatacttatcgaaataatataattcaaacatttttaaattataaatatttaaattccaaaatataaaacatttttttgtaggatactcctaattatatttaggaaaaaaagataacttggggtgcaaaatttatgaataaaaatggaaacaataaatagaaaaggggcaaacttcaaatacatgaaataaagaaagggtataattgcaaaagaatgaaatgatggtgaatgaatgtgtctctaaatagtgatggccagcgagtgtagcataacattataacaaacccttgacgtaaataggagtgaagaaagaattggtttggtgggacccaaaatctctcagtcgcacaatttggttttgaccagagactcccttctggaccattacccaaccagggttaggttttcaaagttaagaaaaaaaaaaaaacaaatataattaaatgggcaccacacgtgtggtcatttgagtcagatcaaagggcagaaggaagaggaggcaaagaagcactgaactgcaccagcagagatatagtccttgttttagcccaaaacttttttgggttattatatcattacattacatgtctctatgttcttattattattattattattatttcatataagaatagccaaagggaattttgcagactctctcagaaacaaagagagttttgctaaattgacttcaactcacttttatcttctttccctcttccccaccattattattaataccaataccattactattactatgccgggcagtttagagccgttagatttgggggttcagataccgtaccatttcaggtgtcccatttcacttgagcttatgtgtgacccggtaactgtcagtaccggtcagacctacgaccgtgccagtatcgagtcttgggttgccaccggcaataccacgtgtccagtcacccgatccccactcaccgatttcactctcatccctaaccatacactccgaaggctcatccaggaatggtgcgtcgccaatcgatcgttcggcgtccagcgaattccgacccctaagcaaccggctgaccctgctatggttcgttcgctcctctctcaggcctcctcgatgacgattgctcctcagtcgcggctctctgcgctgaggcgact

SEQ ID NO: 36433 - DNA, 4144 bp, Cannabis sativa
aaatagatgaaaaataaaaacataattaacagtctaataatcgaattataagaatatgaatccacattctcatagtaaatatttatatgttaatgcccataaactaaatttcaggtaacttttgttaaatatgccctttactagtaacttaaatccacgtacataaattattttaaaaaataaatatattgtaattaaagggaaatatttataacaatttgtatagttgaaaaaattttacaacaaaaaagagttctaaatagcaaaaattttatttattctaaaaaaaagtaataataaatacaacacagaaataaaaaataatattttagatttatttaaaatttctagaaaagaatatatattattacctaacattaagaatcaccataaagaatatatatattatgaaactacaaggtgtataactctctagtgtaccaatttatataatcaaacataagaagaatacagatcaattaacacaatcataaaaaaaaaagaaagaaagatcttatctgcatctgattacaagaatattaacaaaaaccaccaacaaatcacactaactgcaattacaaaatatattaattaaaaataaaaaataaaaaaaggagaccaaaagcccaataaaactacctatacaacaatcacactttcactcaagaaacctgacaaaaggttagtagtagtagtagtagtactgtagtaatagtagtcatcaatcaccttccttctctttcttttttaccccacttttctttgctgaactccctatagcagcaaaccaagtgggataaaaatatatatttatataacacataacttctaagtcagaagaagcataccgactttcttgcgcagatgttgctatcctttcgattttgattttgttttttttttttttaataaagtttgaatgcagcaggatcatcggcacgccgaggtggtgggggggctacaatcttatcattcatcataagaaacaaaaaagaagaggtaaagacaatagaaatggaatgtgaaacgaggggcgcctatccggatttacttcttatctgctgattctgctgctgttgttgcatgtaggacttgttattgggtgctacgtgttaatcctcctcgccccatacttctgcaaaggtacgaatgttaaacgtgtttaataatgaaatgactcgactcgataaggattcttggagcaaatgtaccttccagcaagcagtgtgctgttgacagagggtttcgggttaccaaatcttttggctctatgttcatggtctttctcaacgcgcatggcagctacctccttctccatagcagcaacttctcgtctcatcttctttgcttcaacctccattgctttggttaatgtatctaccttcttagctaacatctaaatgacagaagaataaattttgatttagcccgagtggacgattaaaatcacaagacagaaaaaaggaaaagatacaaaagatagtagatactgacctcaatagcatcgtccttatctttaaggctttgatctttttcatgaccagattttctcaaagctacaacctctttctgcagcaaatcatataaaatgcccgggacactatcctcagactctactgatgggaactctgttggcttatcatctgaagttcctttccaggcattaggtgattcgctatccttggtagcatcacatgactggttgaatgagaaactgggaccaccattcgaaaggactttacccctgtccaatgatcttgtaccgccgtcgaatgattttgaagtccctttagcatgcttcagcacagaactagtactagacgataaggatctcaaacttggtgttctcttcgataaaaacccatttgaagttaattttgacatattatcagctccaccgatggactgacggcgagaagagccattacttgcactccttccatcagctgaaccaattttgctactgttagaagttcctcgcaaactctcctcgagcactttcagtcgcaaatggaacttttcctggagaaaaacaaccatgttttagccaatttaacaatcaagataaatatataccacaaaataaacatgaaccaggacattactttcaattgagcttcagacttggcagctcgctcagctacagtaagcttgtccctaagattttgcatttcaccctgcagaaacagagtttggcaatttcagaattgaagtgcaagctaaaatgtaactgtcaagagaacattaagtactgcaactaaaagaattagaaattagaagggatatttacctgcaagaatcttcgttcttccagccattgttttacaggcatcactttatcattagcatccttccattcatttgctaccactacagctactctatttgctgttaccttggctcgagccagctctcggtcaagagttttccgttcctcctgaaaacatacagataaacttgtaaattgaagcctccactacggtataaatgtaggcaaaaaataatccatttaatagaaaggactagaaatatgctaacattcatctcttgaactttccgctgataatccctcacagcatttgcagctgcaccaccagcaagaacggcctcttccaactcccttacagtctgtgtaagcttttcaacttctgctaccttttgtctatgcattttatctagaattttattctcttcctgataaccacaagcaaaaaaatatcaaactctgtccaattgtcacacagtcaggaaagtatccatccactgtcttaagtactaatgtagaaatcaaaactgtgatcttgatttggctcacctgacaaatttctatttgtttcatcaactcttggtttttattttggagatcatccaccatggaggccttagccaacgcaacctgaacagtcctctcagcttcaagtaaagctgcttcttttgattttgtaagacgatccaaagctttgttatcatcttgaagctttgcaatctgcaagcaacaaaggatggcatcggttcagcccaatagttgccttctttttctctattattacctccttaatattgagtcataattattgtttaagaatatataagtacctcctgccgagccagcttgagctcagcttccagaggtgcaagaatggcctcaattggaggcatatcatcatccttttgagcagcatgaacccttcgaagagtagcttcagcagcaaactgtgctgccatggaagctttcttctcatcgttgatcttctttatctctagattctgcatatcatctttaattagttcaactaaatcaagttattcaagagcgaaaaattgaaaaacataaagaaccaaatttttagtagttgatagaggcctgcaatattactttgctttctagaagtgattctgttagcttcagcttctcatccaccttagacagttcgtctgtgagctacattagtcaaaagacagaaatttgaaagtcagcaactatcttgactacagagataaatcaagaataatgttcgagacaagagtaacagaataatgtccaacattctaaacaatgatagaatcaattactaaaacacaataatcacttctgagttggtgttaggcaatgcagtagctaaagatccttttctttattaacttgtaaagcagtaaacatatcaacataggaggaacaacaaagtaactgaaagtcatgtagacagtgagcacaagccccaaggagcatcatcgaaagaagctgaaaatttctataaaatgcaataaacaagacacaataatagaatttaatacatgctaagtaatccttaatattagaatttcattaattgaattattagcagttcccttattagttgaacaattaaaatcagctaacaaataccatcaaaactaacaggttcttaataactttcggaaaactgaataacatgataagactgactaaagacgaagaaaacccaattgaaaatattaatgtccgaattaaaacagtgttccataaatagatagagataactcatcatcaacatttaaatttttgtaggaaacaatcatgatgctctaaacaacatgaggaagataagcaaatcccaaagctaaaaattggtgtcactgcccgtcctacacacacgcttggttt

SEQ ID NO: 36434 - DNA, 5135 bp, Cannabis sativa
gtgcggtgaatagaaatacaacaataataccatcactaactaggcctataattacggtcacgcaatgcatggaaaaagattaacagaatattttcttgacaaataattataacacccttcatcaaccaaaattgagcttatccttgttcagaagccaaaccagatgatggggttaacaccttttttacattataaaggggtttcaagatgatacatggattggaaaaatggcccttgacaatcagatactcaaatttttacagaacagtaaactaagtaaatacacaacagtacaattaaatgtgcaccgttagttttgtaacaagctattgacgtgtactccttaaacatatagtagatttgcattttagactagcatgtttgctccctctaaatttaatgtactaattttgtaaattcaaggacctaatgcttaattatgctaaagaatttattgaccactttgctaacttatgacaaattcagaagtatgccataaaaaaaaggtgtggttattagtagcctatgtataggttaagaagaaatcacaagttgggaatagcatacattacaaacttattagaggccttcgcactgactgttccacaacaagctttatacttctttttcgaaccacatggacagagctggtttctagagatcttctgcagtatgtaagataaatgtaaatgagtagacaacagatacaagcttaagatagagggaaaaaaaattctcattcacataattgaataaccttatcatctggtagggaactaatgttttcatgagcaagattattgctactgctagccacatcctgtctatacgtcttctccacttctattgcttgtttatcttcacccctgtcatcaccgctagacataaataaatgaagagaggttgataaaaccatttgaataaagattttctatgagaatacaaagaaagttcgcatttttcaataattttttgcatagatagaattgagacaccgcatactaaaatgaaaaaaaataaaataatgccaaatttttaaatattgtcattggtttaaattttttcaagaaaaatcataacatgtactcatctcattttgtgtgacttttttcaacgaaattcttaaatgtagaaaataacaataaatgaagcctgattcaaaatgtgatacagaacaacaggggaaagaataaaagatcatcaagaccccaaaacaaatattatcttccttacaccattgttctttctcatattactcaatcctcatgcacacgagaccttttttttccctttcagattcaagcattaaattaaaaataaaacacgaaagcatttaattctcaagcttcataccaaaatcatgtttccttcctggacattctagactgatcagatagataaagtgctttcactagttccaacttgctaactactcttagaatgggaaataaatatgtgaaccactcttaagaaaattatgtaagataaaaacatacagaccagccattacaaggagaattatctgcagcattggaaagtgaatcaggtcgcactgaacactcttctgttccttgttctgctaccaaaaactctatggcagcatccacatcaccatctacctgtagtaaaacctgatgtaaaaccatcttctgtttagaacacctcaaagttccacatattcacctcatgtcagaaagctggttataaatgaaatcaacaatagacatgaaggaataatgtacaccattcacatgaatatatataaatacattgatacaccaatatacggttttatgtatataaggcgacaatatatcacctcttcaactttttcagcattagcacaacctgttccagcaataaccaatttgatggatccagcatctataatgttcctgccagctccccctttccacttgttctccgcagcttttgtttgatcagatttcttggtaagatcagcatcaacctttaacaaactagaactcattaagcccttgctactattaaaatattctaaatgcatggattatccacattaaaaagaaatcatggaagaggggataatgcatatgaggagaaaacaatgtaaaaccttaattgtgataggtctagctggtccctcacaggaatcttccttcgatcgcacgctattgtaatgctcaccatcatgatatgatctgaggaaacaattcaaagatcaatatgcagagcttgaacaccatagacatttatgatattatgaaaagcaacaatgtctccctacagtccctagctcaagcccatgatatcaaagcaatttgttgatcctcaaacatataacccaaaaacaatttagttccacaagcacccaaagtcatctaaaagatccttaggtagcattgattaagatttcatataaaatcctaacatttcatatcctctccttaatatagatatgaaaggtaaaaaagaacagtaaaatcatgttagttatagagtacatacaaatgaaccatatgaaaacattgatcttcaaagttccttatgtaccagcgaggcgacatactctgtattaaataaaacaatgatcttcattaaataatttgttatgtaacagcaagggaacatgctctgcaataaataaataatttgtatgacatgagatttttatgatttttttttttaatttgagagtttataacaagatatgagtaagacataagaaacttcccgacaacaaaaataaaataaaataaaagtcagattgccctggaatatagcacaaagtaaatcaggaaagaaaaaaaaaatactccaacatacagtacattaactaacaataaaaaaagcagaaaccaagaaaaatcttatccaacaaggataccaatatagacagtacatacaaggctttcatgacgcatatttgagagattcagaatagtgagaagcatctagataaatgtaagaggaaacaaacataaactacagtatattaatcaccctgtgaatgcatatgttactgcgtgttacaagagaagcagcttgcaattccatatgtccagcccaagtaccatccttctccatgtttaggcagtagtcgtcaaatgggacctcatcctcaataaatggctcaaacatttctcgattcctctgttgattgtaactccaacattagacacctattctagattttaaaaaataaatcttttctcttccgaaagttcttagattcatgtaccaaaatatattgtaccaccatactgcgatatttcgcatgctcctcttcattgccttctagttgatcagcaagagctctgcaaattataaggattgaacaagcttatacatgcggttcattggctagtagtacaaccacgtggggaacatttttgatgaaataaacacttaactaatgacatacatctgtcattctgcatatactaaattaatttaataatttacttttaacattaaaaattatactaaaagtatccacataacgccattaccccagtattcacaataaagtcatcatttaaatgcttacctgaagaaacaattaccatctgcagtcacttgaattatttttaggcccaacacatcaagttgtgcacgaaactgtgaaatatccacttgtttgccctgctttttgatctgtcaaccaaaacagttttctataagctgattatcaaaacatctaactggtttccattataaatcattccaaattttgctctaagataattcctatggcaaaactttggtaacttgatgaaaaaatcgcctcatcatgatcgatggtatcacttttaattcttttaagatggttttaatcatcctcgaaagaataaagcaaaggtcgtgatgatatatttataaagactacacaatttactctatcaaggatcacagctagtttgtgtcttcagttctatctaacacaacatatcagttggctataaaatctctcaaggcattcactaaagcatccaaccaaatctaatttgaaaaggatgataactaaatataatacaaaactatctaaaatgataaaatatatgatgtatctacccaaatttcctcctccatattaatcctcaataatcgctcttcatttccacaacagaaccaactcatatccacaactttgtaataccttgattgcccaacaatatgcttaaagcaaagcgggccacatctttgttcgcaaaatttcacaccaagaaaactccatacacataacttacttcgaaaagtccaaccccatctcattcctagaccagcccagcactaccagagaaactgttccaactaaggtattaccatgccccatcttgaacaatgtatattccaaagtcacacaagcatacatagtgtgcatctttttttttttttttataacaggaaaaccctatacacccgtaagtcaaaatttcatctcattcctagaccaactcaacaacttctttaaactgcttcaaataaagtactactaggctttctaggccctaactatatcataccacaaagtccaaaatcctactagcacaacttctatcaccatgttccacgtctcgccaatatctgccatatgaaattcaggcttgaaatttttttctgtatccacaattaatcaattacatgaaagtaaccatttccacaacccaactctaattgcatcgatccaattagaaatccaaaatcttaagagcagagtaaaaaaatcaaaaggaaaattagtatacattaaactcataagaaggaacaattcttttcgtacgatcaaaaccataaacatttaataagaacatgaatggactggagaagagaagagaagagaagagcgagagagagacttacgtgagtttgcctcttgggtttggacttttgatgcttcgtcttaaccatttcaaagtatccacagtcgtcgtcttcggcaacagccctgttagttccacactttcagtttcagttaggttcttgctttgccgagacaaaacagaaaggagctttttttttttcttttacattaatggagttaatttttcaaatgccacttaaaaggcccatataaaagtttagaaaattctacaatgcacttctttaaaatggatatattgatgcacccctatctgttttagcattcgaaataa

SEQ ID NO: 36435 - DNA, 4194 bp, Cannabis sativa
atataatgaaatttccctattgtaatacagagactgatattctcaaatctcaatagacaaaaccatcaattagctagtctatattatttcaacgtatttgtgtgattgtccttaatattaatatacatttatgctccaaaatatccattatgtacattattataatacaatataacatcctggactggaactgaaacataaatacactaactatattatcagatactttaaacaaaaattgacataaagtatagagtgtgtttataaagctatgatgaatgtacagatacggatttctaattttaaattttttacatgatattatactttttatattctaatttttaggacatctactaattttcaagagattcaaactgattcataacagtataaaataaaataaatatattgtgtacaatattattattcgaatggaatttacgtggtataatttgtgaggtaatttcttaacatcttataattatattaataattattaagaatttatggcaataagtaataacaatgggaagtgaaaaaatgaagcaatgttggcgtcatacaacaacacctaggaaaactcctaatccaagtcaattagtcaggctagtcctggctcctcctatgagttacttgcagaaagaaacccagaaagaatctctataatttgatcttctgtaaaaatttcttctcttcaagttacctctatttaaaaataataattaaataaagttacaattacagaagtattaaatttaaattcaacaaaacccctaaatttctctataaattttactgaaacgatgaaactaagaaaatgaaaaaggggctctcactcactcagtgagatttggtgcattaaattcttctttctctctctcaatgaattaagtacctttgatgacgtgtgcattgggaacccaccactctaaaataatattattgtttaaatatataaaaattattttataaaataaaataaaataaatgtgggcctctcgaggcaaaagaaggcccaggtgatacccactgacacacccatctgcgaacccactttttcccaaacccattataaatactaatctaattctcccacacacttcactactccgaactaatcttttgatttcctctgaaaagtctgatctgaaccaccaaaagcttaatcagtgccatccatggcttccgtctctgtaacaaatattaacagcggtgcttgttctgtatctggttctgctccaattagtgctccaccgcctttttacttcgacgaaaaatggaagctctccaagaaagaaagcttgtccagaagccgatcttcatcttcatgtccacttgtcaagaattccaattcttctcatagaagatgctcttttaccaggaagtgtgctcgcttagtcaaggaacaaagggctcgtttctacattatgaggcgatgcgttaccatgcttatttgctggagagattacagcgattcctgaacaattttcccaacaaaacgagcgacaaaccataaaagaatgtcctctttttttttttcatgtgagatctttttgggggttttgcttaagaacccagttctttttttagctttctttttttctcgttgtctaaatcaggaaaatcatgaagtagtaggaggaagagatatttatacttgtatataaaaatatttttcatttctttttaatttctattaagctttagaatttttttttatctgggtgaatgatgttatttctctgttaaatttaatatgagactagtgtttagaatcccaaaatattttaatggcaatagatatggaaatttatgtagatattatcactcattttctgatctctgcttttttttttctttcctttactgtaatcttgatcgtgattgaagtggggtgtttttttttcatttaagtttgaataaattctgaagtaagaagagaaaaaaaaatgattccatctcaggctttcagccattgttggttgcagagctctgatgggaaattgtggatctggtgagtttggatagctgacgtagattttcatttctttaattgcttttctttttcagtattttattttattttattaatttcgataatggttgtttgtttacgattaattaattaattaatttatttatataaaaagaatagtctaagtctcagtagaagatggctcaacgtggagagagagggggcctaggctctgtcgtatttaatttattttgttgttctttaataaatattaaatttaatgtcaaaaaattcacgttaaggagaaaaaaaaaacaaaattggagagagcaaaaggacgaaaggaccccacgaattccacatgaatgctgtcacttcttctactactactactattctagggtaattggggctctggctccaatgtccctctcttgtaatccaaatgaccattttgtcctgcattgtgtactctttgaccatgttaggaccactttgacctcttatccagttgcagggtaatattgaactttctcaatcttttttatgtttgatcaaaaaaacaaatcatttgattctaaaatcatgtgaaagggcaatttcgtcacggtaattttacagcttgtttctgctcataatttaaaactgtgggctcgtggtgtatagcgtcgtcgtgtatctgacaatacgaacataataaaaaataaataaataatagaaattggaaaataacgtagctcagaaataattatttaaaaataaaagccaaactcaaatgtttgtattttaggttgaatttaacatacattataggtttataagtaggtactaataataatattaatcataatatgaaacttgtgagtggaaattcattctacttgtttttccctataattgtatcagatatcaaattgacattttatattaaggagtttatgaaagacaaatatcgagatttcttcttttaaaatcatttcacgagtttttgttgggtttttctttcttgaataaaataagataaacttacttgtttttgaaagaaaaataagataaatttctaagtacaagcgttgggaatggcttgtggggacggtcactgacaaatgcagcataagaaggagcacttgggctcacacactaaaaaagccctttctagaattcacaaattttacataacactacaactataaccttttttttaattgtattttttaaaaaaaaaataatggaaaacacttaaaccatattgaatttacagcagaaaaacaactttttaatttgattaagcaaaaaaaaaaaaaaattacattaatataattaactgcctacattaacttttccactctaggaactcatattattatctcaatttaatcaagatttccctttagaaactttcaatccgaaatcatgtaaagtaaagccaatttaatttactttgttgtgtttttttcaagttacattgatgtaatatttcggtggaaattatggagagaaagacgacagtgcacgaagaattttcgtttccatataaaatatttcaaatataataaataattttggagtaaaagtgctttttcttgccaaaatatataataaataatgtataggttctcataattatactttgctttgatagtgttcttttctttggttcccattttgatttgggtgatttttattcaaaggtcaaagagaaaaacaatttgcttttcgtcaagatcgcctagtcttttgtttttggcactttttagaggcaatcaaaggaacatgatcaacaagaatagagcatttgttagaacgttaatcattggaatttcgcttggcgtgccaaatgggtacttagaaaatacaaaaaataatactaaacaaaagtcccatcttccaactttgatgtagtgttatccataccaccaagattcaacgatgaaaaaagtaaacacaaaatcttcccaccatatctctctctagttcacttttattcggataatgggaaaatctcaagtagatttttttaccttcacttaaacgaataattaggaccctactaatcatttcaccttcaaaattttcatttaggaacctgaaagatttatgtctttatctatgtatgtatattgttgttttttttttagagaaatactaaaaatattagtgatgcttagcacttttttaaatgttatattattgttggtataattaagtaaataatc

SEQ ID NO: 36436 - DNA, 6319 bp, Cannabis sativa
gattggattggatccaaaaaatgaaatccgcacttagtgcggatcggatgaactatgaacaaaatagtgtggattggattggatgaacacccctatgtgtgcctgataggcctatttaaataagaaatacaatgaaatggatagctcagtgtagtttcttatgatgtgcacagccgaaccatctcaaacaatcattagttaagttttcatgtaattaagttcaaaagccattgtgcttatgaagatacggatcgactagcacactccattatgaaataatatatcataaaagccttgtcattgtcatgagtcaccggaaaactagtaagtagtaactacttaccttgctttactaataagttgagagaatgtaagggattttctcttacatttatctatttactttataaaaattaacaaagaaaaaactttgttaaatatggaataaaaaaaacactattttttaagaaatatcattaaaaagtaataatttttattttatttaatatacaatgacaattttatcttttaaaagtaataattaccataaatagtttaactataaaaaataatttaatcaatttatttattctaattacgtttctttaataaagtaaagaagataaattattaatattttatttccaaataattttaataaacaacatattataaatattgattctgattattttttatttatttcgttaaatttattttgatttcgaatactgtatataaacatgctattattgtgttaaatttctaattgtttgacagcattgccaatgatggtgttgtaaatagatttttttttctttcctatttcctattgtcaaaagtgggaacgaggaaggaacagggtgagataaagatgtagtagtggtgaataaatttgctggagtaattatttttgaaatgacttgaccagccaccagaacaaactgattccaacaagagcttgttataagcgttctcaaaacaaagttaccctcatcaacagaaattctttacaaaactgtgaccatagttttccttctctcttttctttttgatgtgttaaaaacttgctttcacatgagaggtacagaaattagagagctaaagtgatttgcttttaaaaagatatttcacaatgtgaacaataggcactggtcgaatgttgaaataggtagcacatgtaagatatgcacatactaaagaggcataaagtttaaaccagattgaggagtaaaaagtacagtacgtacatatgctggtcaagacagctaccgccccaaaattaattaggcactttgcagtagagagatcctgttctgttccttcattggggaagtgaccttgagaatgaaaatcagatagcaactgatccttgagatggaatgtgttgattaaccatgtattgacctcgttttctgaagttgggatactgtcaacagagacgcgtcgaacatggatatgaacttcgtcaggagccactccgtagacattgtccataaatgttgggcagtcatgtttgtatgcaatagctatatcataaactgcagtaataaaaatacataaatattaccttatgttatggaagacaagctaaatattagatcaaaacatgagacaagttacaagttcctgcactgatgtggtgatgacaaactcaaaatgacttcataaatctgaaaaggtttagcaaaataatcagggagctatgacttgattgtagtgaaagtataagaggtcatgggaattgactcaaaaaaattcggagatatggacaacaaaataagtttctttaaaatgttcaaatgataaaagaaggaacatgcaatgcatggagttagcaacattctctaaggagctatgaaaacctgcatcaatagatcctcttaatccttccaagcaggtaaagaaaccctttgtttttggaattagcacattattaaggatcggcaggccattctctgcagcatatttctgactacgaatgcacttctgctcactgaaaaaatgaaagaaaaaggggccaagtaaataacatcaacagctttacaaactgggatctataacaatattaatatcgtacacgtgctatgtttggtcaaagtaagatagagattattgtatgtcctcatacttcacaagctacactaaaatattctgttttacactattattagtatttatttgttttgaataaatgattattattattatttcaactagttttcagtaaaataatcccagaaacacaaattctgttgggaattaataactactcagagtatgtgtctatacataggagggaccttcatatgaaacaattttagtatagatggaaaatacaagaagaaagaaataagaagagagaatgcagcaaaagaaattacgagtaatctgtgccttctgggaaaagagcaagccagagaggatccttgggatccttaaaagttgaaagcatttggtgcatgatagattcatcaacctcccatttcctcacaaccgggatgaactccaatatttggaatgaccaaccaaataaaggtagcttcatcaaactgcttttcagaacatactttatgtatccgactcttccctttcgcaatgccaggtcccacaagtacatccaatccacttctgttctatggttagcaataagcaaaacacgctcatttgcaggaagagtttctccagaaaagatgactttagtcttgtttatcttttcaaaaaggaaaggccacaaagctagccaagcaccaaagaagaaggatgttacttttctgctataatatatgcttacaaatcggatcataacagcacccacaaagccacaatacactaacatcatgaatgctgttaaaataagaacaagtaaacaaagcagacccctaaccattctaagaagagttaaactggaacgaccagttccatcatttgtgggcctttgaaactccatttgcactaaaccagtaaaatctcaatcacaaatacaggtcataggtagctatactgcattttcgtatctcaatgacttgataattattagaggatgataagacttgaccaaaatgttcacacacacaagctcgtctccacacaaatggaacagagttgaatttgagataactgagactacgagatctaatggaaactacaatgaataggcacaatcaaatgctaggaaaatatggaaagggtatgcaactgcatataacaacaaatgtatctcacaaagtcatcataatcataaatgctggagtcctgatgatgcttcagtgttcctatcctatatcctgcatgaagaattttataatgagattcaacaatgtcatttgtgatgaaacatgaatgcaaaaacgaatcaatacacatttaaaagtgaacagaaaaagatcatggagcaaaatactagagaatcttaatgatcagaaccccaagatgcttcacaatttctagctctatcgtacccaaataaaagccaaacctcaatgtctgagtattttcttattgctagtctaacagcaattattttttcaaaattagaatagctggactaaaattaagctattgtactcaccaatttcagtacatttcattaactttctagtcattacatcgtaacagatacaaactcgaaccaaaagtagtcttaaagcgcaatcaatctaatctcaaatgaatccacaataaactgtttcgaagatttcatacatagaattaatcactccactaaataccaaactcaaaataacgcacaatcccaaaatgggtaacgcacttaacatcttgatttgtgctaaatctaactctatcatagcaccacaaaaagtaagaagtgctaagtacaccattgacatacaccaatgaaacatgggatctgaatcccatttcatcttaagctaatgaaagacctggaaaacccagaagtcaattcttaaatcatttccaaaacaagtagaaggaaggtaccaggtgagtagttagagaaggagatggagattgaagatttcgaaagcttgcagattggtcaatggtaatggagcttctgggcaagcaaagagaggacaaaactaaggaaaataggttaaggctttgctgtttgtgataatccaaagattgtagctttgacaatatggtattgtacggacaaaataatggcggaaaatagactagtctcactctcactccctctcgcacactataccacaatatatgtagttttttagcggatggactaaaagaaggctcactcaaattaccgactttgtcgaatttgagatgagagagactagtgcgatgacacctataactgtagaataatcatataagaatataatcgggacaactaaattatattttaactagagaactaacccgactcttcgtgctgtattattaaatttttgtaattttttatatatataagcactgactggtgatgtacttttacggaatgtatttcgtaagatattagatgaatttcaagatacgttactattttttaaccctaattactcctagattaaccccaacactcagatcaaataactctctcatctaacagctgtcgtacatcatgaaatacattccgtgaaaatacatcacgcgacaaaatcgtgtccccatatatattataatttctagtgagtgatataatttaaaatataatatatttttatgtatatattataaataaattaatagtattaaatttaaaaacattgttatttttaaaatatataaaaaaatataatttttgtaataaatattatcattataattattaaaaaaatatgattattatgatatttttttagtattttttattttagaaatgcataatttaagtagttgttaatatatataagtaaaatattataaatcatgatcatttactattttttaatgaaaatataataatttgttaattcctattctatcaacttaattttttttgttatttcatttaattattattagatgttaatttttttttttttttgaaaggagatgttattaataagaaagataattaattaaaactcacatgaatatttgaaaagaaagaagaagaaagccttgattaagaagcctaaactttttttttcttcaaatggtacagctataaaccaaaacatatataagtaaaatatataaatttacaataagcatatccatactttcagtagtttcatggcaataatttttcattaaaaaactaacttgatcaacattaagctcctcagtgacgaagtctacgccctcgaccaggacattgccatccgcgtctactggctccctagcctcgttgtatcccccaaagtttgggggtgcggcctcctcctcttcctccgcctcggaaggactaccaggatggacatcatcctgttcctctatctcctgtacttcagcgtccccttcgtgatccccctcctcctggacgggcggatcctgttcggcgctaggtaaggtggcgtgctgggccacatgagggtcagacgcgttgactttacacattgtctgtttagtgcgagccatcatcctgtggctggacgggaagagtgatttaagatgtccgtcgcttgaagagggcggactagaacaaagacgatggtgatcctcgtacaagagttgaagcaaatcctggtcgattcggtgttcacttctccaaaattcacctgggttcatctataaaagacaacacgcgagatgagtgtttggtcgggatatcgtacagtaaacaggcaaatatgccgactaggagtactcaacagattaaagaatataaatattcgacgaaaagtcaaaactcagaagttcgaaattttcgagagttagagtaaaaatttcacgaagctttgaataagcaaggtaaaagacagacattgtgcagtcagaaagcaagcatcatgcatagtgaagtcgcataaatcattgcaaagaaaaatcccagagttcctgaaccaagggttttctacctatcttctacagcaaggttaagattgcatttagaaattaaatgtgcaaagtaaacgtagaaggaatcgaaaacttactcactgatcgacgtctggattcactctaagcgaagctgcttgaatggttcttgtgaaagtctcgcggcaaactcgaagtgaaaattttctcttttttgctctgaacttgcttaacagagaagattggtgaaaatgagtttgtgaacaatgctccatcatatttataggaaaaacagcgaaaaggggtaatcatttcaaaagcctcagacgcctcggttccccccaaaagtgaatattggaaatcaaaagtaatcaagtgtaaccgtcaa

SEQ ID NO: 36437 - DNA, 6982 bp, Cannabis sativa
  modified_base (5478)..(5488): a, c, t, g, unknown or other
cacttggacaaattttaaaagacagtccatggagaactagaggaagtccaggcctgtaacgtaggacaacattctcgaaactaatacctcctaatgatggccatgttggtggtggttggttgttctcgattatatctggtgcctcgtgttgcaaatcaatataagtcccagctcgctctacagcatttaaactattttcagctctactagctactctcagtaaattactaagaaggtttgtgatatttagagtatagctgagaagtaagcccattactgatgccaattcagcttggttttctgctcttccattctgcaaaacagcaaagcttgctgtgaaccaaatcattatacctcctaatgtttccaatcttaagtagagccagctaagtgaattcagttgtgctagagtgaatcttgtattgttgtccacaaactttccatttacataggcgattcgctcataaactttgtatgcacgaatagttgacaaaccatttaatgcctctttaaattgtgcataaactggagattttgtaatggaatccaagcgcttcagttcacgagctgtgctctgcagaaaaatcgtttggtttcaggagattcttgtgagaagaaagtgtggaaagtgaatatgtgatacaatgccaagcatacctgatagtacaaatagaccatatagaacaaaatcattaggggcatgatggcccagagagatattgtgctcacaactcctatcagtgcaaaagttgaaagaagcagccatatctgactcagaaatgatttcatatgatttgcaatactttgatctatacccataatatctttcgaaaacctattgattattcgtccagttggattagagtgaaagaaaagcattggagctctcaatatggaatgtaacatagtattgtgcaatcttttggctgcatgaagactacatatgatcactaaaattgagtttgacagtgtcatagtcacctgttacagttaaaccatgttgattatattataagctaaatgaaatttctgttaagtatgtgcatcaatgattcacccacctggccaaatgaaataagtgcataaatgtaaatatagaattcaggtttataacttcttgatttgctttgatctgtccacaaacttagccatgtgctacttgaaactcgaagaacttccattaataaatagaaaattaagaccaaaatcagcacccaatatcctcctagtgcatttgtgtacctgaaaatagagccataatcaagtattgcaaaatacaaaaatattgaataattccacttagtaaggtgagggcgatcctcccctaacaagtcaattttgttaagttgaattattgtatcagagggagcctaattttgcaaaggggtgtccctaatatcgatttgttcacagttatttggtatggtccatgccatgcctgaaggggcatattaaagtctcgcgttagttggtgatatatactcgatccacttgataaggtgaggacaatcctctcctaacaaaccatattacctcatcaatacattccaactgacaacgccagtctcccgttcctcttgcttgattagaacagcctcatcaatattctctttctttgaattgcttgcatcagaaaataatccatttaatactccattaggatctggaactgctatattctgataacaaatttcattattgtccactttttcttctgctttacatgcattttccattagtttttggaacatctttccatcttttgtcagctcttcataggttccttcctccataatcgtaccgtcacaaactagaacgattctatccacatgtggaagaaaatgtagctggtttgtgaccaataacctggttttcccttgtaattcctgcttgatacacttattaaaaacctggagaggaaagtgacttacataagtagaaatactaattctacacatacatttcacttacaaaaaattaccatatgactgaaatagcaacaatgataaacttcttagctgaataagtgagtacctgtctaccaacatgagcatctagagcacttaaagggtcatcaaacatgtatacatctgcattggaatacacagctctagctattgaaatcctttgcttttgtccaccactgatattcactcctcgttcacctatctctgttagatcgcgtgcctgaaattaacaacaaaaaagtatttttagtcaactattagaacattccatgttaatcagcattaccaataattgcttatgtaaaactttgtaaagtacactcaactggaagtgaatcaagatcaagatgtaactcagcaatgtcaatagccttccaatatcttgcatgttcgaattcagatccaaataatatattatcgcgcacctaaaagaatagtcctagaaattagtacaccgatcacatggcaataaggaaaagttcccaatcactcaaaatgttcgaaaatcaactcacagatgcattgaaaatccatgaaatttgaggaacataagctacattccctcttattacaacactttgactcgtcgtagatggaagctcccctagcattgctgataagagtgatgttttcccttctccagttccacctactattgccactaaactaccttctcgaatatccaagttaatgtttgataaggtaggcttatctacctttaaaagaaagaaaaagggtctttagcactatatataactgagaagatcaaattatggactcatcaacatataggcaagtccaaaaactaaccatagtgtcccatgaaaagtagccatctctaattgatatgactggaagatcttgttgaagaggtgggtttggtagtaaaactatctcttcagctaagagtagtccctctatgcgttgtagtgatatatttgctttcacaatctgtcaaagaagactatttcaatgatattgtcatatacattgaattatagtagaaacataggaattgcacctgacttagtagatcaggaagcgacataaatggatatcgtagcagttgaaatagagaaagtgaggtgaacgcccttgccggtgttaaatctcccccgaacaatgtgaaaactccaaatgatatcaatgacataaatattgagatgttgttcaagataaatttattaaactgcaacaaaagaaaactaaatcagaacaatgtgaagataaggtaaaaaactagccaactatgatgctatcttccacacttacagtggatagtaattgagttttgcaaaaccatgatagctcttcatttcgtatgttttcaatacaagacttgaagctaccttcccatgcataacatctgaaacatgttcaacttagattcagatcaactagcactaatgtatatcaaaagcaatattcttttggaaaaacaaccatactttacaatatccatggcttcgagaatttcattcatgaggccaactctcttgtcagtactcagcagtccttccttcgttactttttgcattttcgaaagcacaaatgtctacaataaggaaattgaaatcaaacaggagcatgctaaaagattgatcaactagaattacatacagaaaggaagaacatattaatattatgttgaaatcaaattgatttacatctcttgtgaagctctaggcaaaaacacatgacataattaaggggtaccctacctgtaagggtatcgtgagaacaagcattagagccccggaaagagatgcaactcccaattgctggtacaagagaaccatagatatgataatacgaaatggagctgaccataactcgtgtagtagttggcatacttgctgaaaattgtcaaagacaattatagttatacttgagaatctatgttggtgacaagtatggtaattagtagtctatatctacacaacatgagctggagaggtaatgaatgaaacaatcttgcaagttcaatgacttttgacatggttaggagaaatagtgtaatcaaatttgactttagctttggttgagaaggtgtttcaatgtgtgatttggtttcagagcagattattccttaaggtgtaaaaggaagtatatatatgacaaaatttgttgaagaattatgaacaagttagtgcttgaagatttagttttcaacaataaaatctaagaaatgttaactatgtatgagaaaaaagttaatatgcatgattagtattttcccaacaaaaagtaacacaaaaaaaaactatgttttatgtagttatatctatgcaattcatgagaacataaaatcaatcaaatgtatacacatgaagaagagaaaggagggaaaatctaataagaacatacataaagtaaactagcatctgatgtagccaaatttatgatttttccagttgggaaatttctgcggccctcatgtgtgagtcgcaatgatttcctaactataccagccatctaaaaaaaattagaaagcatcagaaaatctacgaaatcgagagagaaacttaattcacaatgttaacataataaaccagagaagtttaccaaagttgatttcaggcgaagaccaacacgctggacattatggaaatatcgagattgattcaccacccctaatgactgagcaaatatgcttataagtcaaaacaagaaacattaaacagctgaattgaattcattaatatgatactttggaccactgtaaaaatcagtacaagttctagtatatgactaggaacacttaaaagtaaaattcaaagaacacatatccttcactatgcaaaacttagaattttcctagtgtattttatgacagaatatttatcctcaattcatcacatacaataaaagttacacccataattggctactaaaatgaattccttacattctcacttagtctcaacccaactttggattttagcttattagataatcaataatctcctgcaatttgtaaccaaatttagtagatgtaaatcagggagaagccatacataccgccccagcgaaaatcaagaaggcgtaaatgtaaccaatccatgatggatcccctctttgcattgactgcagctcaaaaacaagagaattatgaagtgaaacacaataactactttgtataattcaagtaaaaatatgtcatgaaaggtttaatttcacattaagattggagaagcttagatagagaaaaagttgattgaattatggcacgagccttctcattgctattactcaaacaagtatgaaatgtatgtttgcgaatgatagcttatatgtttttctatatctccatgaatgtaggaacttgtgaacttttgatatatacacatactcatacacaataggagaagatgagaatccttaaataaaaatagaaaagagaaactaaggtgacgtttggttggaaggaatgaaaacataagaataggaatgggaatgggaatgggaatgggaatgagaatagaaataggaatagaatggaataaaattnnnnnnnnnnnaaaaaaattgataaaaaaactattaaatttgcgctcatcatgcattgaaataatcttttctttcatttcaaaatggaattgtcattcctctaaaatggtagaaaaatcattctattagaatgacattcaacactttaatatacaaccaaacaaagaaatggaatggagattgtttcctttcctttccatttcatttcattacctccaaccaaatgcctggcaactacttacctaatatgcaagagggtcactatttaattacacaaagggacaactaaaaaagtgaatctaaattaattacaattgattttctcattagctattattgactctagtgcaacatggaccatttaggaaaatattaaaatttcaatttttaaatatatttaaggtatttcatgtgataatgataaaagcaaatatagttgttttgaaaaagagacaaaagtcacgttttcatgagtaaccttctcccaaatatatagagaaaaccaacaatgtgttgtacaaaatgcaaacaaaaacacagaaaataaaagaaacatgattagtagagaaaacttctcccattctctacaaagatctaagaaaacctgaattgtggtagcaaatagtgaaacaaacaaaagaagtgttttatttagtaagaaagtttaagtttgaggtacttgtaaaaggaaaggaactaacctgtagtagcttactcaaaacaatgggccccacaaactgaaatagatcccacgcaatctacaaggagtttagaatcaagttagaaagatttcagtcatcattcatcaaacttaaacatgagaatggttttactaagagaaatttgctgaaaatttcacttttcttatactaagacaccaaattttttacttatgataaaagtacttaaatggtactttttcttgtattttgttggccattttcttccactttgttaaactgctacctcactttgactctcatattaagccgtcacggttttgtttttggccaccttcccgaaaagtctcatattaatggagaaggtggaacacttatattcaagacaactcttgcttatatccaaaaagtctcctaaacctttggctctgataccacttgtctggtcctatttttcgaccttgttaggccactacctcatcttgagtctcatattagtatgatattgtctgttttgggcctaagcccttatggttttgtttttgggcaccttcctagaaagcctcatactaatggagagagtagaacacttatatccaagacaactcttgtctattcttctaatatgggacttaggttgataccccaacatatttcaatagtaaatcattaagtttgattttaatgatcatttgttagattacggcaaggagaaatgttaaaaggttacttttattattgttataagtgtaattaagtatcgggtaataattattatagaatatcgttaaccaattagaaagtgtcgtggtgcaatatgtatta

SEQ ID NO: 36438 - DNA, 7131 bp, Cannabis sativa
  modified_base (64)..(69): a, c, t, g, unknown or other
ataaaaacacagtatttttgaaagcttttccgtgtgacggtatttttgtaaaagttaacccaannnnnngtatttttgtaagtttcccaataataaagcccgtattggaagcccaactatgccctaattgaagagatatgagctcatccacctccatctaaaaaatccaggctgccctgaacacccacaccacccaaaccacacatgcaacgagatgtaaatgttacaacgagcaagatgcattatcagcttcactaacctgtatgttaaccccatcaatacctacttggacttgatccattaaaggttttgctatataagtgaaatattgtacaaagtaaaaaaatagttcaagacaagtaaatagtctttttataaaatgactcaagtggatctcgcagagaatttgcgaaaaaagggcatcttgcagtgtttcataatgaatgtgtacttggttgattttattgcattcataagcttgtctcaatgtttaacttaaacatgtgtaaatatggactaattcagacggtgaaactataaataacttattaaattagtcatatcttcgtttgattgtattcgctaccaaaatctataaaaagttaaaaggatacatatatactatattgtaacaatacatatgcttcaaagtggcaccctatttataaaactagagcaatactattaggtattttacagtgtccaatactataccaatgtgatgtgttgcaggtactagtaattttttatattgtttattgaatcaaatgtgtaggactcaatatttaattatattaataataatatgtcacgtctataatagtttaagttacctttgtggtgatttaactatagattatgacttttgtcactgctaataaagttaaagagaataaaagtagaaaaattgctataagggattgtgtcatgactcctaaatatgtatttttggtgaatagttggtcgagaggaagggtagttttgtctaggatattacgataggggtttcctctctcaccatacttgttcttattttatggcgaggctctatcaactctcatcttacaagctgagtctaaatttgagttaataggatttaggtgtcctagatttggactgagggtgtctcatttattcttcgctgatgataatctcatctttgaaagggcgattgttggacatactaagacaattcggcgtatcctgcagacttatgagttggcttctggccagaagatcaactatgagaagtgggcaattacatttggtctgaatgtctctcaagtggatcagaccgaagcatttcaaattttgggattgacatctatggtcactcatgataaatatcttggcctgccgactgttttcgaaagaaataagaagcacacctttgagagaatatgtgagaaagtgcagaagcactactacaaactacacttttggtgttagttttaaactcacacttatacctatagtgtcagttcatagaaccgacacctattctactgagacaaaacgtatatttttagtgtcagttatgaattgagacttttgggcattggtgtcggctctaaaccaatacttagagatgtgctattaatttttgtattatatgtctcggtttagaaccgagaccaccaaaaaaaaacaaaaaaaactttcagatctgacgatgaattactccgagccaaaactaagatccaaacaataaaatttacattatcaaatccaaaaataaaatttacatattcttaaaactgtataaaacaccatcataaacaagcgaataaatttcaacagatcaatccaaaataaattgcactccaatttattttatacaatataagccttataataataatttatatatcaaaatataaattctttgacacatttacagtaaaatatacatcaaatagaattaaaaatataaacctaaacaatatttagagataaaaacaaaaccaaaaacccattgaaataaaacaaaaaaattgacttcctttggctcatttaaaaccaaatggccaggtactaagattcaattacgacgagagagaaatcgagagaaatggagtgcgagagggacgagaatgttggggtttggggttttgggggtccctaagcacggtggtaaccaccttatggccaaacgatggtcgaaggcacagtctaaatgtaaaccagagaagagagagggtcagcaacctctcatctctagttttctctgggttttggggttaggagggcggtgaccccttgtttgttgttgcaattgaagaagactgaagttgttctagtaatggcagcacacgaagggagaatggagagaggggatggtagagagagcaagagagagagttgggagcaacagagagagaaaggatagtgtttaggattttctctagggttatacaatattccttatatactctttaagaaaaaattgatacaactaaaagttaaaaagatttacattttaaaactttaagtgtcagcttataattgagaccaaaagatcttttagtctcagttatgaatcgatacctatactcaatttatatgtatatatatattttctaactttttttggtctcagttatatacttttagtgtcggtctactaactgacacttaaattcattataggtgtcaattataaatcgagactaaagagttaggatggtctttagtatcatttttttttttaaatattcctagaattgacaccaaaagtctattttgtaatgttgatgagaattcgtggttggaaacgtagctttctctcagctggtggtcgtgaggtacttattaaatcaattctccaagctattctaaattacttgatgagtgtgtttaattaaatagctgatatatacgtgtgaaaaattcaagtcaatagtaagagaagtttggtgggggaccaatggggttaaccaaaaaatctcgtggattaagtgggagaaaatttgtaagccgaagaccctgagtggtcttggatttcgtaatttttgactattcaataaggctctggtagtaaacaagtatggaggataataaaattccctacctgctcaggttttaaagcataagtacttcccccattgctcgattgtggaaactaaagaaagaagtgggtcttcccatctgtggaccagccttgtgtgggatattaagttaattcaaaagggcatcagacatgttattggtgatggttctcaggtaaggatattttgtgacccatggatacatggacatgtgaattttcgacttattactagtcttgtggatggaatcactttggttaaggaatttattgctacaacggcgaatgggatgttgagaaatttcaggggacgtttcttccaattgatgttgaggctatcttatctattcctttagtgtgaggtgtgtatggatggtgctgtcactatgaccgggaaggtgtttattcggtcaggagtggctatgttgtggcatggtcccttcaatttgctgagggcgttattgattcatctcaattggtgtagtggtagaatggtatgtgaactttgggtgtccctccaaaattaaagctatttacatggcacctatttaactatgccatccatgtatagctacgtaacttggttctcagaaggttatagttcctctatgttgttcaagaagtagtgagaattttgagatccagttaattctttatttttttgtcatgttcttactctagtttgggaataagtaggattactatcttctattcatagatattaaatggcctggtatcgaacattcttaatgttctttttttatgaactttctcaggatgagttcgagttgatggtgatgtaccttggtggatttggtatgatagaaaatttgtattgtttggtaagacacaatcaagagtggcaattcttctcgaactagctcagtgggccttggaagaattttgagagtaccaatgacttggtatgaggatgaaaacatctagtagtattggcagagccaccacaaggtggtgtcctccaccaatggggcacttctctttgactaccaacgcttcaataaaatcgggcagggtttgtggggaattgggaggtgtgattcaggatagtgagggctggggtggtttgggcttgttgggcagtgggggtggtaggggagtttggtgtgaatttgacggagttgcttgcggttagattgggactgggtattgctcgacaatttgcattaatttctatctccattataaaaagtgattcgacagttttcataggctggattaatagtccgaattccaataacgtacgtcagccaaatattttttatgttatttctttattaacaattgttaatggtgttcttgcaagactattttgtactctacaaatagtgttgcgcatgcacgggctatttttgttagtagttctttaggagagtatatttaaccagatacttgtccacactttattagttctcatagttaatttattttattgaattctatctttctttcaaaaaaaaaaaaaaaaaaaacttgctcaaatctttgcatagtaaataattatgatgtttttataggaaagtttgttacaagccaagcctttgaatggtccagtaattatattttttttagcagctataatgttgaatgttaaactgtcatatataataataataataataaaataatgtatattattatgatcaataacgcgtacgtaactaatttcaaaaaaaaaaaaaaataacgcgtacgtaacatatagatttacaaaaaacaattaaattaaataaataaagaaataacgtgtaacaaatattcatttgaataaaagatttagtcaaatatatatttattttgaaaacaaaatagagagtgtagtaattaagtaattgaaaaatatcgtaaaaagtagtaataatggccgaagaagaagaacaagatcagtccacaacggcaaatgttacaacaatggcagaagaacaatcttcttcttcttcaatatcacataaaactattaagagattcgactctttcgatatcgaatctcgcacctatttaggtcacggaagccatgacggctcaaaggtgcctgattattattattttctcttttatcttaatctttttatttagatattattattgaagaaaaaatgatttattttgtttgatggataattattaatcaggttatgaaatggtcaacggtattacacttagcttttcaaagcattggaattgtttatggtgacattggaacatcaccattgtatgtgtatgcaagtacatttcctaatggtatcaaacatgaagatgatattttgggtgctttttcaattatcttttatacaatcacattaagtactttggttaaatatgtattcatcgtattgagggcaactgacaatggtgatggtacgtatatttatattctttattttctttattcattaattttctctaaccctaactgtacatgttaataaaatatttaccttattagtttcgatattatatattcttatatgtatctgaattacatatcagatctgattgtgtaggaaaatcagaaattaattaatttaccatgaaaataatatgattgatgagtatgtgtataattagtatgcttggttggaaagaataaaaacaagaataatattaagaataaaaataggaataagaatagtgggaaactaataaaaattcagaatggtctttcttttaactttaaaatagaataactatatactgaaataatggaaaataatgtggagtgataatctaatactttaaattaaggcaaccaatcaaatggatgaatgaaaattgaatcatttctattacatttcatttcattatctccaacaaaacatgactttagtgtttctattgttttgagtgttgaaagtaaattaattaagttgcagtattagtagatttactttctaaaatggagattaattctttttcttttacttttttaataggcatttgattttatgtcatatataaataattgttgtaatgtttgtaggaggaacgtttgcgttgtattctctaatatgccgatatgctaaggttggattgaccccaagtgagcaagctgaggacaccaacatctcaaattttaagcttgagttgcctactaaacgcgtgaagctagcaacatgggttaaatctcgtcttgagaaaagtgacattgccaaatacttcctattaattgtcacctttcttggaacttccatgttgattggtgatggtatcttcactccatgcatttcaggtaccaaaatataaatacaacaacttagactcatttctcattcactttaccaaatcatgtagcggggcaagagaggtactttgtctcttaccgccaactttaagaaatagagaaatgttaaagagtactagtggtgcttagcatgtgtgtcaatatcgctattagtctaactaaatatcgagtcaccatataatttaatataatagattttaaggagtatcgctagccaatcgcaaggcgacatgtcgagaaggtgctaggcaccactgatacctaataacaaagcttttagaaataagttgggttaatttgacttgtctgcattatttttcccttattaagcgacgaaaagctacttagttgagagagggcgccttagttcccaattttttttatttctattatctagaaaaaattatataaaaacctttgttcttcaaaaattatttcatttagccttcctaattttttccccttactttttggcccctcttggactcaattgctgcctccattgcttgttaattaagttggggaaaaaattcaacaaaaattcaaaaataataataattctccaattatagatgataattaattaattggtataatacaaactaatcaagattaatttcacctttgttgatgcagttttatcagctgttggaggtattaaggaagctgaccctagtatgacacaaggtaattaatatatacaatataattatctcaataaatcatatatagtacgataaataattaattcaatcatttcttcttaacagataaaattgtttgggcatcagtagcaatcttgattatgctatttatggttcaaaga

SEQ ID NO: 36439 - DNA, 2493 bp, Cannabis sativa
caactttttaatttccatttttgtttatttccttttttggggtcataaatgtaaatttcatctatttttagtctataatagaaaaaatctctatatatatctatagtatatagttaaggaatttcttatagggtttatatgttcatagatatttaactatatttctaataacttatttatatgatatctatgtaccccacttgcatgaaaatatcggaagaaataagtaggtgtgtatcttttgtttggcaaggaaattaattaaaagcataataaaatgctatgttggtatatgtcgtctttaattaatctttggatgaattaataggaatatttatatataatttttaatataaacaaaatcaaacttaggagtaagactaatcaactagatattttctttttcagcaacatcaaagtctaaatagaaggaacaataaaagactggttttatggtagtcctcaaataataaaccctagaaaaaatggtgaatttgtgaacttattaatgatcaatatgaaacttccatattaatttgtttaaaagaaaaaaaaataagaaacttccaagtcatttataaaggaattcatgaatgaaaaaaaaataatagaaaatatttatttatttgagtatatattggaatttattacttatttctctttttttgttaactttttttttcaaaaaaaaaaaatatattgagtccaaccacaattcatcaccaagagtcaagtaatattaagagttgatcgcctaatattggtagatagatataacatgactaataatctcacaacctatgaaactgagcattattctttcttcttcttcttcttttttttttttaataaaataactactttattaaatttagcactcagtgtacgtacaagatatctaacataaatgttggagcattacaaccaaaaatgatacgtttagagttatatcgagatagtctagcaacataggctgattataacaggaagtaaatagttaatccaaaaatagaatatgcttcgattaaaaacattacaaacagtggagatgggatgaacattaacatgcttcgatttgagctggaggcgagttaaaagacaaccaatagcaactcgccagaaaaagttcttaatttttgtggtattttcagttgctagagcttctgccagtaccataagcacctaagaagtaatcaaacctctcacccatccaagactagtgatgttgagaagctaaaaaacttaaaagaatacccaaaactaaagtggtatcacgagcattgaacgtatcacgaaccaaatcaacatcccaagtatcattctctttttaatttaattaaaaaagtcataattaaatatatccaatcctcactcataattaggcttagggtcgttcatcgaaactgaaaaattgcagtttaaatttggaccgcgacaatctaaaccattgtagaccataactgggaaaaccgttttttggtggtctggttaatccgaaccgtatactgcgtaatggttcggttgtgttcgtaataaatagttaatagttaattttgaacttttttgtaagttaagttttttattgtatgaattttaaatttttatgttatgtttgacttttgagaatgtttttataatattatttatatgttatagatctattacttatcatgttaaatatatattttgaaaaataaattaaaaaattagtaaaaatagtaaaaatagtacaattacttaaaaaatgtgaataattataaattctacttaaattgtggtttcgaaccaaaccaaactgttcctaatcgtttggtttagtttgagaaatttattggtctagtttggcttccaatatttaaaaagctgttatattggtttagttcaaaaaaatatgaaagtccggaccaaacaaattcgtacatccttaattaggctaagtttggcaggaaagaagaatggttggagagtttagaaaataaaaatgatgaaaaggataattgttttcctttgtgttgtttggtaataggagtaaagattattggagaacattgtcccacatggattaaatataaaagtattgagtcatatataagagcatgagctactctactcatcaccaattaattttgagatggaattgattttcaacaaagatgaaaagttagagagtacaaaaaatattaaaattactattttaactttttcttgacataataagatataatttttaaatggtagaaaataaattttatacttatgtatatatttatctttttctcatatttccccaattttaaataattgaaaccctcttcctcagggaaaccctcttcctccatgaccatcataatcattttggggccttaagtaaaaaattaaaatttgctaaatacatagtttattctttatattattttttaaaatatctttatatattaaaagtgtctatctaacggcatttcttggtttaacattcttggtttaacagaatat

SEQ ID NO: 36440 - DNA, 1998 bp, Cannabis sativa
  modified_base (1493)..(1495): a, c, t, g, unknown or other
  modified_base (1675)..(1680): a, c, t, g, unknown or other
tatgtatcaatcgattattatattttattgttgattgatacttctgataaatattatttcgaatatgtttttttcagatcccagctgacatggttgtgaatgccatttttatggccatacaagctcaagataaaaaggactcgggaattatttaccaagttggatcttcaatgcgaaatcctataaatatttctcagatttacaactcgagctttcgttacttcactgaaaatccattgattagcaagattgacaaaaaacccatcagagttggcaagctcacattttttaaaaccttgactactttccaaatctacctcactattcgattcatcttacctttgaaggtaagtaacaaattaatttcttctatattatattttcgacaaacaaaattaatatttaataattagaatttttcaaaccaaactcacgtgtaatagttagtttgaatttaattattttcaacaaacaaaattaatatttagattttttcaagaatttgaaagatttgctatatcttaacattgtatgcatttaacaaaatgaaaaaaaaaatattattattaataagaaatgtaatattaattatatttatacagatatggtacctaattagtagagtaatatggtatggagatagcaaggacaagtatagtgaatacatgaagaagattaattcagtaattcatttggtacaactttacaaaccatatgtcctattcaatggcatgtaagtttaattatatatatttccctcaattttattcttatatatatacaaatatattaattattttataaatatatattatgtttagatttgatgatttaaacttggaaaggctaagacaaaatgcaaaggatgaaagtgaagatgaagcattattattaaattgtgatccaaagtgtattgtttgggaagattacatgatcaacactcatattcctggcctcttaaactatgtttattacaaataattattatatgtattaagcttaatcataacactactctactatatatatctatactatcatattgtgtttatttttatatattattgaaaccatatttctataatattatgttgtattttattactttgtttatttgaagatatatataatatctgtgtactgttcgagttagtcccatcaaatatatataatggttttcttttcaggctattttaattctatataatgaaaattgtatatatatatataatatgttttttgtaacatggttttacttttaataatgtataattatatatatatatatatatatatataatttggaaataatatataataataatcttgtgtaaatatgaaaactcaaatatatataagcatacgtactatgggatatgtgtttcattatttacaataaatatgtaaacatatataaattaattaataagcatcttatatacaagttaatagatgatgaaataaaaaaaatcactataaaaaattttactttnnntcacaacaaaacttgtgactaaaactaaaaaaattgtgactaattataaattatagttcctatgttgtgactaaaaaatctttggctaaaagtattagtcacaaaaattacaatttattgtgactaaaactaaattagtaacaacttgtaactaaatactgtgttttagtcacaagtaannnnnngttgtgactaaaagtcacattttaattataaaaaaattatgttatgactaaaaagttatcactaaaaatagcagttttttgtagtgaatacaaacgcttataaatatgccatgttattggctattcattcacattgggctgaaataatgattctgctggaaaagttctcattacaagagagaatatgagaattacaatcaaaatactcaaaataaaaatataagtatttcatcaaaaatacaagaaagctaaaaaagaaaaagaagaataataacacacacaaagcttgaccaagactcaaggacctttgtcctaaaa

SEQ ID NO: 36441 - DNA, 5322 bp, Cannabis sativa
ttttttttttttttttttccaaggcttctcatgtgtgttgtctgagattcaagcaacttctacatttgtatggtgaagcttcatgttaacttgttaacttatctaagtcggttgtgtgcttcagtcccaatgatacaaggcttgaaagagaaatatcaatggatttattgggtgttgttgcggtagattttcatgatagttatttcggtcttccttattttgcgggccataacaaagcaggcatgttcaattctattcgagataggatttggaaaaaactcaatggttggaaatctaaattattttctatggcaagttaggagattctgatcaagatcatcattcagtctattccttcatatgcactatgaatttgtttaaacttcctaaacattttaatattcataggatgtgtgctcgcttttggtaggaaaaataatgtgaaaaaaatgtactggtctactttgaataaactgtgcttgcataaagaagatggtggtgtgagtttcaaagacttacatctatttaatcaagctttacttgcgaagaaagctactagaatttacaatgttttgttcttccctggcttcctaagttttaaaaggcttgtattttaggaatatgagctttggtgacattgtttgttcaaagaagggctcttttgtgtggaaaaactttttatggggtaaggaattttttgattctggggcaatgaactttttgactctgggctttttggagggttggaaatgggaaaaatataaacatatattcagactatagggtcccttttgcatctccttatttcattttcttagtgagggaagcaaagtctctttgttacgagaggcttcagagggttgggacttgggtttggttcgaggtctctttctccctaatgaagtggaagctattttatctattccttggctctcctttgatgtggatgataaacttatatagaattttgaaaaggttggttggtggaaaaacagttggaccttgaacttcttccaaagttgagattgtttgcctgacaagtgtcttcttattggattcttgtgaagattaatttggctcctcatggtctcttatctgatggtctttggtctctgtgggagctccatgaagagactagccatcatgccatgtgggatgttctacgatgttggcttggagaaaactatatgattttgatctaggtgatcttcttaccactcatatggattttcttagctttattcataatgttattgaccctatctctaaggataaaattaaattagttatgatcatcatgtagtgtatttggttcaagaaaaacaaaatggtccataataacattactttgcctcataacttggtggtgaattgggctcaagaatttctttagaactttcaacatagccaagcacggcatgtgccttcgcattctcgaggaccgacaattactatgtcttcagatgaggtagttttgaaatggcctcctcctttggctgggtctctcaaggttaatactgatgttgctattgacacatctagaaattgtagtggccttggcatggtggtgtgtgtttctaaaacacagtccaagttccaaaggccatgcgtgtgcaacctgcatgctcttggttgccaaattctatttttggcatattttgaattttaaaagtccaaattgagtgattcaaaagcctaaatggttcatctcttgcttctgctgtgtagtgcctaaaaggttgtcttgatcccgaagtggtagaagctttggctcttcagcatgccatgatctaatgtcattgtttcgggtatgacaatattatctttgaattgaattgctagagtgttgtacaaaaagtggtgaacaaagtatctttgattttttctatgggtcttgttttgaatgacattggtagtctttgtaataatttaaaaaatgtttattttttgtactgttttagacattttaatgttgtagcctatacttactaaaaatttgctttaacaacctcttttactattatttagtggctgagttatttaagttgtatttagaacttattattaacaaatgttattgagtaatgcattcatgccccaatttttttttttttttgagttttattatttttggtgttgtgaactaataaagtatttgtcatgttataataataagattgttattatacctatcttgtaattactaagtaacttttcatatattttaaaatgcactaataatgatattgacacctaattagtatttcaataatcattataacagtaataaataataataataataacaacaacaaaaacaaaatagttaataataataataacaaaaagaaaatagacaaatagagtatctgaaatagtaacaaaagatttatgtccaaagttcaaacacgtgccatctctcccaaaaacaaaaacgtatacacacccacaacaaatgttgatgccttcctacacattccaaccactttgtttttcccaatatgatttcaagccaaaacaaatttaaaaagaaatgataagaagaaagaaaatatcaataccgtcctcataacagaacaaactgtgaattatgaacaaaattaaatatcacccaaaaaacaataaataaataaataaaacctttgtctgtacttctttttctttgaacatttcgacagtccttggtatgtgtaatcttcaatttgttggcttgttattattcaagaacagattttggtcttagacctgtacaagagcttcttcttcttggagctttggttatcaatggtgagcacaatcttgcctggttcacctactttgaagctattagatatcacagcttcttctgtggaattaaccttccttgccttttgtacaattacagtgtagtgaccctccgtacttggcacgaattcagcaccatagctcacattccagcccaaaactcgaagttcccaaaccaagacactcgtctgaattaatcaacacaaacaattttctaatcacaaactaaaatattggcacaacacaaatagaaattcatattagctaaaagtttatatacctcagtgactggaatttcaactgtctctttggtagatggttttatggtgacttctgttacagagtcagatgaggtgaattcctggtcaccatcttggctcaaaccaccttgttgcactggaacttgttcaggagctatgtatcttttcaataaatacgaaacaagttcagtatgattatgatatatatatatatatgtatacataggattcaaatagagaaaaagtattgaattttgacatacttgaaaagggtgtcggcagattttgatggaccagcgtaaacaaacttgtttttagttctctgagtcaggaaaggactgataaccctactgaaagccaagtaccaccatggaacgttgatgaatacctttcaaaaaaatccgattttgttaggattacaatacaaacgttgataatatataaatattaatatatgctgattaataatacgttacctgtttggctacgaactcaggataattgtcttgaagcagttgaattgcttggccagtaacgagctctttgtttagaaagaaaccaggagaattcttgagatcattgacctgaacgatggttgagatagcagtgggattgaaatcaaatttcctgatgctcttctccaagaactgaatcctccacttgatgaacttggtccgtttctcttcatcggagaaggtgttctgatacaattccatgttttgaaactcgccgaaaacattgtaacagacagggtggccttctttatcaactccatggctgaaaacaaccttatcccaatcagaaccaagatcttcctcaataaggtcatcgattccgtactccttgcgccacttgacggtgttcttcaacatggtgaaagcctccttaactttataatctctggctctaaggaatttcaagaggatcacgtcactcctgtcatcggccagaaggggaattccccagatcgaaacctcctccggtgggacacacacttcttgttcttccttttcttcttccttcttcttcggttcctccgcctctgtttttgctgatgaggttgcctcgtcgactggagcaggggttacggatacgaccgattcttcgatagcttccacagtcttagcgccatcgtcatccacagtcgcaacttcggtcaccacaactacagccttctctttctctttctctggttcaaccttcgaagcctcttgatcaacagttttcacctctgttttcgcctcttcctcatctttcttcttctcttcctccttgggaggctcttgttcgtcagttttctcctctgccttcggctcttcctccttcggagccggtggcggaggtggaggagcagtaaactggtgcttgttaagagcatcacgaacgagatttttgaattcctcaagagccttcttctgcaactccggaagctcagctaaaacatagctttcttcgttacaagaaaccgattgaggaactgctgtctcctcctcagcagtttttgtttgtttctcagcctcaacaacatcatcggtggtggcaggcttctgggcttcctccggctcaggcacgggtgcaggtggagcttcagtctgagtaaggggtttttctgcttgaggaacatcggcaacgacagttaccacctcggcagatggtggtgctcctgcctcagctgccgagttctttgattcctctgtcatggtgtatggatcgtgggtttgagagagagagagagatagggagagagaacagagaattgtgattgatttttggttggagaagaaaatgcgggctttgttattgttgttgttgacgttttctaatggctaaaaccaggctgtgagacaattttgccagctagcttagtataaaataatacgatactaaatttgtttgaacagaataatatcagacataacggtgtttttcaaaaaggcaaaaaaataaaaaagccaataagataagtataaatgtttgaaaaacgttaaaattgattgtaattgtcgtcatcatcctaaatactaccaaaaccacttactattattatctttcgtttcaacctattagttttatttgtaatcatttgcgttacggccggtttcaagttttgtgtgaaaaattaaaattgtacatttttttttttaaagaaatatcaatgtattcatatttctcttcaaaaaaaatttaggctattcacccttaaaagactcctatttatttcggtatctagaaaatttttttagtctattttttttaggttaatttcacaaatgcacaa

SEQ ID NO: 36442 - DNA, 4389 bp, Cannabis sativa
  modified_base (99)..(115): a, c, t, g, unknown or other
gggcttttgtgaattggactttaataaattgagcaaagtgaattaatatatgtatatatctacataaaaaatttgatgtatatatttgagtgagggctnnnnnnnnnnnnnnnnntaaagtccctccgtccctgcttataaatatattgattttctagtaactctagctataattgttattattgataaatgtttgttgttaaaattagtgggacacaaaattatttatatatttttttattgataaaatcacattagatatagtatttattttatggtgagattattatttatatattattgtgtataaataatatgtataatttaaacatgtcataatcatcaaaaaaaaaaatatggaaagaaacataatattgttaatcatctttaagacacctaactctatggacaaaataaacataattgaatgataaattatattattttatctaaataataagtgtatgtattggacaatacatgaataaaatataaaaatattaaattatatatataagaatcagaacatgagttactccattttattaattgattttgagaagtaactcataattctcaacaaagtattgaagccatataacaagggcactttccatccatacctccaaaaatagaaatataatacaccacaaaaggaatgatctataaattgaaaattaaaaagaaaaggcctgaaaggaaaaatagctagtgtaccaaataaagtgcttaaaaaaattaaataagacaaagtgctgattttattcccgcaaaacaagagaaatatttgtttttgtatccacttcgatatatataagatcatcaggtgtattcaaaacataaattaaacaagaatttcatgcaattggtagttccattggcgacatataatatttgaacatattattaatcttttgtttacaaagcaaatgaagtctaaaataagatgaaaaagaaagaaatacagagcaaaattttttaaaaataaaagatagaaaaaaagaaagaaagagaaacaatatagtacggtgtgaagttaactaataacgaattaaaaaccacctccaaacaatgaaaatggataaggcggtggagctggatcactggattccaccccagccactactcctgtaaaataacctaattgcccactattgctattactattactactactaccattcccatatccagaaacaaatctcgccggagccggcatagatgatgacgccatcgccgccatggattccggtaccctacttactgaaacggccgatatcgggttttggctattcccggggtaaccattataaaaaccctcttgagaaataaaccgggctggccgctgggcaccccatctcggctgcggtggatactccggcgatgaagatgaagactggttaaaattataaaagctgtccaattcgaaacctgcctcgcttgcaacgacgtcgtcttcgtcctcggtcttgagcgagttgttagtactcgtcccggcggcagtggtgggggcagtagcggcgccgcctccgggggaattagaagaggtcgtggcagaggatattgctaggcgtcgtttcttttcggtgaggtggtttttgttctgggtcatcatacgcgggagaatatcagggtcctcaacgaccttatagagaaaggccatcatctgttggggtcgtctttcagtggtctcgagtcgcttcgtcatcccctgaagctcttcctctaaagttctctgttcttccttaagccttgttatctccatgactatctcttcatcgtcaagttctgtcgggtcaagctgtttggaagctgagaaagtagtgtgggaaattactccccggttactggtggtggtggtgttagtactactacttccactgttattattacagtgcttttttctcgtgatattctttagtaaatgcttttggcctcgaagaaaccattcattcgcgaattcccatctatctggatcgacctttcgaaacccctgttcaagtatttgactaaattgattaacaattataacaaaaatataaatatatattatcttaaagcagtaatagtgacgtacgtaagtattgagctggcgaacaaagctggagaaattgttgtgcttgaaaaaagctggtaaaattttctgagaaaaatctaaaggttcgatgactatgaagctgttattggcgtgaccccaagagatcagactgtccgtcatcggatcattgaccatctgataagtcttcataacgaacggtgcgatgacgttgttgctcgtcgtcgcctccatacccatatgccccgattctctgtctcgctctttctttctcacagtgcacaaaaaaacagaaaatggaaacaaataaagagcctttgttttttttctctctatcagtctgatgagcttaattagcttatagcaaaaaatgaaagaaagaaagaaagaaagaggggcagagagtgataaagtgtgggcgagtacacgtttgggattattggggattcgttaatttatgaaagaggaaatacggtaatatataaaaggacgcgcatacagtaacactagctaacgtggcaactcttttcattttattttattgtgttttcgtcgggtcacgagatgggacccgctattggctgatctttaattatcttttctaacaccacgtcatcgagaggaggaagatattttgatggattgagggatttggtttcacgcgcagaaatggaacgtgggattgttcttttcgttttcttataaaattaataatatttggtgacgtggtcccattgctttcggacaagttttagctactcgacaaaatagctataggtttcgagctctttgcttggataatgattagcggagagattagaaaaattgatggatatcataatcaggatcctcttgtccattcacgtttctgcatttacatttctatcctttctttccccatgtgctctattagggtggtaaatatgggagtcaaaattttatactgcataattttacaccaaaataaaaaaaataaataaatttttttacacattctcaaatactattttataaaaaaaattgtaagccatcccatttaaacaattcgcccaaattaaatcgaaataattggataaaaaatgcaaattaaaaaacccaataaaaatataacccgtccaatttttatattggacgagttaaaaataatatcaatctgcccaatcaacttgattaagagggtttcttttatatataaatatgtttttattatatataatctatacataatataatttatatacatatttataaaaaaaataaaaaatttaaactactattattttttcataggagttgatttgaactttaaattcaattgatatatttatctcattatcataattaactaaaatatagcaattgaatgtgaaagaaaaaaaataaacattattgctcagtttggacgggttaacccgaccaaactgacaaattcattgggcaggttaaatttttttcttaattggacgggttgcactaagatttttgtaacccaatttttatgttgagttgaaaaaaatgtaacctaaactgaccgacatacacccctaatctcagttatatgtacccttttgtgtaaattccaaaatattccatttaccctatcacttttcctttcttatcttttctctttctcttttcactccaaacattttctctcttctctacacccaaaaaaatatccccattagattaattttcaaagctattatctgtgaaagataaatatatttcaatcaagaaagagccttatcacaagatcggaggagaaggtcaatgtttttaagattttggattgttttttggtggaaaagaaatgggtatgtgattttgtgctaaatttgttattaatcttaattttgttcaagtatattgttgttttgtaccttaaatatatatttacgtgtgtgttttgtctatttgttggctggagcatcagatctgcatttttgggttccttttattttttcgcgtaaaatttgatgcattcgatgcttacttgatgattagtattttcagagattggggatgatatttcgattagtgttggatatctgcttgatatagattagttatagtacatattcgattgttacatgatgcatgttcgatacataagaagttattgttgaccaaaactcaatcactcgcttattttgatgataaataaatatttgattattatttgttactaatcttttcttgatcattttacaagaaaattcacaaagtatcaatatttgctcggtaaagtcaaacataataaagaaaaataggttcaacaagtatatcaactacttcatacttcataagagcaaaagattcatcaagggatc

SEQ ID NO: 36443 - DNA, 10122 bp, Cannabis sativa
aatgtacaaacaaaatttagtcaattttatcaaccaaattatatttttaatatacaaacccaatttactcatttttatcaaccattaagtgaaaggtataaccaaacagaatctaatcttattcttgagtgaacttgttaaaccaaacttcacaaactaaagcacatttgttatgagagcaaccatcaattatgtgaacacaatgatagacgaggtgtatagtacttgtacgatctctgaatagtagataaaagagtatatgtaaatttcaatcactaaatggtacaccaaaattaaagttctaaattacattgccttcaagctcaaatagagcaagttaaccaaaatgcctatgtgttattagtaaaaatctatccataataaattgacttcaaaattcctttcatttgggccatttttcttaagccagtaggaaaatgtttaacaaaaattggacactaaggcatttcttctcttctctgtataactaggctttggggaaaatatctaatatttagtagagatttatggttttcaaaggccactaccttgaggtataattatgtattggtgagaactaccagagctgcaatgggttatagtaaatgaagcaaatattcttcgttaccatatatattctcacaattctgccttagattcaacgtcctctgatgaatgatccgctactgaagtctgtgactcattcggagacggtgtggcccctgtgagttcatccaattgatcacctaagatctttgcagtgaactgtcttgcttctaaatcgagatctggccactctgaaactattcttctagcaccctgcaaaaaccgtgaaacaaataatcaggtttaataaaattttcaccattcatactttttcttgaaaaagagaatacaaagaaaattaatcacaagtaacaatgtgaaacatcggtttggtttggtttggtttggatttgttcttgtaaaattattgaaataagattaaaccatgcaagctacctgaagctttggttcctttgtcataggattgttgcaaagatcaattgttttggcctttgattttgtggaattaccacaccatgactcacaccacagccattcttgtgggagtgaaaagataggtacagcatgttgagcatagtttggaagatcctggatatgaaaaagtagcaatcagcataaaccagaacatagaataagcaagcaagaactcagatgtttgatagaatgtaaattaaggggcagtaaacatctcaaaaataagctgattgtgtttttggttttaagatcacacaataatttcgagttataataaacagaatgtagctttgaaacacacataaccaagcaaagagaaagaacacacagcatacataggagcataagagcacttgggcatatcgtatatagtctaatcagtacaactaatagtctctactttgtaaagtgagacattcgatttcgtaaatgtcctcctatttgtaagaataatggacttggagattttccatcagttctcagactcagactattgtatcaaaaatattactttctagcttaaacatttgcttgcaacataaaaaagcccaaaaacagaaactgaacaaccaaagcacaccgctgattccaataaaaagcaaattgtgcaaaatgactttaactacttgcctgatccagattagctaaactgtttggatccttgctaagagattcatagaaaactctcagattatctcctgccgcagtttgccggaatttctttaaatcaactacatacaaagcactgaagacaaaaatatagtgataattaaagttcctttatgaatgcaataaaaaaaagggtaaggtttcaattgattaaggtaataaaagcaggtactaacctaatatgatatggccttccgcgcagatgttctttccagaaaccctgctccataagaaaaaaaaacaaatgcatttagggggtgggggtgagtagatgacttctgagcattcataacagtataacaatccctggttaaaattaataaccatctaatttgggttaaaatgagaaatagactgggatttgattgataataacctgtctccaaaagcgatatccatccatatccctgttgttgtcacagaaaggagtatatgctagaggccttccttttatatccatgtcatagagttctcccatgtctgttctgacaatttgatctgcatcgacaaagatgacctatatataggtggaagatgtcaaatttaggtttgagaatctcaaatcaaacaatgaataagaaatgaggaagcactatagataaaataccttttccaaagaaagagggaaaataacatccaggaacaatattttgtaggcccaaatgattcgctgcttttctttctgcttatgtaaccatgtaggccacttgtaagtgactagttcatactcaaaaccatactcttcagccatatgaggtatcaaatcctgcatatcacaaaaaaattcagagaagcccatctatgttaagactcttttcatttcttctcttcaattagtaaacataaaaaacaaagtgaaataaggaacacatttaacaaaagaaaacacaaatctaatgtatatatttatacatatatatatatatagaacatttctcacgagatcgacaaaagttatcctattaatcttgttttgtttcttttttatttttttggtatatgctgagcactggatgttgatattattggtgtccgacttttattagttatgttccatatggatcctaaaaactcacacttgagtatttaaagtgatttgtgtatttattccatttaatgtttaatacaattatggaagatgattcaggtggttactaaaaagaataactataaaatcaattttaaaaatattaaactattagattttaatctaataactaataaaaaagagattcgagtttctatactaaatttaactacttaattaaatatatatatatatatatatctctttgtataatatatcaaaaatatctaactcaaatgcaaccttttttttctcttttttggttaaataacatttatttttattttttctcagctccgatagaacaatcccagcctatataatgtaaatatgagatttttttttttttaattagatagcaaaattaagcacagaagttcaaatttatctaatgataatcattcattactaatacccattaaaagagcacccatatgaaaagaaacaacagtgtattattataaactaaatattcacaaccttgaattgaggagagaggtagttctttataaaccagaatttaactggacgattggtgttcttcaagacgctcaaaatcatgattttcagaaaacgttcatatctacaaaataaaaatatacaaaacgacaaatggtaagtttgtgtagacattaaacgacgagcaaacattaaaatagagtatactttaagaaggaaaaaaaaaaagcctcaagagtgttttactttctgatttgatcatcagggatgggagcttattatgtgattgtatttttacttttattttttgatgtaattcttttacacttcccttgggcattctctcaacaaaacaaattgatgaagaaaaaaatggtcaggagctatattggcttaactttcagtgaggaagacaactaaaaaaatgtcaaggtagatttgatatcttgccctcctttctgtaatccccttttccatcactcaaaatcaaatttttgtcccgtgtaaaaataaatataaatatacaaaagataaaacaaaaacaaaaaggagaaaaacttacaagtgaccagaagctatagaaaagatatttattgtcgttccatgtcgcccaccctttccttgctcctgaaaacagacatatcaataattcaataatccaaagaagtccaaattggttcataaaatgcattaacgaggaatctgatgtcagttacaataacaaataaaataaatagacaagttaagagtccataatgtaaagccacattagatcgatataaaaccctatcaagatctcttctcaactattaagactcacaaaaaattaacaataagtatatgagcagaaaataatacaaagaagaacaaagaacacaagaatcgaatcgtttggaacattaatgaccccttaaaaagtaaatagcttcagcaagttcataacgaaaaaggaatctttggcgaaatttgaaaagggctttaagcaaatgaactataaaatccctcaccactgatgtgcttttactcttctttgattgttcagctccaccaataataccagaagcccatttcaaaaagttagagttccagctgtttccctaaaaaaatttaaccaggagatatttgtacaattacacaccgatataataaacagttttcctgatattagcagtaaacaataaaatgcgaatgaaaaaatcactaactttatcatcaacgtctgtgctgtcatcatcatcagagaccagcaatttctcatgttccttgcccttcttcttcatgacttccatatgaacaaccttaccccgcaaatcatttatggtgatacgctttgataattgtttgttctgatttccatcaccatcatccttgagaacataaagctcagaacttctacctggagcaagttgcaaataccaaacaccaggagagactttcatttgccaataccctagattggccattacaagtgtatcaaccaagtgaggcgtagtcttggtgccaagaatcagctgaaggcctctgggtggatcttgatctttctcagaacaatgacctgcttagacatcgattattaaagcataatagaaacacagcaatctttcatgtcatcatttccaccaaagtatatgaaagaacaaaaattttatgcaatcttgaaaaaacataaccataccagtgagaacaagagcttcaagttcaaatacagcttgcagtgttcgtgtgtctccaacattctcaagtaaaatattatccatatcatggctgtcaaaaattacagctaatgaggaaaagttaaatgaaacgtttcgaaagtttaatagcactgaagcagttttatatttgtacagaatagagataagaacagtgctacgaaattaaatacatgtgtgtgcgtgttataagaatcgagaataagaaatattatcaaagggagagaataaaaatacaaagttgacataaaatcacctaaagttacaattaagcaatataaaggttctttcatctctcttaggatgagtttttgttttgaaaatatatatacatatatatatattaagaaaaaaaaaacatacacagcgattacaggctcaaccagccatggctcaggaacatcaagattcattgtcagggttttagataagggcatgtttgcaaaaaatgctttagggccatctatcgtgtaatcagtgctactaaagtcgtcctgcatatagtatcaagagttaaataaataccaaacaaatggtagacagtttttcaaaagtaaaaaagtttgaattcactgaagattagagtcaggcatacaatagatggtactacatatctgtagtaattcttcaggggaagatccactacggaactctgcaaggaagacaaaatttagttactcaagatgtgtaatcttatgaaaccatgatcaataaaagtatagcatgtgctgaacattctaatcaaaagtagtcatatgattatgaatgaaatggcaatagactcaccaaagggtttagtacaattctcatgcttggctgtatgtatttccataaaacacgaagaattgaagaaaccttctgggcagattgactcaaaggatcgatgactgcatcaatatgaatacttgcattttcattgcctaaaagaacggcactgcaaaggattaagagcagaaaatatgtaagaagatgatagtaataataataataataataaaagtagtttgttaattcaccacccaaattaaaattgctattaccacaaaactccacataaccacaaccatttcttactttcaaaagccaattggttttccgatcaatagagaaaaatatgaaaaagcatgatttcactttcatgcaattgtgctttccttatttagaaaaatttacaagatagtgtaccactcctagcaaacatgaaatgaaaatcttcacttttattttgtaagaaaaatagaattttgtccggaaaagtataagatccttaaagaaaatagcaatacctatgttctgcgagtaaaacctcaaatcttgcaccttcagaactacgatctcgagtagccattgaagatgaaaccaccatagcaatatcgctaataaatttgctgcattatgaatatcatcataaattccttaggcatggattaaaaataaataatgaatggaccatgctgaaaatgcttggaataaaatagcacaaaaacaatgaagataacttaattgcaagagttggaagaagtgaagtattttttatatgaaacaaaagttatattaataagagatgagtctcactagtatctttctaccaaacaagttccctaccctaaattcatctaataatcttcctactactctttttacttctacttctgacctcctaacaccataaatggtgtgctttctttaaaaccaactatcaaaatttaagttcttatttaagaaaaaatcaaatttaagaagaaaaaaaccaatgcaagaaaatagttttatttctaatttcctatgctttaacaaccaactttttgctttcctgtgtggcctaatgaagataccacgagcaaccacatacacaaactactaatagaccacatgcatatcacaattagcagaagatgtgagacccagaacagtcagcaggattatactacaaaaatttagtttcttatcttttaatctatctttcttaagagattatctaaattttacttctggagaactccgatccacagcatagcaggctgcagaaagcatagtttaacttatctttgtacttggaatagtaattaattcagttaacaaccttcaagtatattagcaaaagaaacaaatgtacagatcattcatcatttaaaccttccatctcatgagagagaatatatatttatatacacacgcacacacacataaaaaatgagattccaagagaagtttgcatttcaataaaccttgtaagtgtgtcaggatccacatcatgccactttatttcttcaataatttccacaatgtgctttattctttgcttgaactccagagcctccagaagatgcatatcatggctcaaaaacatattcccatctacagataatgttacctatatgccaatgtccaaactatgttgttataatagtaataacttcattttacacttacgagttcttaattactacaaagatgaaaataactatactgttttcttgaagaagaagaagaagaaattgtaactacataaatggtaaagacaatttaacatggacatccatctgaataaatatgtcaacatggcactcacccttccattagtaatgatagcactgacacccatttcaagcccaagttgtgtgtacaaaaatcttgccacctggatatcattgtgaactgtgaataaacactctagcataagctgaaaagtgataattctaaacaaataaacacaattcataaagatggattatgatagaatcctctttcagaaatccatctgtcatgaaccataactttgataagaaacaaaataaacaaataaataaataagaaacaaaaatcattttagctttgggggggggaggatttggatttatactaagataagccagaattaagctatctttactgtaatacaaagatcaataacgccaaaaatctttaccttactcaaaccctttttcaaatcttcagcagaaaaatcagacagagcagcacggtatattttggacgataatccattatgctcagcaagctcacagactttatcaataaaggcttgagtggtccccaaagctccagaagccatagagaggtatttatgctcatagaatgagcataattgatccaagaagtttagtacttttaacttatgactgcacaatacatgacatgacaaagtacttgaataatccacgcataccattcgtaattaatcattatgcttttagtaaattaaacaaacctatatgtggaagcagtgatttcatacaccttcatgaaaaagagactataagcatcagtttcatgattgcagctaaacaacacacccaatcgagcaagtttagatccttccatctgcatgattaaaaatcaagagactaatgaagtcagtgattaaaactcaattatgatagatgtgctatgatataagaggagctagaaatgcatattcttggtcataaataataaccagatagcgtaagccttcatgaagcaacttcaacccattttttgatgtaacgtcaacagcgagaagatgagtcacaggcttcaaatcgtcaacagctgcaaaggatcaaataaaacacctatcaagaatgactaagcaagatttttaaggaaaataaaggattcaactttagagaaacttactttcaggagaatgcaagtaattaatattgcttaaaacattttcctctccaaggatggatgcagacatagaaacgaaacgtggttttccatcagcaataatctacataaaattattacataatttagcattaaaatgcatataacattattcctacatttctcttaagatatatcactgcacctggggattatagcgactgataccactttctgaaagatatttgtcaagcacatctgtgtgtgagtttatatgcccatagtaaacttgctcctgtaatctggggagctcatcattcatcgcattaataagagcctcctaatcaaattaaaccacaaacataacaatgatgattgtgagtcaattgcaattacaaggaactaagattcaagagtataacaagaacaagcactaaagtaaagagggaaaaggaaactgaaagctaagaaagaaaatagcaattctaaaaaaaattgtttttttcatttttcattttttgaaaggaacaattctatcatgttgctagcctactaaatctttaattaattatccatatcaagagaagctaaaattacctaacttggtcattcccgccaaccagataaacctttcactagctttaattatgataggtgaggtgagaagagaaaccgggtatattttgttgaattgttctttgtcagtaaagtttttgggcaacctaataaatcagtttccatcttacccctcggttccttacactcaagaggaactaatttcccgtatatcctacttctacctcaagatgaaagcattttttaatagacaaaaaggatgatatggtagatcttaagattaaaagaagaagaaaaaaggatagaacctcagtaaaatccatatatattcaaaataattaagtgtaaataatagaatagtctagggcaagtgatccctttcccttttcaaaaaaataaaaaaataaaataaaataaccaatcgcaaacaatacctcttttgaatcgatgacaagtccattcattaacaaggaacattgcagcttagccaaacccagcttaatgacaaagagcgaagtttcctcagacagttccttgaaagtttgttccttctctagcttcagtaataaatcttgaggaggagattttgcctttggcctatataaacaaaatgacatcatacattcagatcataatgaagtgtgcatatttccaagttctccacaaaaggtcactgaagatacagtataagaagggaaccataacagtcattttcaatgggaaacggatactttattattattaaaagattataagaaagcatggacaagcagtccacgaacaacagaatataaaagaaattaaaaaaacagtctccaattgcttagcaaatgagcttgctataaaattcagaactttataaaacaattgaataattaacaggaaaatagttcaaaaagattgcaaagaagaatgcaaaaggagagcaataaatcttcataaaatagagtaaagaatcagaaa

SEQ ID NO: 36444 - DNA, 3394 bp, Cannabis sativa
aattatactattttaattattattaaaataaaaaactaaaatattaaataaaactaacactacgtggcttggcacgtaacaatcacctagtatatataaacacgttttagttatagaattttattgtttatttatttagttaattatagttaacatcatcaattgtttttatcttatcttatcttaatcaattaggtatttgcagccatagttttgtctatttgtgatatttttatataaataaaaatggtaaaagcctattcaactactactactaaaaataaaataataataataaaaaaagatagaacaaattaaaaaggtagtactatatttttagttaaattttaatttagaccctctatttttaaaagttataaatagcaccctttatttattaaaatgataataaatggttccttgaatacaattttagtcaaattttgtttaaaaggtttattttttaaactagattttaagtaatttgaaatattaattatgaaaaatagacactagggttagtcttttgaaagaaaaaaacatcaccaaaaatatattgaggagactatttttttatcatactaattattagagggttcttttataattttttaaaatagaaggtccaaaataaaattcaataataataagggacatttttgtattatttcgtaaaaaaataatctatcataggaattttttttgcatcaagtgggcactatcacaaacaacacaaacatagtcatcatttgtactagtacaaacattgaagggtctgatatactgaagcaaagtctctcaggatttgagttacaagatttgtgtcacatttgcaattgacccaaacgagatctttgtgttagctcttaactgaagtaaatagttagcgtttgtcatataatattagtgaacacactaccagggttgagcctggtcggggttaaggctcgtgcctagggcctatccaatccaaagaccctaaaattttaaatattttttagtactattcttcaaaaatacaacatatttctttcatgagggttcaataatatattttgtcctaaagctcataaatttttaaggcaagccctacacactattcacaatttaatatcgagtctcacttattttaatttaataaataatcatataataaccaataacaataatcttgatttaaaaaaaaatctcctaggccttaattatgtatttaagagttaagagagttccttattaaattgggattggtgggttcatcttattatagcattcatattaaattaataactccgggattaagggatccataatgattcttaattataggaatatatatatgtatatagataatagaaatatatatatatatatatatttatagagtaatgccaatatataatcatgatcaactaaatattataaatataattatatgatattatatttttaattgtttcaaagagtgcatgctaattaatctacctatcatataataaaaacatataattatcagattaattatgttattaattaatatttatatatattggccatatgggattgcttgtgtcagatattttggtaagaaattatgggttaagattctctataacacatattgagcaatatatattattattggagagagaatattattattattattataatgatgaatattggtgaatttttttttatatttttatttttatatacttaatttttttttttatttttttagtgataaaatttctttatttatttattttttttttatataaatttgacacgttagttaaatattactgtcaaatataaattggataaacactgtataaatgtaacagtaaaacatcgaagtcgatatcatacagtagtaatctaattggtatttaatggtaatatatatctgactgacaccttaaatttataaagaaaaataaacttaatagggtttgccaaaaaacaaaaagaattaagtatataaaaattaaaaaataagaaaattttgctgcaaatttctctattataattaatgaagtactagtctataaaattatttagaataattaatttttaataatatttagttatatttaatgatattcaatgtagttcaaagttactaattcaacaaattcatgctatgaatattgaatagttttatgtgataataatgataatgtcgactaggatcaaacaaaagaagaaaatttaatataaactcatgcatataaatatatattataaataattatatttatttatataaaataatacatattaccaaagtgtattgtttgtttgtggttagaaaatgaaactatgtttattactattattatatatatatatattgttaaaattggggtccattctaatgataaactaaatttcattaatttatattaatcaacttaactatagaaacaattaatttaacactttacaacaattctcaagattgtgattgatgaaatgacatctaactttaaaaaaaaataattaggaaaaaatatcatacaatttcttaaacctaattaattaaatatgtagtatatttatataaataaatattgtattaattaggaaaaacaaattaaaattgacatctttgtatttatgtctttagaaaatgatcaattaaattaattcaatacctcctaaacataaaaaaaaaatatatatatttacaactactctctaatatttaattatatataaaaaaaactactaatataaaaataactagaagaatattatcaattattattaaaaattttaaaaatcattatagctatctttatttacattaaaaatgtttataaaaaatatattatttacttaaagtctccaactttttttatttatttcttttcatttaaaaatatttatggaactttttaggggctcgaagaaagatatacacaattagcttttgttcccttcacatcataacttttttattattattattttggtagattcataaataaaaataaataaataattaattaaagaagggtttagcaatattttttaaaaatttttttatcataaaaataaaaatggttatagaatacatttttattttataattttagaaaacaaactataacttttattttttaattttatttataagtcaggtttaagtctggagccgtagtccgagtctaggactggggcaagacaaagtctagattctaagattcagttgggatcggagtccaaaatataaaataagagaaaaaactctttaaaaaaattataaaagtgatttttttttatttttaaacttttaatttttaattaaaatattaaaaacaaatttataaaatatatttttgaaaacgcaccctaaaaaacaaataaagaaaagaagccttgtaca

SEQ ID NO: 36445 - DNA, 2815 bp, Cannabis sativa
gtttatggaagatatgggaaataaagatggtgtatggatggcctatatatagtgcttatatggaataagatgtgggatgtagagtaatatgtgactatgtatacaaggcacaagggaccagagaattagtgtgataatgagagagtttggcttttttaaagtgtgagaagaaatgtgagggatggcttctatttataggccttaagttcaacattaacaattcccttaaccatatatcgtggctttaatctaactgtggttaatttatattaactaataaaataattcatctattaactacaatctctcaacccctccatactactcggtcaaaaccattaacaatgaactaattcacttgagtgagccgtaatatgactataacttagtcttcaaattttgaattttagagagattaactctcaaaggcttccacgtaagtattccaattggactaggtttattatttgaaaatttgaacctcatgcatgaagtaaacattcaagtgccacatttgaagactacatcaaaatattcaatcaactcctctccacgtgctccacttatttctagttttttttttagttgtcatctatcatctaataatgccacatatccaaataaatcatcaattatcttttgagtgccacttgatcaatattatttaatacctaaatgtataatatccacttataagtctaaagataatttaaccactcctcaatcctcttagataaaaacatatatttgtgtaagataacctgactactactctttgtaaaaccttaaccatacgagattattgggctgtaacaaaattattagaagtttttgcaaaaataccaagctgacataactatgaaactataattgatttagtaatagtttttgacatttactatataacaataacataatctaagaatttactatttccacatcgagatatctagactattgtaatagaaaataatctaaatattttggttgttacagtaagcattgtatgactatgctatctagttggggggttatgtcctacatggctcttcttactgagcgttagctcacgtgtactctgtgtctaggtaaaggcaaaactaaacagtgaggatgacgagctcgaggcatggattacatattaggggattgtcacgatgttttggtttaaaaatatttcgttaaagattatgactcgattacttttgtttataaatgaatcaagtgtttttattttaaaataatgagatctcaagcttcggttattttcaataaatcagtttattgtctttattataaatggtttcaaatggactaataagtgtgacgtctcaagaaatcaggacgttacaaacacaggcctagtccaccttagcctaggaccaaccttgtcaaactaccactccccatctcgaaataagatctcggaaacaacaaatacctcaaatccaaaagactgtcaaagaaaatgcaagtgagtcgtcgaccacccaaccgaccccaacaaccctgtgaccacaaagaaaactaccgaaaaaagagagcaaaactcacgaaatggaaaagaaccttcacttgtaaaacccaaagaagcatgtccatccttactgtccagccagagccaagaccaagccaaaaacggtcgaagagctctggtcggaggaagaaaaaacaagggggaaaagaagaaaaccctagcagagcctaatcattattactataactacatttttattgaatttccaattttttcttcttcttttttttataatatttcctctactatttatcctaattaatcctaattaagaagtgtcaactcaaaataataataatatgaaaggaattaaagtcccattattaaaaagtcccaaattttggacataattttaacttgtgttttattttacttattaagtttattatcacaatcttatagagtacgtgctatatgggcctaggttaagatgataccgggcctaagttgggctgcaagttttgggataacaatatatatgtgctttgttatggcctagattaagatgatacccactaattatagaatagaaataaatttcctaattcctatatatcatactaaacaaaagtgtatgtttatatataaaattttaaagatttaaaatgatatgatatatctatttcatgaagtggagttacatgcttatatggctttttctcaaatttatcttatttttttatttttttttttacagaaattttaaattgttaatgcttttatgttttttttctttttaatttttcaattattttactttttcattcccacattagtttggcatgaagagaactattttcttagtaaataattttagcattttgtgcccaacatcaatgtaaatataattaatataagggattatttttacaatttttctattttttgttatttatatgttattatttgttgttgttttgatgttatttagatgttattttcatgttatttttacataattttctgttattttcataaaaaatcgtaaaatataaaaaaaaattctttaaacgtaaaaatataatttttttaacaaaaaattgtgccttatataattatcccttaatataatttatcttaaataattcttatgttggagttctcctccaatttgtattaatagatcaatgtagtagcccaagcccaagaccaagtccaagcccataatattgatattcaaaattggggtatgttgaaaaataccttttttatttgtcaattaactaaatctatccctattagatatttaattaaaacatacctctttttatatgtatt

SEQ ID NO: 36446 - DNA, 8309 bp, Cannabis sativa
atcgtatcactttcaaataacattaaaaaacctagcataaaatttaatatacgtgcctcgaacgtaactatttgctagtatatatatatataactgaatatttatagcctaatgataaatatataaatgtatatatatgtacatatacttgaagcactgaaaagctattaattatcaaaagtggtaaaaagaaaaaatgattagaatatcttaccattgagtttattattatgataaagagttgaccatatatatgtatagatgctgtgatattttgaagcatgttgtacatttgtgtagctcgttaatattactaaagaaaatacatataccgatatatatacatatacaaagctctggtctccctatacttagacttaataatttgtatcaaagttaattaaaagaaaaagttttcgaaatttgatattaactgaaaaagaagagaaaagagatgagtagagagagtgtgttatacttgttgtatataaattaataaatatatattgtgttttgttgtaggtaaattttgtcggtatttttgtgagtcacatgagaacccatgaaccctacttcggtttgtcgtgaaaaaggggtgcactgttcaagtttcagtctcttgcttgctataacttctttccttaattcctagaaaattaataataaactaaatttaattatcacttgtttgcagtagtactatatatatagctactaatgtatactcatcactcttgccaaagctcaccacatgactactaattaattttacttttatatataaatatatatatgtggcagataatctggctatctctgactgaacacatttaattaatcatgaagctcgatatataccgcgattccatatatggtcggaaacagcagaatgtatatatattatttcagtacttatgatcacatcaatattctacaatttttattttcatcaaaaacaaatcatcacacacacatacacacacacaactataactttttataataattatattacatggatttagggttatgcctaaaaatgttcacgagcaaatattatgtcttctctatagaatcagtatacttttctttctttttcttattgttaatatataagaagatgataacagttttctatataattaattagtccaataggaagttgtgtgtatatatacatataacatgaataaaaatacactgcatttatatattgtggagatgcttctggaatcactagaagtacagtacactttattggatatatattatgcaagttgttttaaacatttcatatatagaattattatttatgtaattaattagtgtaaaaagtcagcacttgtatatatatgtctcttatttcctggatatttacctttttatctccactttcctctcatgtatctttaaatctataggatttgctttaagtgttggaaaccctagattggttgagtaaagagggagagaataattggatagttgagaagtggtccctcgagaaaacccagctagattgtataataaatatatataaaaatatatttatagtgtcaaattaatatatattgttgaaagcacaaaatctgacaaattctaataattttagtattagggtttctacaatcatcttttatgggaaggttaattaccccatgatataacatataattagtaattaaaatataagcatgcctgagattttattggattttcacggtatttcatgttatcaaaagccagaaaaatttagtggtccccttctagggttaaacaaaccctaaacctagtacatatctgtttgactgtaacagttaatttgttctaaagtgtcttgtgtatttgaggcatctcatattattaaccaagtatacctaaatatacatatcttttctccccacttgagaaaatctgtaaaatgcttggccaaatttttatttaagatataaagatagacagatacaaatatattcgatgcatggctgagcaagaattaataaagtgatatataattattaagtaaaagaatatatcgttattgccttgcctaccattggtacagtagttagtgatatctcattacaagagaaacattgattgatattcatatatattaagtgcaatggttagttatatttttagtttttattttatttttgtgtatttcaaatatgtgcagtgaattttaaaacagcaaccttagaaagatatatatttttttaaaatatgttcagttaaattgtaatgtttaacaaaattatagagacatctaatatatcatacacatatatatgaaaaagagattaaaaagtagtatgcgaaagtatatgaactatggacataactatatgtgttagatctaactaagggaactgcgtgcactaattaactttcctctttttcttgatacatgacattgaaggattataataagcaataatattgtatatacttgtgcaatatatgcgctaattaatcacttgctatatatatatatatatatcttaaaatgttatcttgaagacgtgatataggatgtacatttatacatgtgggaatgtatatatatgacaagtgatattaacattcacagatgtatatattgaatcctaatatataaattagtagtataacaggaaaaattatgagatcatgcaaatttttttgctgaattatgacacccttaattgttttcctttctcttaatataattgtaagcagaatgatggcttgaaaattaagtgtgtacattaccagtactgtaatgaatgtgtgtggctgacctaaaagtttcagaagatagaaaaaacaatgacagagcctgctgcctgattatgtcacattacattacaagatgaatgcagttatcttaatttccagtagccgcgcgcgactgtagtgtttcatgtgaagattctaacttcattttatcaaaattaaaattaaaattaatgtaaattggcaaactgatcactttcaatatatcttcctaattgcaattcggatttctatatatgagagatcatatcatgtatatttgatcatgtcaaaagttctttgaaactataaacaagagttagtagttcaaatcatttaattatagaagagacagagagactgagagatagatcaaattctccaaattgaaccatataaagagtaccagaaacataaactgtatatatatagttaaccttttctactttcaatcaattaattgtctttagttcttcttattaatttgaaagataaattgcagtacacacattaacacatcaaggaaatatttaaaattaaatcttgtgtgtagtgatataccgacggatctatatatgtatatgcacgaactaattaacccaaagaaaaaagaaaaaaaaaacaatcaaaaacaagtactcttgctcaattgataagtatagtcaaagaaaacttctcctctctagccagtcatacataagaaagagggaaagtacaaactaacaaaaatttaaaagataaatagatcaaataaaaaggaaaaagaaaagcttgagtagtacttgcctgataatcagagggagagagaggatgagattagcacaactggccggtccatatacatacatatatagatgatcatacactacaaaatgacaaacattacatatatatggcatattgtaataattcagttgtagctagctagtagtgtagtttttcattattctgctttcaccatcaattaagatgtggtctgaacataagagagttattatactgatgatgatcatcatcatcatcatttcccttctcaatgatcttaaactccataagagttggagtagtagaagtagtagtagtagtatttatagagagatcatgatgagggcgatgagaagggatagtagtagtagaagtagtagtatttatagtgggatttaaattattattgttattgttatgattagaagtagtagtagtagtagaagtattagtagcaatttgattggccttgtctctttctgcttccctaaacttgtgtaaataccttactataacctcagcgtagttatcaaaccctagagcagtgagagcccaacagatgtcgtccccattcacggtctttcgattctccttgtgacacttgtcagaagcttcgccagtcacaaaacttatgaactcagtcgcacactcttgcattgtttgtttcccttcctttgagatttttgctgttcctggcagaattcctttcattattcttcccacgtttgcaattggtagcattcgatcttgatctggatcaaccatattattattaaacttaatttattatatatatatatatatatttatcttgatcaattaatactatctctttctctctttgtctaactagttattctcaccactccttataaaaagagaaaaaaataaaataaaaaataccctgcttatagatgcattatatgtatatgtgtgtatatatatgatcatcatgttcattcttatgagacatgtcatgcggaaaacgtggacacaacttgtagaatttatagaatggtcattatgtactttttaatttcgatgacactagaagtaattaaacattaattgttttttagcctaattactgtttaatgtataacttaattttttataaatacatataaagcagttatgtgattaatattgattaatgaaataattaagaacatgtaattattaacttcctttaattattggcacttgaaaaattaatacttcgaaaaaaatttacgaaaattaagcaccacttttgtgtttgttccttaccaacaacagtgtctatatttaattttgatagtttgaaaaattataacctattgttaacatgtgcattatacttgtttttttgaagaaaaaaaaattgaatagtatgcaataacaaaaatataaggttaaaaaacatgattttttttttaattttggccgaataaggttgttattcaaaaagcgtgaaattcttttatttgaaatcgatatagtattctcaaacacaaattcattatttggttggcatgtaggaagagattaaatacctaagatagactaaccaagtttgttattcaaacggcgtggaattcttttatttggaatcgatatagtattctcaaacacaaattcattagttgggttgcttgtagaaagagattgaatactcaagatagactcaccaagtttgctactcaaaaagcgcggaattcttttattttgaatcgatatatagtattctcaaacacaaattcattatttggttggcttgtaggaagagattgaatacctaagatagactaaccaagtttgctactcaaaaagcatggaatacttttatttagaattgatatagtattctcaaacacaaattcattatttggttggcttgtaggaagagattgaatacccaagatagactaaccaagtttggtatcattaacaacaatacttatcttttttgtaataccaactctgaatctaagagtcatattttcttagagtgtttgtatagcaaaaacatttgtagtagaatgtttccttgggctggtattattgtcaatagcttgaagctgaaaaaatgattgaagtggataaagaggtgtcgccaatctcgcctttggaaggaggtttatacagctattattaatgctgtagtttttgtcgaatttggaaagcaataaatattgctttttgggatgcaaaaatttatagttttcatataattacaaatagaattaagaaagaggtttgtaataagttttctcattttaaaagagagaaaacatgtaaagaggataggatttagtttgacaagtgaagtattctcaactaagttattttgtataatggttcttgggcaataaaatttttctcatttaaaacaaaaaagaaacatggtttttttttctcagtggttcaaatatgaagttaaacatgtttatatatacatcttgcaattaattgttaattttaatctttattttcagcatcataaattatttaaattttttcataaattggtagtatgtctattatacctttattaatatatatttaaactgtagtatagttcctccaaatgaaaagatctccaaaagttattctggttatggaaagttggatgtcttccgaaagagcgttcccaaaaatctaactcttccatctagaagaagtcacgtggaattataggtgtcttccagaatggtatttttggacgcctatcatgtccacctaggaggagtctttagaaaagctagtcctcctccataaaggagttctagatggctagttattccctcctagaagagagtccaagatagctgactccagttgtgtttgtcctatccaagaagattcttcagcgtacgctttggtctcttttctaagaagtgtatatctcatctggaagcactgcaacttaagctgatgtggagatattttatgaggagtttgttaagcttgttaagccgtaactaacttaacaacttagcacttacaacgactgactttaggatgtatatcatgaacctataaatacaacccacacatagcattttaaaagaatgaagaaacgagttttgagaggtgatcttgagagagaaagattgagaggtaaagagagagagaggtcagagaaaatagagagattggtttgggttttgtatgaagaatcttctgtagataaagaagattcttgggtaagagtgtgagaaataaacactttgagagaattcaatacagaatcaatctttatacactattcttactcaatcaataaagaggattttggtggtattctagaactactgaagtagagccattgatcatatcgatttataggacttgaaccattatatatcttagtgttgattttactgatttaattgtcttggggtttaatactcctttctgttagtttaattatggtattaaattgggtaagcagcaaaaaatttgtatatctaattatcattgtaccatacttttaaagatcttcaaatgtgtatacattaaatcaaaatataaattacagattaatatatatatacctcttgaaactaagttcttatcataagttgtatccattagagttgattagaaactcacaccgtagtcttctgaatcgattcaccatacacaaggaatagtatgggcgattaggataaattgtataatttgttcttgttgaattctcaacacatgagtaagaacaattctagaaggaaaaataatttccttttctccaagttaatttcaaaaattatcatgtgaaaagcttgatctgttagttcctaattaattaaatcatatttaattatttaaataaatatctataattgaattcggttacagatatttaaggtgagggaatctctcaatcacttgagagaatatctcaactaactttcagggaatatctcaaccaacttgaaatatctttaaaccttttttaaattcaaatacttatctaattaaattaattaatttatttattaacccaaaaagaaaaaattaatagggacacactactatcaggtaggcgcctatatatcttgtctcaattatgacaagatgttgtcttttgtcctaacaacttttgtcttaacaatttttgtcttcacaaaagttttcttaacaacttttgttttttttcctatttaaataatttgaaaattattcatttattaataaaataattattattttttccaattcaaaatatatatttttgaacaatattatactactctttatccctacccttaacagtatttcaaagtggcaattcggggaccatggacttataattctaagctccaataaactagattatttattgagtctaaccaaataattatgtttattaattatatgattaactccactataaatatagaattgaactcttagtaattataaaatcatataaactgaattttactacaatgttcattgatgcaatcaatgccagtgattaccctccttgcgtcggttcgtaaatagttttgaacaaattactattttacccttctaattacttctttatcctttaatactattaattcactagtagaaatataatttaaatcccatctaaatatgctactttacagttgtagaattaacacataaagggaactaacatttgatcaattagaaaagttaaggtattataattgtagatcatatttagttttgtggcctaaataaaatctatttccatataatcagatttattaattaataaaagatcaaaaataattttataatgcatggttcatatgatttatttc

SEQ ID NO: 36447 - DNA, 2462 bp, Cannabis sativa
ggagataaattcatatgtgctgtaaggaaaattgaaaaagcaaacgcaatataactaaatttaattgcacatagtttctatattgttctggcgaataactgttttattatagtagttggtttttgattactaatctcaaattaaggtaggtaaacactagaaaataggtcaacagggacttagactgaaaccaatctttcaattaataatattagattggcatctctcattgtttcccaattacaattctttctataacggagtaataggcctcttatcctggttgttaaactctacgagttagacaaatctatttatagaaaccccacataaggcataacaaaataaatgaattattcacaagttataatatcagtaaaaagtaagacatcggattttcaggaacaaatattataacccaaatggaacattttctactactcaaaacaattcaactaccgtcacttgtttatctaggataactagtgtgactttttaagtgcatgaaaacaaagtaaaaagaccataatcagagataaccgattgaatgtctttctttgtatctcaaaaccaaaacacaaatgtttgcttcagattttaatcaattaaactttcgatcttgaaagcagcagatccataaaaataaaacctacgcatttcaactaaacaaactctcccaattcaaattctggaaccaaaaacagtaaggaaaatttaaataattgaaacgaataacttgcaaacccagaaaataagcaaatcaggtaaatcaagaaagaagaaaagctaaaacgtgaagcaaacccgaatcttacctgaaattcgctcagtgggttgagttcgtcctcgcctgacagcaccaatctccaagacaaatgaagtacaaagaatcccaacgaaaacccactttaaaaaatccattttcttgaactctaaattcaccaataaggagataaacgcaaatgggtacttgaagatttgagttgtgaatccgaatacccagaaatgaaaaagctcaaaaaactcaaaaggggcaaaatgggttgtgaaggattctagtggttgggcattgtgaagatgaagtaaagggtttgttttgaaggagtttgttatattgttttaaggatgggaagatggaagtttggaagcataataaggtaaagcttcgttttcgctattaggttttgaggcttccaggcaagcaaggcaactcaggtcccaagtcccaacccaacagagggtggtggttgtgttgtgttgtgttgtgttgagtttgagctgagctgagagagacttggggaaagaaaataaaaacaagtctattgcaaaactggtcaaacttattggtggacctactcacctgctcaacaattctatatttatatatcttcctatttattattattattatatgtcatactaccaattttacaactctttaaatgatcttcttaacttctttcaaaaaaaaaaaaaaaaaaacatctccaatgtaagagatgtaaaatttgtgttaagtaataagtatattataattagctcactatttatattaaattataattagtggtattataataataaaaagaagtaaaatttattgtatgtaaaattcagcataatattatataatttagcataatttttaacctctgtcaaaattaacacaagttttagaacactactaaagtaatattcttttaaatatgttaaaatataataacatactacttttttagtattttattagagatgatgttatatataaaaaaaaactattattataaaaaataaaaacaaaaagccatgatttttcactttttttttttttttgaatcaccatgatttttcacttttagttctatcaattatcaaatatgtattttgcttatttatttggtaattgagtttattaactctaaaaattgttttgcctcttttattttactaattgttgatcttaaattcacaactattatctaatcattctctactaatttaataataataataataatcaatcaaccagtttaattgcctatactaataatgaagacaaaaatcaaaatcactcaaatttattagctttcactaatttgaacaagtgtgagttttcttagaatattagcatgtttttcattaaaaagtgtctcatcgaagtcacttgcattttaagaaatacacaaatttaaagtctaaattattcatgagagaccaagcattatttaaatttcataagaataaattactgcgcaacgtattaggggcacatctagggatacgcattttctctacggggatgggtcccactcttaatggggtgtggattccccgcggagacggagattacttttgtccctgaatgttaaacagggcaaaaacgggaatcacactccccgccccgacgggaccctttagtattttatcttatatttttagtaatattttattttatttttttg

SEQ ID NO: 36448 - DNA, 3376 bp, Cannabis sativa
agcagcagcctcggcggtggatccgtaaagattaagatcttcgctcgaagattcggtacctgctgctccgccaccaccgaaagcaacattcatcggctgaataatctgaggggcgccgtggttgaaatacttgtggtgatggtgatggtgatgaaacccagatggagatggcaatggtggagggagttgtagagcattcagcatcagagtagtagcatttgtacttgacgatcttcttgaactcggactgtataattgagactcaccgtcgatctctttccggtgaaaattccggtggcactgacaagcagcgcatttgagagcttccagagatccttcttcgccacttggcatgaactcaccgcagccatcgtagatgttgccgccggtgctggccgcgtggttcttaaggcattctctgtacctgatagcggaggatgatgtggttttggaggaagacttattggctgaagctcccgaaggcgaaaacgtcgtcgttatgggcaaggtggtaacccgatctgggtccggatctctagacccatgaagctggccggtttggttatggaaacttaagcgaggtgggtagttagtgtctagggtttgattagtgcaactcatagtgtttgtagaaccattatgattatgattatgattattattaaccgatcttgatcttctttctcctcctcctccttctttactcacatgggtattatatgtcaatgtcccagttggtgacgtcctcatctcgttatcttgagctctaaattccatgcttaactcttcaaaatctctcctttaaatccccaaactgtttgcattaattaaaataaataaataaataaatatttaaaaaaaaattccctttcactaatctcttgggattttaaacatattatattaaattacgtaccacactatcacctaaatcaaacaatgcaatgtcgtgttatatatatacatatatatttagcttaagaaaaatgataaagctaaaaccaaccttaccaactcagaactgcgttatatgtatatataaaaatcaacagttcttaagataaatgggaaaattataaagatagtagtaacgtaatcaagtctgtaagcagatacatatatatatattctaaaataaaataagaaaaaatgaaaatcaaagctttgtgtatagaatgggaccaaaaatactcacagtatgtaagaaagtgagagccgcaagaagctaggtagcacctttaagaatgatgtctggacatagctatttctctaatggtcttcatttaggttaagcaaaagaaaattataagcagagagagagagagaaatggggtattagggattgtgcttctgtgctaccaacaagagacagcttggttgcttacggtgcagccagaaggaaagataagagagagagagagagagtgcccaaaatgacaaagagatcctgaccctgatgaaattaaattaaaggatagtaatagtagtactgcttttgaattttcattttatttttattttctgaatttgacaaaaatgaacatataaaaatttaaaatttaaaaaaaattgggggagtattgtttgcagaatacaaaaacaaccgacaacgtcatgttcagccctctcccacgccctgccaactgggacccatacccccacacccttcattattgcctctttccatttcttatctcaacacagcttgacccatcaaactgacccaaacattcacatttttttgcaaaattttctctcttcatcatccatatccccatcctgatgggacctttttaattttttttttaataatcctccaaaaacccatgtcacaaatctaaatgtttccttaattaaccacatttttggaccatccacatgacttaattaaacttttcaattataataataaaatagtaatcttttcaattaaggtcatgtttgttgcattagcctaatgcttgagattggattaaaattgatttctattttgaaaatatgggagataggataattttgtccacggcatataatttgtctctttagttcggaactatattattattctcccactaaaagagtgccttaaaatagtctttttttttttttttattttgtaaaataatgtattttttttttgtatctattttttcatttgaatgatattttattttataatgtacataaatctcaataataatatttattattcttaaatattagttttactttatttatgaatataaagtattattttaatttattacaaattatagttacatttaaaaaaaaaaaaaaactatttgtactagatctacttttatattagactaaacacaatacagtattaaaatatttaattcaatccgcatagtatagtaaaagacatacatacatattggaaatttttgaaagcgtgtgaaagggtaaaaaagtgaaaagcggttaaatggtaaaaagaatatatggccccacatgaaggtagaggttttgtcgtgttactttttctgttttccttttcttgtttgagtgaaattgagtgaatgagagagttgagtatgagtatgagtaaatgtgtatgtggtgtgagaatatatttttgggtcaggggtcagggtcagggtcagggtcagggggggcaggctaaggtaatagcaatataggagcagaacatacaatatatatacatatataggaagaggagcaataagattgggtaagggatgtggcttctggtactgcgacacactctgatacaccacgcgcgattaccaccattacctctcagcctcaaaaaccaacgtctctctttacctttctctgatgcaatcgatgcctttttatttttgtctctctttccacgtatttgcattggtacttgtttgcttccttcttattatttgttttttcttttttactattcatacctttggttggtacaccacaactccaccaattgaaattcctttctcctttacccttcttactccttcaaaattgggatttttttttttttttgaacagaacaaaattgggattcttaaaagaaaataaaataaaaatgaaggattaaaatagcaaatatccaccccatgtaaacaatttctattttagagcattattgtttatttattttcattcaaaaaaaaatgttttattatttttctcttgaaattaattaataaaatatatgtcaaaaatatagtatgtaagtttattttaatttttaattttttttttaaaatggattatgataatttatgttgaagtatagaatgcaaatttgctgagagtttgatgtagattttttttttttttttgaaatgaaatagcaacttcattgaattaatatcattctgaatacaagagagccttt

SEQ ID NO: 36449 - DNA, 4918 bp, Cannabis sativa
  modified_base (3748)..(3768): a, c, t, g, unknown or other
  modified_base (4868)..(4893): a, c, t, g, unknown or other
cctacctgccgtacacggattccattccgtgttttgcacatttgggcacaaaatcggctgcctatatatatatatattaattgtatatgtatatagacgtctgattagaatgttctcttaaaatacaatatactaattaattactaaatatagacaataacttaattaattaacttataaacccttcgatcatcatcatccaataaatgaccactacattgtcttaattaattataacattatatatattattatatatatatatataactgaaatatatgtagtacaacctgtacactagtctaactatttataaattaatttaagaaacccctcaaactcaaaccccatgttgtctaccactttcgactcattgatcttctatcatcattttctttattaatttcttcatataactattttaatatatatatatatatatatacatataatgatagtgttgaactgtaaacgatgccagcttgaataaactcattggaattaattcaatcatttcacacacatattatatatatttatatttaggtacagtactatatatatattgttacatatatatatatatcttatatactatagttttttttttaattttttttttcaaaccgcgtggggaatggaagctctcttatcatggacaaagaaacttgtattggcccattgaaatataaatcaatggagtagacactacttataattttaattatatatgtacattttaatatatacatacatatatataatatatattttgtcttgttcccactcaacccgggagaaggggaaccccttttggcttgtattgataaatatacatacacttaatttgtcctttttaattttaaggttgttaataattaattaaacactatatattgttttcttttaattataattaccaacctcttactttgtgatttttttggacaattaacttttaatattaaactcaccataaaacattggttttttattatacacaaacatataagaataacttttaatttattatataaaaaattaaatctaatttaagcgtattataaataaaatttaggtcaattttaaataaaaataacatctaaaatataataagtatatattttctaagtgtctattaaaaaagtatatatttatataagaataattatatcttaataaaaaatatatataatttataaatttatatatgtaaaattaataatacatgtataaatattatatttatttaaaaattaattttattttaatatatattattaatgatcacttattgttattgttaacattaatttgatatttttttgatgttttgatttttttacctttatttattagttataacgtccttataattaacctataattaatttgtttcatcctaagtatgtatatgaaaagtcattttaatttagtgtttttggtcttttgttttatttattacttatatgcattaatcgatatatatatattttggtaatttatatattagtattgttattggacattagtaatggtgtctagtatttttttatatgtgtcgccttgcaaatattagttagcgacacttcttaaaagttattgcattaaattatatgagactcgatacttagttggactattgtggacattttcctacatagaataaacggtagagtattaaaccatatataagaacatgagctactgaactcatcaccaattggttttgagatagacccatataattctcaacatgatgtcagagccatatcccttgcaggcaagtgattctatctgatctgcacctatacagataatgaccatgtcttctctgatacggttcaagattggtgagcaactccactcatcacaaattgggatggaacctcataattctcaacatggaccaataataatattaacacgtaacaaaatactagacgtactactggtacttttaaagatttcatcttatataaatgagcattgctattggatactgtctagcacattctgatgtagatgtgttgtattacaattaattaacgatactttctaaaaatattatattaaactatgtaggactcgatatttaattacacaaataacaataatgacacgtaaaaaattattaaacaccactatattacaaaccaaaataatgaaaaaatgctgctcgtgctttattcgcatgttactatctaatcatttcccactatacatctttcatctacatatctatatatagatatatatatatatatatatagtactactactcattatttgaaaaattaattttataaaatagattataattaaggaaaagaatgtgatgattttcatagtcggcattcacatcgatcttgggagttggaataagatgataacttaaattaaacaaaattatgcagacattaattaatgtattaactcatcatcattagaagtgtgaatcattatactaataattgaatttaattaattgataaaactaaatgaaaattatatatacatattaatttattattatcaattataagatagtactcacattaagtacgtattatatatagtattatcttataagttaacatgcatattatttgaattaattattaggagaattattcttatatattattttttaattatttttttcaaatttacaatttagattggttcagtagtttttatataattactatatagatttgagttacaatttagaaattgctcctataatataatacgtacgcagttaattttgaaaatgtctacctatgttattatatatattacaataacatgtatatataagatttcttctcgaaataattaagtaattaatttataattaatatataaaccgccattaattattgttgtcaagaataaaaaaaatgaaatgttacatttaccaactcttgtaatcgttgaaacattgacctttttgttaggtttgcacttggaagctacttagaatttgtgccttgcaagataaaactcaagtacacatcaattatatttaaatattataaatatataaaaaataattgatatattgtatataaaaaaattaatcatatatatatttaatttataattataatatatcctataataaaatcccaccttattgtattgatgaccaatatcatcattgctacatagactgcagtttattttttaatatattatttaattttttcttttaggggattggattgtgtggtcacaattcaatatataattgtttacacataataagttattcaacttctaaagaaaactaactaaaaaaattgatataataataaccgaaatgcaatgttcaatatcattctataataactatatatactcaaaaatttatatctattaattcatttaaattactttatatatataaatgataccaatttttaatttatataatgcataattgataataaaataatgaaataatccacaaagtattcctcttttgcatcatgcatgtgttgtcttattccccgcgttttatttttttgtttttatataattatagggttcatacttacttcttaggtctttccaaaaaatatatgggaaaaattatttcaaaacccataataataattattattattaactatatatctagacccatatattatttttttaatttttttttcaaatttacgatttggatttctaaagctgcagcgctagttgcagtagggtttttatacgattttttgtnnnnnnnnnnnnnnnnnnnnnagttgcaataggaatttttatgtagaattctgtaaaaatgtaaaaaaaaattatgagaaacctctaacaataattctctaacactataaatgagtggattctttcttgtaaattcatacaattgattttgtaatatattattatattttatccatatatgggaagtctctaaattttataattacttgcatttatagaagtaagtacattatacaatttggaagccaattaatctatcactttttatacatttttctttatgaccactctccttaatattatatgatagatttttttttttattaaaaggcatttatatcatcacttatatacatcaatattactacgttaaaacatatatattttgaaaacaaataaataagaataaaaatgattgttaacaatatatgattaagaagaataataagagtgtatttttatattattataacagttatttttttttttttttgcctgaaaataatatctgtcaaaaatcatataattgtcacgcggaggaatttttgtacccaatccatccgcgttattaaaattattattattattttgattatatttgaatgatgattatgttatatataatatgaattaaaaaaaattaggcaaaaataaaaaataaaaaataataataataataaagggaagggatttggtgagagaaaaggagtggtttggttccgtaatgggtcgtacagtcgtataatgcatggaaagtagtacccaccaccgaccccattccatacccaattggcccaatttccatctgggcccccactcctcccatgtgcctctcttctcttctttcttggattacacgtaagcaatcaaactatattttattgtttgtttgaaaaatgttaaaaaataatgatgctattgtctagtattttattggataattacaccaccaactgaaattttaaattttttttattatttatattatagggcagaatttttttaaaaaaatactgtataagtttttatactgtgtactgtgttaatacggtttttttaagttgttccactgttgtttttagttgttctgttcagcgacggacctagtagtgttgatatgnnnnnnnnnnnnnnnnnnnnnnnnnntattgtcttttaaaaaattaaatgt

SEQ ID NO: 36450 - DNA, 5597 bp, Cannabis sativa
agcccccctctctccgtgcaccagcccctctctctcttcgtctctctcaaatcgaaataaaaaaaaaaacaaaacaaaaaaccaggggtctaatggtcggaccatggagaccaaaagatttaattttactaatctattataaatacgcttttcttcaaaataaaaataaaaataaaaatgccatcataataaaattaaactaaataaattgtctgaatacaaaaagaatcctttaagggcttactataacaaattccactagtaataattacaatttacaagtaattaataataaaagaaaaaaaaagaaaaaaatatcgtcttaaatatcttgatgatgataatgtttatacaattacataaataaaaaatgtctatacatgacatgactattgattagaaatcacatttagaaggcaaactctattatgaagaaaaagcctaaacaacccttctaatccattttcaagtccttccatggcaacttctaaagcttccaactttttcaatacatcttcaatcttctcatcattaccattttcatcacaactcaacaaaccattcattgccatgtccaaaccttcaaactcattcatcacatgatgatgatgatggtgattattaccataataccctttgtgaaccataatagaaaccaaagaccatctacttgtcttaggcttccacaaaggtgttgacaaaaacagagaaagtgaccccaaaattgaacttgtaaccaaactagtttctctcaaaactctaaccacagcactcaaatgggtatctaaattaagaggaaagttacaatttttagtaaccaattgcccaaaaatattggaacttttcttcattttttttctcaaggcaaagtaagcactcacactagtttctattgaagaatgatcatcatggtcagattccaacaccttggctcttcttatggctgattgaagatctttgacactctgtttaagcattgaaacgacatcgtttgtgttgtgacaaatgtctaagtagctaagcgagtcatccactaactcattaacccatttgtgttgttggtgctgagccaaagcttgccgagtcaatggtaagcttagcaaatcttctagttgtccgtacaagtctttgagagaagagagtgagttacatagtgatgatgatgatgatgatgttgttgttgaagatgagatctctttgttgataataaggttgattttgtttaactcttgttcaactttttgtgttgtggggtgtgatcgaactggtaaggtattagatcgaatgttgtaaagatgtttttgggtgaaagaaggcatttttattagtatttgagtttgttgaatgagtttctccacaatttataacaaaaagattcaaactttattaatgcccacgtgtcaaaaaattgtggggttccctttgagttgtgatattgagatatttatgtatgtgtacagagcaaaagaatctaacttcattaatgccaagtgtcaaaaaattgtgggttttttttggaagttattatattgagaatgagtattgtgtttggttattaatgtttataacgatattttttaaaaattatttttttaagtttagatttgatatttaattatactaatattgatatgacatcaaacagagtgttaggtacagtaatattttttagcaattctctattaaaaatcgccgaatatgcaactaaagtagaaataaaaaatattatgagtatctaagaataggcagctgcattttaagaaggtatttaaaaataaaacaaaaattaaagtgagatccaacaaagtgtaaaaatgagagaaacaagatatttatgtatgtacagagcaaaagaatctaactttattaatacccacgtgtcaaaaatttatggggttgtgttatttttggtaagttttgaagttatgttaacttgtcacatctttcacccaacctttaacactaatagagacaatgatgattatgtgtatgtgtacctctctaaaccatacaaagggttctctcatcatttttatttaattttaattttggttttatttaactaaaaagaaaatagatttaattgccatttggcatatatgtgtaaatggtatagaaatgtgtctcttgttggtttcatgcaacatagcagccgactaaagccaccgatttcttgtttatatgtcaaaattcattgaagttggttaccaattaagaaaagttgggataagagtttgtggaaaccaagagatcttgaaagatcacctacactttattttatcttatttatttattagttagtttagtgaatgcatatatgggaaatggggtttgggtttgggtttgcttttctttcattaataaaatgaaagaagaagaatagaatagaatagaaaacttttttgtttattaatatttggtgcacgagtgagtgacatgtttcatctatatgtcccctataaggatatcaaacctaacattaattttattatagggagattatggattatgtgtacacaaccctctaaaaatctaaaaatttatcaattcaattttgttttcaatgattgtgtttattataattattttatattttgtaaaattttaaaatttttatttaaataatttatagtataaaaaataaacggatctacttatgtagctttgggagctctagcctcaaagataaaaaaaattgtattaattgttttttttatttgataattaaacacaaaagtaaaatggtatagaagctcccacaaatatatttatagtaatttaatttaggagtgtacaccaatttaattacaatcgaccgatccaattctaactgatccaataaaattagatatctaattataattggatcggatcggatgaaaattttaaaaattcaatcggatcgaatcggttgttggatgggacatccgatcccatgaataaccgaccaaactgatccaattatcatccaatggtcatccaattatatttgtatatttttaaaatacatttataattttatatatttattttaaaatatattaattgatttaatatatatttaacacatgacattaatgaaaaaatactttaaatttaaaatattaattctcatattcctaaacggtaataaaattgttaatgcgtattgaataaattttattttttagcaattttattatgatatcatgagaattaggttgaactaaactaatatttattatgtatattgaattattaagttttaaattatatatttttctttttaataatgaaatcaacttaaatggtagctaaaatggattagatggattcaattcaatccaatagaaaacaatcaatacatctaatggttggaaccgatccaatccaatacattcattggatcagatcggatcagatcagatgactcaattcaattagattggatcggatgaaaaaatttaatatacaataaataattggattggatcggttgagtctaaatccattaaatgtgatccattggatcagatcatcactgcacataacagattattttaaactctattttggatactcaaaaatttataaaattttataagttaatatctcaaatttatatgttatttgagtttatgcttattaattgattagttgcctcttaatttcttgggttggtttcattaatcctactacatactaacacaattgacctatatatataaacatatatatatatatatatatatttaaggtctaattatatatatttatatatgaatgaatggctatttatggtacatgtggaaggctcttctcttcttcttcttggatttttgacaaacttaggtgacatgcatttggttttaattagtatatagattatagaatataattatatatataatatattataatatacttaattaagctctattgactattgttgaatggaataatatagttataaataatggtactatttggttttggttacatttatataatgtgaatggaataagtatagtattgacaaaattgttcttatattactaaaaaagcaaaaacaaattaatgatatagatatttttaatagtaatggaaaataagattcttattgggagaaaattaaataaaaattgtatttgtaaatataatccttttttatttttattaaaatatatattttatttatattaccaagaacactttctgagagttgaattgttattttctcccttgtccatttgcatgagacttatattccacatttttattattatttgttaaattaatatttttgttgatccctttttgaaattttctctcatataaacattctttacttaattacaataacaattaaaaagaatagaaaaatgtattgcataacccttaaaaaagttgttttggtataattttattttttcggtatttaagatagtttttttttagttctttataattatctgtattgtggttatttaagattatttgtaaatttataaaaaattataagtagtctataatataaaaaatacaatttaaatattttactacacactgtttatttatatacatgataagtaactgaataaattttatttttgacactataatttattcgaatatttttaaaactaataaacggttttaaataactataacatacaagtattaaacaaaataaactaaaatattcttttaattaatatcaagacagataaaaattaccaaaataaccttggggatgtactctagatctaccaaaaattcaaaatattttgaattattgggagcacctggccggcttgactgatcttggtcatatattcttttgcattgaaaagaaaaaagaaaagaaaaattacaaaaaaagaaagggtatgaaacaaaatcccatgaatgagaaagtgtatacacataaaaagctgcataatatagtggcttctttttcaaacacaaaacaacaatttttgtttggcttttgatcaaattaaagtggctttgcttagaaaagagagaaaggttaaaagataaaagatgcgaataaatgggagatatcaatatcaactatatatatatgtatgatcttatttttataaaaatataaattaactaatcacatctctcaacaataaattactttgaattgtgtgacattaatatattaaaaaattctacaatatacttgttattgttacgctaatataggagaattttttaatttaattttttttattatctacattatagttatttaaaatatcttgtaaattttttatttttttttaaaaaaaataaaacatgtcataaagtataaaataaaagagtcttgtgtgcaacagactgtttgaatcttatttttagtgttatattatatttgcttaaatttttttaaattaaattttttacagaatatcttaaataataattacaatataaacgactataaaaaaaattaagctaaaaaattctcttaaatgacaaagcagatacgaaatgtattgatgacacctaaggctcgtttggaacgccgtattagatcgtattgtattgtattgtattatattgaattgtattttatgcaatattttaatgtaaaactatatgtg

SEQ ID NO: 36451 - DNA, 3475 bp, Cannabis sativa
aatactttgtcacacttaattatttaatctacatattatattatataaaataatataacattacatacatatttataccgctaataaatattgaatttataacgcttaaaaattttattagttatgccactatttatcttcattattattaatagatgaggatagagaaatactaaaaaaaaatactagtagtaatgtaattatatataaagatttggtataacaatttttataaaatattattaatctttaataactctagatcatggttgtactagccaatactagtatgtaatagcaaatacccataataataataataaatataatctaagagtatatttggtttaatgtaacgaaaattataatgaaatcattattattattacacttaacattataatatatagtcattacaatatgtattgtaattcttattacattataaaacaaatataataaaaattacattgtagaaaatacctcttttgttatttttttacttttatttaaattttcaatattaaaattattaaaactaaaaatattttttatcaaaataacatttaatttattcaattaaaatgttcattacaaagttcaaccaaaaaaataataacataatccctgtaattcttattctcattacattacattaaatcaaaacaaacatatataatacaagtgagcaacccaaacataccttaatttggtgagcaacccacaaccctatatctttatttttttttttccaaataatatgttacaatatattgtgtcatgtatcatgatataagatttgtttcaactttatttaccaaaacctgcaaagttaattcaaacaagtaggtgaggcctagtatagtatataggaaaatttgagtttcccaaaaggggtttgctttagccaacgtgttgtcgttttaacataataaagaacacaaaatgtgatgtcgtttaacattacaaagaaagaaaaaaagtactgcctatgaactgaaagggggttggggtagttattagggggctatgatatcttttactatttacagctcaattgtttaaaaagagtctcatctcatctatggagatctatcttagtatctagtagtaaaagttgactttatgataaaaggatattttgactttgtttattaacagttacgtctagctaggttattatttgtagctaactctgccaaaaaatctaatggaaatttcactttgtcctctcaaatacttaaacaatttattttattagatagatatggagtacttcttctttagccaatgaacaaataaatatatttactttaccctttggttttaaatcgacaattaaatgaacaacttctatgtttacttttactttttctttttcttttttttttttttttgatgagtgcaacttctgtatgtttcacttggtattgaatagaaaaacacaaaagttatgtttaagaaaaactcttaaattaacttaaatacaaatacaattgttacccctaaacaaaatacaaatacaattattaagagtggtttttgtaggaaagacaattatactttgggtacacaatcatttgtgatattgttatacctaaattaatagactaataataccctcacttgattaccttctcctaacaaggtaaattaattagaggtttttttttatataaatatttatatgctaactcttatttagatccacaaatgaccgacattgtccgataaaaacgtttctaataatatcattagattattagaaagaagaaagtgaaagccaacaatttaacttatagtttatgcaatgcataatcctacttgtaagataagttttcataaatatgagccatcatcaaaattcaaaggactaataatttagtactattctcttcgtaagggtattatctattgtatttttttggaaaaaagaaactgcatttgtagatcttcttcaactttaagaaggacctttttttttgtccaacactagaatgaaagtggtttgtgacagaaatgaccctcttaaagctttttaatggcccatgcatgcatgcctattaaagagtgtttatatgagtttttatttaagtatttttcattgcggtaaaataaaaatatgaaagcctcttctaattagtttagggtgtcgcttatttcgtgtataagaaaaaatagttacatgtatagtaaaatatttaaactttattttgtagtactgttaactatttaaaattttctaaacatttataactgattctaaataattacaacctacaacatcataaaacaaaattacaaaatttattttgaatgtcaaatataaaaaatttactaaaatacttctttaaaattaaacaatatataaactaaaactatcaccaaaattcacacaaagatagagggtggggtggggtttgtctcaaaagacatttgtgtgtgtgtgaaaaccagcacaccgtacaagtaaaagtgccaatggtatctaaaagtttcactactcaagataaatggtcaatatgtggcataataaaagccacaaaacaaaatctaaaaaagtcaaggtttagctaattaatttgctgtcctatctatcttcttctttgcaaaatcataccctcatagacaaaagtcaagctatttggtttgctttaatcctaagaatatcctattcctatagcataaatctccaaattgtttttggctaattatctaattaacaagtcaactattttacatccctcgatcttgtagtaaaaaaaaaaaaaaaatcttgatgtactcacgagttaaggtaatgtaactgatgggtttcttgtgagttacaactcaagaaccaagaaatgtcaactaattggtatcatataaactattcatgacaagggtcaagtatgatatgacatttttataataatcttgtctacccaaaaatctagaattaacaacaaattaattattattattattattactttattttttgatgtattttttgttacttgaaagagtcaactttaaaaatgaaagaaagaaaaggttatggggggtcattggcattggcatccaatataggtgtttgtgctatataacaattgaattgagaaaagggttccctagaaaaaagagtcttcaagtcccaacaatggaaaaggaagagtgccctttttgtcttttgaagagaaaaaaccaaggcatgaatgaaccatgaacttaaagagggattcatagatattggggtgtgagtgggaaagtaattggcattatcaaactttcacttattgtattgaagaaaactatggagaaaggttatacaatcatacccactccatctatatttccatccacagttgtctcatctcaactctttatttatttttaattaattaccaacattgctttcagaaaagaaacggtgcggtttgtgggtcaatctactcattcatgttgcttgccatgtcttttttatcttttc

SEQ ID NO: 36452 - DNA, 4570 bp, Cannabis sativa
atcatcatcatcatcatcaatggtctctcactcccattgctccaatctcagccgttgatttgatctcttctccgatttcacgtaccttatgttcttcgcttctagggtttcactcccccatttctgcttcgcttttttactagactattatgtcgtcgacggccaagatcaatcatcaccggatcaacggtcagattttaccccagccgtgtactcaccttgctgagttccgatccaccaacgaatccaggccgttccgggctttccaggattgtctacgtgtcaagcctcccggaggtcgagctgcgatccggcgtgaacccaacgaggttcctcattgcggcgcgtgcggtgacgcggctcgggcgaggctctacgcttgcgtttcgtgcgcttctgtgtcgtgttacgcgccttctggacctcttcatgcggtgctccacgctgagtcgatgccgcctgggcatgagatcgccgtcgatgttgatcgagctgaactcttttgctgtgcttgtagggatcaagtctacgatcgggatttcgacgctgcggttgttttggctcagacagcggcgtcgacgcttgggttgagctcgtcttcttcgacttctgcgacggaggtggcgtcggtgattcggtttcagcatccggcgaatctcagaaaacgacgacgtgttgattaccgaccttgggaacccgatctcagggagcggactctggtcgagaacggatcgagtccgctagagagacccgataaggcgccggaattcccccgaggattgcgaggattgaacaatttggggaacacttgcttcatgaactcggttctccaagcattgcttcacactcctccactaaggaactatttcttgagcgaccgccataatcgttacttctgccaggataggagcaacgtttccgccgccgcctcagcttctgcctcggcgggcgttaatgcgagccggagaaaggtggcggttacaacgacgaacacggattctaatggaaagagtcgaaattgtttggcttgcgatttggatgacatgttttcggcagtgttttctgaggatcggatgccgtacagccctgcaaagtttttgttcaggttggcaattgatgtgttgtgaattcaaataatggattcttatcagcattggatttggtttaaaaaggtgtattggtgtcatgagaaagatgattttttttgggagtgcttaatttggtatgttatttatttgtgggtttgttttttcggttgcagttggtggcaacacgcggcgaatttggcaagttatgaacagcaggatgcacacgagtttttcatttcaatgcttgatgggattcatgaaaaggtggacaaggatcggaggaaaccacatagtcaaggtaaattatacattcacttgtttcatattttaattaattataggagttggttcgggtgggaatgaaacttcgaatcacatagaaaaattgcttttcttcaacgtattttctcttactctgtagcttgtctagtcaagagttaagatagcccatataagaattcgctactcttttttattcccccaaagaaatcagggagggaaagccttgagaggaacagctgtaaaatgagcccaaggtctcgcctttaaatagtgtttcatttttctttttttttgggtttggtgtggggttgttggtcttttaatttcagttttattttaatattttgggtggggaggacgaatctttccacactttgtagagtttgtttccttttgtccatttgaatttgatgtttagtgaccactgaaagtagtcgcaaggagtacctatagttctgatagattgtagagtttatgtacgtgatgctaaattttggatgtttagaagttgtaagatattaatgaattgtgtatttggtacaatttccaggttgagattgaacttactggagtctagtttcaattttgtcttctaatttttcaagggaaaagtaggtatcatggtataactgtatagccggctttgattgatgtagtggaacataggaagtcgaatattgatattcatacactctgaaatctctaacctccctgcattttcctggtggccaagatatgaatacccttagttttttgacgagaaccttgggcactatattcttattgaatcacctgatgattggctacacaatcatgatatgcatcacttgaaacttgtggccactaatactgcgaatgatctataaagaactccttattgagcaacttgcgcccctatctttcaatttgtggaatttttttttagtgaaggtgttttaagtactttttaagattaagaagtaattgtaacatttaaatgcagggcgtgggtctagttatgttgcttgttgccttaggagttgacaaagtgctcacagatttagggctaaatatcaacctcaacttggtggcttgatgattctatctgcttcattccagtaagtctaattttccttagcctgtttcatcttaggattttctagtgttacatgcttctcatgataacttggcattttgtcatgctctgtggtcttattatacacagttaatctgagtccagagagaggataccttagacttacagccaacatagattattttgtaaacaatttgtgaacttttggtactcagtccgttacccatataactgtcattagattttgaagtattggatacacttgagtaattctgggatctttgtagggggcactgttggatagaatcttgggtaaataatctcaactttgcagcggatcattctgtgcctgattagaatgtcagtgactggatttgtcttttccatggatggctttgcttatcgtaataaatctgatgctttgaatagcgctccatgcttgtatccccaaaaggatggatgttaactaatattttagtgtttttcttttaaaatatatttatttattttctgtattttccatagaagcatttgatatgtcattgggtatgtgatgacagtatttctttatggtgcaggcaatggagactgctgtatagctcatagagtattttccggcatcttgcgatctgatgtcatgtgcatggtttgtggtttcacatcgacaacatatgacccttgtgttgacatctcactggatttggaaccaaaccaagggggttctgtaaagatgtcatccacaaaggctggtcatccctgcaatggcgaggcaggttacacaaattcaaggcaacacacgggtacatctactttgatgggttgcttagaccgtttcacaagacctgagagattaggctctgaccagaaattcttctgccaacaatgtcagattaggcaagagtccctcaaacaaatgtccataagaaaacttccacttgtctcgtgcttccacattaaaagatttgagcattcttcaatcaggaaaacatcaagaaaagttgatcgttacttgcaattcccaatttcattggacatggcaccttatctatcttcttcaatcttgaggagtcgatacgggaatagagttttcccttttgacgaggatgagccagatgcttcaaacgacttgtcctcagagttcgagctgtttgctgttgttacccacagtgggaagctagacgctggccattacgtgacttacttgcggttatgcaatcaatggtacaagtgtgatgatgcttggatcactcgtgtaaacgagaacatcgtccgggcagctcaaggatacatgttgttttatgtacagaagatgctatactacaaagcaagcgagaaacaggttgctagatgatatgcttatcagaaaacaaaaaataaaaaataaaataaggattgcatatactaattaaaaaaaaaaaaagacaaaagaaaaaagagagagaaatgggacaagaaattaccatggccagttttgttgacattgaaagcaatgtcattggtaattgactaggcaactactcccgttgctctttgcagcatagattgctaaatttttgaggcagtattttgcattggggaagattaatttatcaaggtaaggatttttcaggaaaataattttctcatttgcttttttttttttaagttatttaaatatagctttatgtcctcgtttagtattcagttttgttaatttatttttttctcagaagtttacaatgcttggagttacgaagtttaccatgttttactggaatgtttccttgaatggcacaaccaggccaaaaatctgagtttagattcttttttcgaatacttgaattgatgttggatttttatgctcaacaagattctttgctcacattttattcttttttgaagaaagaaacatgttaagtgaaaagtttataaaactgcaccagcattaaggaattacagtacagctttctgatatctttatattaacgcatacatctaagccataaaaaaggtagcacgaaacgacacttaattacaaaatggtaacaaaaagttggtcacaaaagaatgaagccaatccatgagagaactactgaaacaaaaaaaagaaaaaaatgaagactcttacaagagctttgatgatgaa

SEQ ID NO: 36453 - DNA, 3069 bp, Cannabis sativa
ttttttttcttttttccaaaataaattaaaatgaaaaggagaaaaacatacaacaggaaatgaaaaagtaatctttcacagcttcacattttcatgtggttggttttaagctttcacacaacaattgaagtagctgaaaaaactgcgtcttggctgtttaaggaaaaatgaaataagaccatttattatgaggaccacatcaattcaaacttttgatacgtaataaattcaaagagtaccaactgcgatttgatagcaacaccaaatattttatcagaatacaaatattatctcacccattataaataaaagcaataaaacatttattattattttgcatatttccggtcaatattcattaatagttatgtcctataaggtatacacaactgaaaataataaagtacctcttcaaagcattaatatttaaaattaattacaagactaatttttgtgagctaaaagattgttagaactctacttcctgtatccttttcagttgtacttatctttattatatttagagaataagttggctcatataattatatttaaccagctagggaccaaattataaaggtctaaaacagctggtgcatgtgcaccacatagaattgggcgcaacctataggtgtatctaaatattattcctaactattatttaattaggacatttttgttttcaaaatattttattgcatttctgttgcacatacagaatatcctttctctgttttcttgatttggcttcatagcattattgagacacatatgatcatgtggcccaaaacatctacactaaattaccacttgaactaacgtgtggctcaggtaataaacatctacaactaccaaccatccaacatcttttcttgtttctaaccacataattaacgcacttggatctgaaacacatgtcctaaaactagaaggatgttgatactttccttaagactattatctataataacagaatcggcaaaccccaaccccattacagtattatcctaaaaaatgcatggcttgacctgaccttttctcaaaagactttccacaagacatcttactattaataaaagaaaattgttaatttcaaactttgacatggtaaataactgaagaggtacgtgctcagcagtcagcaccctaaaatcttgtattacatatttgccatagaattttcctgggaaggtataatattatttgaccagggtatattatagtactaatgcaaccagccaagttgattagagttgtactaaaaaggtaagtaataataatcagtaagaatatgacccacccactttaagattgtcttttttttaaagatatagtttagtcatcaccaccctacaaccacatgcatgccaccatcattaatacgggttcataatacaacttcctttaattaataacaaaaagcaactaccacagtatatatattattatatatatataaagaaataccgaaagcaaaacaagaaacaaagcatgcaaagacaaggaatcttacagatggagagtgagggttctcgtggtaatgagggtggtggtgatcactgtgagaagtgtttgtactggtggtggtagttggggcaatgagctcttcctcatttccaatacttgctcgggacacatccctcttgttttgcttcctcatttccctgattttcgagaaatccagagagtaatcaggcatttgaccacccttctggtcccagtccccaaactggggcactgatagccatggtgcgttcttctgtattggacattgaaatcttttaaggtaacaacattcagtgaataacaagcaatcaacattcctctacaaaagaagttcttggggaaatcataaacaaatataattaaaagtacaaaattattgcttcatcttttaatgaagcattaaaagagtgaacgcattggtccaaaataaaaatatcatatcgagaaaccaaccacaaaaataggatgatgaggttttcaagataaaagtctttgattatctgaatagaatgcattatgcacccctgtgttgacttttttaacaagtgctattaaattctaaattcaaatagttgacaagtagacaatatcatttattttattaaaaaaaattcaaaccgctcatttttcttcgtattataaattatgaaatgataaagggcaccatgagtggcattgtaaatagatatagtgatattctataataattattaaatcgatgtccagtactaaatattactagtgcttttaagcatttctctaaaattattatagttctaaaagttcaatctactcaaacatacaagaggtataaaagaatgagaattgttattggcataatttaatatgggcttctacctattaaccactaaataaaaaataaggagtaacttagcacaaactccttactcctattaagctagcaaggcagcaaaaaactcccccaataaataacatcccttaacataccaccgtaaattgaaatgacccttcttggcaaacttaataagaaaaagtagcaacggtccagttcatgtagcaaatggaacagttgggtctaaattatcaccttttttataaaatataattatctttccaactttcatcaaagactgctcttcacaattccgttttataactttgaaaaatgaaaagtgtcctcattatatattgaatggtccacaaatgaattattaccctccttgaataaagatgaaaaaaagagaaacagagaaagaaaaaaaaaacagtctgtttcccatgacagaaacagttgaacaagtacttgttttctgactaaaggtaaaagaaaagccgaggaatccaattttgcccagaccagtgataacgaaataaaaaacaaaagtgattaataacatgtatgaagtggtaaacagatctttgaaaattttccattttggccaacccattgatcaaagacacatttgaagaaaaaaaaattgaaaagccatgcactaaaatctctaaaaaaaatttgtaatggttgacaaagaaaagaagtgaaaattgaaactttatacagtatctgagtaatgcaagaga

SEQ ID NO: 36454 - DNA, 5136 bp, Cannabis sativa
  modified_base (314)..(319): a, c, t, g, unknown or other
atcagaatcaataatattattttatttccttaattagaaatattctaataaagactacttttctaaatggattcttggatggagagatctacacgaagaaaccacctagctttcaggtggaagggaaatgagtttaattagtgtgcaagcttaataaattcttatatggtttgaaacagtctccaagataatggaataagagattcgatatgtatatgcatcaaatcaggttcaaacgattcgcatacgatcactacttatatttcaagaatatggagcaatctacagtcatgttcttattgctctatgtggannnnnngctcatcatgagcaaagataaatatgtgatcaaaagtatcaaagccaagctcaaaagaaaatttgagatgaaagagcttggaccagttcaaaagatacatggtatcaaaaaagagaggtcattcaacacttaattatcatagcatcacaaaaatagccgtagacaacttagttgcaaagactaagtgcagctgtcaataccacaaaatggtataaattataaatctcaaaattctacaaaaggtcattcaactaaaaaaaaattcatatttttaaatagcaaataattcttgaaaattgtcatataccggaattcttctattcaaatcctaaaatatcacattttgaactacaaatagtttgatcattcacaaagaatgtatgtatgcagttcagctgtaattctaaattcccctaatttttttaaagtctacctaaattatttaataccatcataattggaatcaaaaagctcaattagccaaaattattgagttctgcaattccaaattccctcaattttcctaaagtctacttaaattatttaatattatcataattaaaatcgaaagatatttttttaaaacaaaaaaattgtcattaaaattattcttttaattgtcgaatctaaattaataaaattttatgctataagtttaacatatgtaaaattatgttttacattaatttttaatattttaaatgtgaaattcttattttacagggctgacagacacatatttatagctatggtcaaaataagacctaagtaatcaaagaaagaaaaataagacaaaatttccattttcagggtattttcaccacatttatgtagtttgatgctgtcagaatccaggacatgaggacaatgctcagctcatgaattttgtacgaaataatttgggttgatatattgaacataaaagctagtatagtttgccaatcattatatatttatagtataaaatcaaagtgttttatacaacacataagacacgaaagaattagaactaagaattatatcacttatttctacttctctttttgaactctgaatttgcataatttggattttgaggttaaaaagaatctaactttctcaaaagtttgaaagccaaactgtgtaagaatcaaagatcttattataaatgcccaattatttaccatggatcagctataattacagactcaaattaagaatagtttaactttctgtgtgttcatcttgcacccaaagcctcattctcagtcacaatattttcatcaacaagtatttggtactgaacatcggcatttccattctccaaagatggtaatggatccctttcactatacaaacaaaaatgaagcttaagaagtaatgccaaaactccataagcaaacagtgagagccatagtgattgacaaaatcagtgaccaaaattaatagaacatttctaactacaaacactatcatgctaggtggtgtttcagtgttctaatgagctataacaatatcccagatgagtttgacacaaattttgtattttacttcaatatctctatgcaaaagataaaatgtgtaaggaaagttagaatagaacttacgttagtgagtatatgatgagcccaataactacaactgcaaaagaaagaaagtataaccaatcaacctgcaaagttaagattgaattctggttagatttgctacaactggcaatgaggattaattatagagaatgagaaggatggtatgattggtacctgttgatgatagaaaaagatgcgaaaaataactgcccacatgtccgcggtgagaacagagagattgaacattgtagcaccacttagctgcaccagagaattcccaaagaaaattgttaaaaacaggtatttatagtcattgaatctattccaaggttcacatttgttttactcaatttgtagttgttagtccatattgttgccaattttgattgtgcattgaaacatagtacttataatgaagaaagtgaccttgagaacatatggaacaattgtgtagaacataaaaccagcaagagtgaagccaacaaaagccaatatctgaagacaaaatcaaatgaacaaatacaaagatcagtacaagcaatgttattacaacaagagattatcaattctttgaagaaaattttgaaactttagttacttacaatatccgtggacaagttgattgactccaaactcttcagctctatgaaaggtctaattggatgttaagaaatgaaagcactagctataaagtcatatattgtatcaacagtgcttatatattttgcaaaagctgcaatgggtggatacatctcacaaatagttactagaaatccaaagacaccaatcatagaaactacttcaacgcgatctttcttctttacacaaaattcctgcaacgtatgatgatcgactaagtgtagctcgtaaaaggaataacctcacttggttacaatttcagttacaacttacaagtaagtagctttaggtgcaaatagatgactaacctccccaacattgctcatagcgaagaaaagagtccccacgatcacaagtgcgtcgccaagtagaggtcttgaaccacctaaaataataaacaagttgaaaaatgagacaagcgttcaaaatatatgactgattcaaatacttccaataacaaactcaggcagaccagaaaatattaagaaaagttacataaatgaatgatggtagtattatcttaagaaaagttgaaaagttaacaacctccatcaccctctcctgaatcagagaagatcaccaaagcgagacccgccacacatatggctgcaccaaaaatttgccacaaggaatatcgagtgcctaggaagatccatgttaacactatggcccatgctatagttccacaatccaataattgcacactagtaattgatgagaattggtatgctttattcactgcatcaagagaaaaacacattgccattcaaaaaccaaacaaatattttaggaattagttgtcatattttaagaccctactcactatcataaaccacataaatatttgttaattgatagtaatgaatggacactcaaccacctctatattggcttgcagtactttcttcctatttattccaaaattgactacttatctagatccaaaacttcataaagaaactttatggagactttgaacatttgggctctaccataaagtttcagcaaatacatttagtctttattgtatatctaaaaatttcaccataacaagaaataatgtcagaatccatatttgttataactcataagacaaatggacctatcaattccataccattaccccaaaaaaagttaattagcttttataaaaaagaaccagttcagcttaaaaacggacaaaagctaaagcaagcattaccactcaccaagataattcccatgaacatcaactaaccccaataagagataccaataccaagaaacctgcagaaccccacaaattctttatcaaaatttttggaacttaataaccaacaaagcaattataagttaataatcagttaaactcggtaagccatttgtcaaaagttcaacttctcattcccatttacatattaaattaaaaaagaaatgcacctaatggatcttagaaataatgttaaaaatggttgaaaaggcatgtttttataagaaaaataataaaattaagaaaagggtcgtatcccatttctacatacatacccttaatccctggcgcctgtacagtaagatacttccataaaacaagcccaagcttaagtaaataaaaatgctctgtgtaagaggcgcatccacacctgaaatggagaattggtgaatcaaaagaaacagatcacaaaatccaaaaatctgaaatggggttttaattactgaagtcacctaaactggcaatgagtgatgaagtgaaactcataagagctaaagtgaaggagaccacttgacccaagaataagaggtacaaagtttttctagtttcatggttacaccaccagcttctgttaaacacagagaagttcataaccaaactctagtaaatatcaccctctctaatctaatgatgaaaaagtgtcactttttgaatggatttgtagttgtacgagggagacgtgagaagagggtgttcttcattttgtgctctgaaatgaccactcggcttacctttcaagatctcttatgaccggttgatgaaatctagatagatcacgtttttcctttgccattgaccacagtgaattggttatcattagtagcacattatttcaatataaaatcctatttatattggttaataaataaataaataaataaaattgtgattcacccactcacccaactgccaaggaagtggagatgttgacaatttcatgatgttaattaaatgaagagatttcattggaaatagaaagtgtgaccgttaagttgagacagtcactcactcactcacacaaccaaccaaacttggcaacccaacacataatttgtcctattgcatattactgggcggcaaactcaccacgcaactgctgggccaccaacctcattcatgtccaatttgtttgggataaattgaagaatatttaatttttttatattcattaataaaaaataatcttatattaaattttattaaaatgtatttacttttatgagtgagttgtttaatatactctcatccttcaagtttaagggattatttcacaaaaacataaaaataacaaaaaaatttacaaaaatacggttttatggaattttaaacatttttacgattttttttagttttatttacag

SEQ ID NO: 36455 - DNA, 3739 bp, Cannabis sativa
tggaaggccataattgctatataagatctttaatattgagctccacttggcaattaaacaatcaggtattgcgagtgttttgcatctggaatatactgtgatggttgcaattgtgtaaattgctataataatgttgaaaatgaagctgcaagacgagaagcagtggaagctactttagagcgtaacccgaatgcattccggccaaaaattgccagcagcccacatggtgtgagggacaatagggtatgtagttcttggctacttgaacagcttctgtgtaatttgcatctttaattctttactaggtatggttttgccaatgccttgtgttaaatgtacataattaggattcaactacgacaacaaaaataaaaataatttttcctttacaattccttgtattactagcatgaagaacgagctctgctcaaattgtttcttatcctctctttcttatagcatctttcttatcttttttgagggattcaaggtcaaggtaaaatctgttactgttcgtaaaggatagcaacagaagggttttgtgttctgtcacaacggaagtttcaggaattttttaacacacgagtttatttccaacttgctagagatttttctttggccctttttaaagtcccctttccttgattcattaacttaattaattttgttatatcaaatgaaacagtaccttaatgaagcagattctcttgtttcttctgtactactaattcttcttgcagttctgccaatatttttgcattggatgttgttgaaaatgatatgggtgttttataatgtaggaggatgctggggagattatgattctgggaaagcacaataaaggatgtcattgtaagaaatcaggatgcctcaagaaatactgtgaatgtttccaagcaaacattctctgctctgaaaattgtaaatgtatggactgtaaaaattttgaaggaagtgaagagagacaagcactatttcacggagaccatggcagcaacatggcttatattcaacaggcagctaatgctgccataaccggagccattggatcctctggctatacatcccctccagtatccaaaaaaagaaaaggtcaagaacttttctttggcccaacagtcacaccgaaggatacatctgttaacaggattgggcaatttcaacaggtaaacttaaactggtactttcatgattatacaatgagctgcgtggttgttattcaatgaagcaatttttgtttgttttgttgttgcaatcactggttacttctttttgtatatggatggaggaaaaaggcctcatttgtagttagggaagagaataactgaatggtttttctactataatctatgtaattgtgccttgtgggtggctacagcttttcagattacaggttaagaaatcccattttgtctttgtcttgctttgtagtagtggctttatatattaatatatggacaccctcaatccaatttaagcttaaatccaggacaggcattaatagcatattttaatgatattcaggtaaatcatcatagagcacctgtacccccttccttgccttcagttcctgctgctcgacttggtagtgccacaggggtgggcccttccaaatttacatacaggttgaaattcttgtttaatgaacatgttgctaatatgctttctttgatcaggactaatttgtgtgcactttgttgaaggtctctattagcagacatcatccaaccccaggacttaaaagagctttgctcggtcttggttgtcgtatctggagaagctgccaaaacacttgcaggtgcgaattggtttgtgtatacaataagtaaatcagtgtaaaatatcagtggctcttttaatgtgattatccattgtctatgctgtaatctgaattgcttcatatacttaattttctttgaatatcccttgcaatggatttacttctttccgtatgtatggtattgggcattggctatcatctttgttcaaccattttgcggtgacatgttttatgattgtcgcctcagatgagatatatatccataatatagtataaaatttcaaataaaaagcctaatcaacaatgtttagcattatctctttcctgttgtccattaaaggagataacaattttatgttaattgtttgtgttaatttttccagaacaaagaagtgcaacagagaagcgtaccgaagatcagtcagaaacttcccttgcttcaacgactcaagacaggttgcagaatcagaaggaatctgatcttgagaaatctgttgatgattgctctagtgcaaatcaggctgataaaactggagctgacgactctagttcagatggtgctgatttgccaaaagggaggccaatgtctccggacactttggcactgatgtgtgatgaacaagatacaatgtttatggcaccagcttcccccagtgggacaggtcatggatgcaacatttcttctcagttgccctatgaacaaggcatgcccgagctttatgcagagcaagaaagacttgttttgtcgaggtttcgtgattgccttaaaatggtaattgctttaggagaaataaaaggcaagtactttcaaaattttaggaatcattctgttggtgctttctttatccctaatatactctggtgatactattctggttctatactctggcatgtcatcaattttcgtttttttgacacatttgtctcttggttttttgaccccgcgtttccattacgtggatcagcaatctgaaaattgcttgtcctgctagttctttagtaagtactaatgcatggagtcaataacattattttgtttcacattgcagagacaaagtattcatcactggcccagagtgaaccagagtctcataaagacactttaaccaatattggcattacaaatcacaaaacagaaataagctaccactcgggacctgctaaaaatggtgttttgaaaaccattgttccacctactgccaaaacaacacaaacgatttcaacggcagttgcagctgttagtaatgaacttcctaagattccacaatttccagaaaacggggggatagcaaacccgaaaattgagaaagagatgtaaaaaagtttagagcagaagatttggccctaggtatgttgctgcatttatgttgtgaatttatgaatgcttttctttcatgaccagatgcagtggcaagagattattgatccccattattagaaatatctattcttttttcttcatactccattaatataatccctaaattagtttctcaactgtcaaccatagttggagcacgaattattgtaaaatgcagagcctatgttactgcgtttatgttgtgatccatgaatgtatttctttcatgaccagatgcagtgacaagagattattagaaatatctattcttttttcttcttactcacattaatataataatcttaaattagtttctcgactatatcaaccatagttcgaccaataattattgtaaaatgcagagccttgtaattgcataaaatctcgtttagttttattaacacgctatttactgtccttatatatataccattacatgcttggtttttttaattattattattattgtttaagttcatcatttcaattgtccagagaaacaatgagcaatatttcgaacataataaaaagtaaaaccacgattttcttccaagggtactttgtgtttgttttagaatttataaatcggaaattatact

SEQ ID NO: 36456 - DNA, 7686 bp, Cannabis sativa
  modified_base (67)..(68): a, c, t, g, unknown or other
ttacaataacaactaattttaaaacacattaaatttatacaataataaaataaatatatataataannaaaaaagtatataaataaataaatttatttattatgagctcggagagagagaaagagagagagagagggagacggacgagagatggtggtggtccgacgtatgagacagagatgagagggacaccaacgggaggtgtggtggtctgacatatgcgatagagaggagagggacaacgacgggaggtggtggtggtctgacatatgcgacggagaggagagggagatcgacgggaggtggtggtggtctgacatatgcgacggagaggagagggagatcgacgggaggagaagtgggtggagatcgatggatgagagagacgagaagaaaaggagatcgagagagggaggaagacagcgagagaggagggcgatggtgcagaggcgtgggtgaggttttatagagttaagatttttattttagggtgtgggaaatgaagaagaaataggtgagaagaaatatgtgggcatgtgagaaatagaaaagaagtaggtgggcatgtgggaaatgtggcaagaagtaggtaacgattttttattgggcccttatacccgacagtttaaaatcgtcgcctatagtataaccatcgcctttactatagtcgatagttgtaaatcgtcgggtataaaagcccaataaatttatgaattccaattaaaattttcatctattcctgtaattactgttataaaccgtcgtgaatactaattttttccgacgattttaaatagttacttaatttttttagagacggtcccctaaaaaaaacatttttaggaccgtcgcgaattctgacttttgtagtagtgtatattgatagaagagcatgagtacattgctatcagtgataaactataaacaatgataaaatatgataaagaaagaaagaaagaatacaaaaaattataaaatcttgtaaaaaaaataatcacaaaatagaatagtacaaaactattcagttccataaaacttatgtgtcatctattaaggtgtccaccattataatattttaaaggagattgtcacgtaaattatctattttttttaacacaattaatatggataatagagagattatggatgagtatatgtgaggacataaattaaaaaaaattgacatgtagaataacacttcataaggtattgtattgtatattagtaatactttacaaaatttggatcattataaaaattttacaattattttaatagactaattttgattcttattattaattattaaaaaaataaaactactttggtaagttatcttaatttttagttttattttctaaaaaaaataataattctttccttatgtattttacctatgaataatgattttaaaacatagtattgaaatttttttctttaattatactttatttaattattctatccaattatactttatttaataataaaactaatttataaagataatacttttttttaataattgtttctcgctctcccctctattgatacctacttcgactaccccaccaagtccaatctcattcgaaaacccaacctcctccgaccacaagctaagcaccttaactgtccctgtcacactcccttttttcagtttctaagtctatgtaccactactatatggtaaattagaagaatgagattgaaataatatatataaccgtatttttttatttttattagttcgaacatgtgagcctaatgagtggtgatttagttcaaaattaataaaataaagaaaaatggttaaatatttttgtatcttattttagtttttgttcacctttctcagagttttttaaagaagaaataaataaatataatgaacctaaatgtagtattatcaaggtcgtcgtaatcaaatcaatgatgattgaagggctagttatttccaccaaccaaatgggttgcagaggcttagttatttgtacatgtgcctatagtgtcatgggaagaatggtcatttactattcctctttcctagttttgttttcttcttcaacttttaactctactcgttcctgctagtaatcttcttttactctcctttgtgctttctctctttctctgcctcttgtgatactctcttttcccttcattttttgtgtctttttgatgtgttttcctttttttctctgtgtcgtgttacagtgtgggtggggtggtctttttgctttatctttggtgtgtttattgttgtgtctgtgtgtttttttttggaagtggttagtgtgttttttgtcccttcctgttgggttgtttatggagttagtaaatgctaccaactcccctcttaaaggcaagtgcttttctggctttgaggcatcggtttccttgtccccgtgtgcctcttctcttaaagctctgtcttcactttgcttgtatggtaaggtggtggctccatgcctgtggatgaagccacagtctctgagtttgtggcaaaaatctagaaaaaaaaaccagtatctgtggtacttttggctaatgactttttactctctaactgtttcaagtttgggttcagtagtgatgaggatagatgttgggccctggagaatggcccttggtgcattagaggctgttctcttgtcctccaggtttggactccaagcatttcaggatatgtctcgtttgtatctttaagactgtggatgcaaatacataatctccctcatgaataattctccattgctaatggaaatctcttgggtgcccttgctggaaaggcggtgaaagtggacttggaggaagacaaactagcaacgtggaacaagtttctcagagtagttgatatcaaacttgataaaccgcttgcttcggggtacttctttgatttaatttcaggcaataaacgctggcttcagtttaagtttgaaaaaattggcatcttctactataattgcagttgtttgggccaccaacgtcgtggctgtactttaacatctccggtaacggtggaaaatggtgttggagtcccttttcccctatacggaccctggattttccccctgcttcatcgtattatgatgtttttactagtgccaaagccgtttctcattgtgaggcatcgactgtgtctccgggcatcatgcaaaaactccctcgtgtctcaccggcagttggggtcgaggtgggtgatggatccttgcgttcaatctctaagcaggcttagggttcaaagcgtgggaggatggtgacctctcgaacgctcgttgggtagggtaaaggtcagaatactttttggagacctaagccgaggcctgcttctcgtgttttggccattattgcttctggtaatggagttgatgctagttgtcctgttgaagaaaagtctcctgttgttttacctattttggagaagacaaagccctctgaccgtgtgttgaatgagctgttggattcaaatgtgagtggacatattgacaaaattaaggatatagggcttggacttattgggtcggttctttctcaacatgggccaagtcatttattgttggttaatgatgggcccgagagagtgtaacaattgggcgagaagcaggatttggatcctgtgggccttgggcatgtggaggatattcaatttgtgggtgggcctgatatggctcgtgaacacatgcacttggagaaacggattgagagatctaatattaatgggcccgagagcaacattgtttgtggtcaggaggcccaagttcttcaagattagaatagagctttatctaatttctccaagctcaagaaacattcctaaaagaactaaaacaatttgggagcttggatttttatgagactcgggccttgggaggatatatttgtgtcaagccaacttctgaaatcagtggaagaactactcctttcaagaaataaaaattaaatgagccatcttcctcttttagtgaaagacctccgaagatttttcggatgcacctcggtgttatttgtgatttcccatgggactctaaggagaaggatcgaatgtccaaggtggcctttgaagaaccctcagaagataactcagaatccttgagtcttattgatggtaatttaaagaacccgctgattggatctttttttattgaggactctggctctagtgtgtctgtttactctcataaccctatggaggagattgtcagaactcctccacgtgagccatgagaggccttgcttggaactgtagagggttagggcagacctctacagttcgtgagttgaagtccctggtcagattgtggtccccagattttgtctttctatctaagctcaaagtggatgccgctctgctggtacatatactcaaatctctccacttttattttaatatttatgtgtcgggtctgggtgctgctggtggtatcatctttgcctggaagaaatggttttagttttgagtgtgtttcctgctctcgtaatcatatatttggtcttgtttactcggatcctccgtcccacccttggcttctctcttgtgtttatggcccctaagaagattttttgggtttagctaatgaagattggagatagatttggtggcccgtggttgatattcgatgatactaattttgttcttagtgcttcggaaagagaaggatcgtctggaaagtacccatttattcctttcctctcaagtcttgtggatgctcggctgcttattaatatgcctattcaggacgataagtttacctgggatagtcactgttctgggaggaaccatgttaaattggcgctggataagggtttatccaacgtggaattgcttaatttatttctgagagcagctttttgctctacccagacttgtaattctgatcatagacctctatgactttacactgatggcctgactaccaagtttaaagagtgctttaaaaggttggatgagggatgatagaagcaggctagtggttgctcatgcctggaaatcagttgttcacccttgggcatccgttcgagttttcaagaagcttggtgctactcgggtttctcttcttaactggcgtagatctcaaatggtaagctggatactaccattattgatatagagaaacaacttaattttttacaaagcttaccggctggtgctcggaattaagatattgaatgtagatttcagagatctctgaacgaggctttagaaagaaaagctttatactagaaacaaagggcaatgatttcttggattaaagacggggataaatgttctaagtttttcaggaaggagaaacgctattgagagtttattcaataaggataatgaatggatctctagccgtgagtcaattggtcatgaatttgttgatttcttccaatggatcttctctgggtccgatcagggccaggactttagatccagttaattatttcatgagaggatctcacgtgaggatcaggaggtgcttttcttggccccttctaatgaggaaatccgtataactctctttgccatggacaatcataaagctcctgaaccttatggaatgtcagttttattttttaagcactactgagagtctgtcggggaggatttttgtgaagcaatttctgacttctttaggtcgggcaaaatccataagggtgttaatgctacgaatattgtccttatacccaaggttcaaaacccgaaacaaactaaccattttaggcctatatctctctgcaatgtgatgtacaaggtcatatataagattattgcaaacaaaattaagccttttttaccttctctcatttgtactacccaagcttctttcgtgcctggaagaaatatacaggataacaatgtgattgtgtaagaaattatccatttgtttaataggaaaaaaggcaaggaaggtttttttgcaataaaaattgacctcatgaaagctaacgataggctgagctggagatttattgaccatgtgctttcttgctatggtatacctcagaagtttcacaattgggtgtcccagtgtttcactacaaccactcttaacatttgcctcaatgcggggcaggttggcactattaagccctcttgcgatctttgccagggtgaccccctatctccgtatcttttcatttgggctgttgaagtgttatctaggctcttgaaggaggctctaggtaagagtattattaagggcattaagcttagcaggggcgacccgattatctctcgtatatattttactgatgacttaatactcgttggaaaggccaacttaaatgaagctaaaggttactggcagtgtcttgagagattctgtgactggtcgggtcaacgagttaataaactcaaaatttcgatcttctttagcaagaatacttccaatggaatgaaaagggggatcaaggaagttttagggatcgacacgcctgaggggaacatcaagtatctgggtcttcccctattcaaatcaagacaaaagaacgcagacttcagttttatcctggaaaatcttacttcgaagttacagtggtggaaagcgaaaacactatcaaaggcgggtcgtgctactctcatcaaatctgtgggcctgtctctgcctttacatgctatgcaaactaccaagctctccaatcgccttgcaaccagagttgatggcttggtgcgtgctttttggtggggtttcgagaaaggtaaccacgggttgcacttacaagcttgggataagctttgccttcccaaatttccttggggggccttaggttcaggaaaaccagataaatgaacttggcctttctggctaaatgggggaagaatattctgaatggtagtcaatccctgtgatggaggattttaaaatgaaaataccttagagggaaggagtttcttaactgtagctacaaagattcggactcctggttctagaaaaatgttgttgaagccaattcgatattaagaaaaggtgtttataaattggtagctgatggcagggatactataatttggcgggacccttggatcccccatatcaaatattttgtcccgaattctaatggtggtctcaccaatgatcactacaaagttgcatcacttagctcccaacggtggttgggatgttccaaagttgaacagcctctttgatcaagagattgtgtctgctatcttaaaaggggggttttcctctggtcagggcaatgataagtgggtttagacttgagaagaatggtcggttcttgagtaaatctacctatctcgctcaagcgctggaaagggctcctcactgtgaggtcgccccgtctctttggaacaagctctagaacaatagaattctaacgcgacataaagttctttggtggagtatcatgtccagtgcgctccctattcggactgtgatcatgaacatattttatattgaagatacgagttgcctctctttggtatgggagaggaatatttagagcacttatttcttacttgcgatgtggccttttacttctggcagacgtctccttggggtatttatcctatttgtgataccggtattcgaatgtgggactgggtcaaattcatttgggatctcaaacacaggggcattcctgagggggatgtcttcttttatgcttcgattattgttgacaccatctggagcattcgtaatgataaggttgttgcaaattattttaccaggatcttag

SEQ ID NO: 36457 - DNA, 2554 bp, Cannabis sativa
ctcgaagcttccaccgcctcgacgaccctgtcgaactgcactttttccgccgttcgtctgaaacctcgacgtttttcggcttccaaacgcagtacgtaccttgtttcaaaccgtcgagttcgtcggcctcggatgaagaacaagacgatgtcgttgtttccctctcttcttccaccatcaatttcctcaactgtggccgacgcgtacgacgcgtcgtttcctgaacattattattcttctttttcgcatcgacgtcgttcgtcgaggaaatcggtttttcgagcaaggactggtcgaagagagggtaaaccggtttgatctgaccattatagaagatttcgtccgcagatatcggcgaagaatccggttccgttgcaacaaacgcgaattcaaactcatcctcttcttcttcttcttcctcgcgatgaacatcaggtatggtgattaacgaacggctctgattaacttccccaaactgatcccacggtacataatcatattcctcgagaccaaaaacgctgccgtttgaaccattctcttgtcgaaactcgttaacgactctagcagcaatatcagctagatttcccgtaccagatgatgagtagtcattaaaactcggatttacagaacgtaatgaatctgtctgcatttttttttgttcaatagaaataaaccccacaaatctatagatacacccctatatatttatatatagctaaactgtgtgtgtataaataaaataaaacaatatcaaagataaatatgaaagagaagaaggagggagggaggaagagttaggtgaaaatgaccgaaagtgtggggtgttttttaggcaaaatataaggactcttcagtcttcttttcttttctctctcttctctctctctcgagggatgtatataataggtttataagagatgagtggttggttgtgactggtggtggtggtcctgatcagaaaagtaaaataaaaaaccaaaaattaaattaaattggagaaaataacataacacttgcttataaatatttaaaaaggtaaaaaggtaaaagaaaaatggaaaatggtaacgcggcttcggtaaatagaattaggattgggctaattttacagtggttgtttttttatagtaaaaaagaaatagtctgcgcggggggaccgtctagagactctagtcgttttagttttatttatttttatttttttttggataacccgttttagtttaaattagttaaacgggaaggaaagaaatggtggacgaactatttttatagtatgagaaataataggttgttgagactgggattatttttattattattattatacaatattttcttgcgtaatacgtaatatgtaatagtgatttatacgtatgtggacacgtgttcatatattatagagccaatgacaagagggataatagacatcactcggttcaggttatgttcacatgtgttaaagtttcctctctgcttttttaaggtggtttaataatggttcgttggtttttttgttttttttaggctattatagaaatacaaaaattatacaccagaaatacaaattgatgttgtatgtgtgtgtgtaattatataattcaaaatataatgtgattccactaacaaatattaatgattaaaataataatctgaagcaaaagaacttttatataaatataaagtgcactagagggttttgcaagcttattggtagttgtttcttttcatattttgtatggattgcacaaatttcgtttaagataattttcatatgaatatccctaataaatagctataaatgtgatataatattatttttagaatattttgttaaaatttaacttttaatagtgatttaaaatgtgtgctaaatttggtcaagtcaaaaattgtatcaaatttagcaaaaaaaaaaaaaaaaaaaaacatgtgtaaaattttagctcacaataaataacacattttttaattacttatctaccacatactaatactgttcattaataaaaaatatttttatatttataagttattaaaataatataaataaagaattatttgtatattttcaataagtattaatgataatattgacttttataactaatttacacattatgcattagagtacaaatataaaaattgagtcaaatatagttctatggtatattttagactaaatttaactcaaaatatacaccatccattagagatggtctaagatggaagaagaaaaattaaagtatttgttttaatatattggtttagaaaaaaaaaaagacgaacacaacttttttttttagttttattcatgataaaccaagtaataataagataattagttatactttatagcaagtttattagttatatggtttataatctctaaatttatttacttattttaatatttaataaaattaattaaatatatattttttataagagtattatacgtagtttgtaaattaattaatttttttagagtaatgaaaacactagttgattcatagaaaaaaaaattaaactatcgattaaattataaatataa

SEQ ID NO: 36458 - DNA, 4585 bp, Cannabis sativa
tttaaattttattccatttcattcctattcctattctcattctcattcctattcctatatttttattcctctcaaccaaacgccacctaaaagacaaagtccattacaaagcttaatgataagcaaaaataaatcaatactgacaaaggcgagcaaacagcaaaaaggccaatagagctacaaatcgaggcacgtacatggttatttttaagtaccataccaccatagatgaaaggtaaagaactaaaataaagatacaaacgctcaaatctctaataagagaaagtccataattagaccaaaaaccaaaggaaaaaaaaaacaacataaaacaacatatctaaaaatagatctaaaacaaaacaacaataaaaaataaaaataggagcatagacccaaaacaatgggagaggaagagacatcccgccaccggcaagctctcggtgctagagggaatgtggaaccacaccacctatccacctcggcccgtccccaagcttcaaattaaaaggaaaagggccaaaaatgccaaaaacattcgagcaaagacgactgtcaccaccggagactcatcggtgcctccttcggatcccagccgctatagaccacgaagccccaaaatgatcgacctcccctcaacgacgactttgaaaaagcatacttgtctcggcttccccattctcgtcatgcaaggaaccatggccatgagaaccaccatcaatagtctttcggttagagagcaccaaatgcacaacaaagttggtggttgggtctctagccgagaaaggataagaaaaagagatgaaaccctagcttagagagagaatagataaaaaaaaacctatagagaaatcttatccttattatattataaaatacatttaattaaacaatatttttcatatgagttaattgagaattcaaggccacatttttcataaagttattaaaataatgtgaagattgttatttatagtgttactattatagagaagagaaaacaaaattaactaaaaagtttaggaaatatccgtggtacactctcttaaacggttgtttcagtgttttaacatttgacagagctttttagtttacttttttatgattttgtgtggtgttgttatttaagatcatttgcaattttttagaaaattctacataatttgcagtaacaaaataaaagttaaaaataattgcttatcacgtgtataagaaaaaatagtcacgcgtacaacaaaatatttaaaatttatttttggcactgtaaactattcaaatttttttgaaaatttataggtgatcctatatagttgcaacgtactcgattgcaaataaggcccgttgaaataatttttgtataactttccccataaggatgacatatcaagccgcttttatttttaagttttttgcctcttctttgtcttgtcgtagttcttcctcttctcaaggtaagcatcgattagatccatctaacaggattatgcttcttttatttgaaaagtcacgtatagttgtaagtgcttattgggctcacttgtattttttagatgaatccttgctattcttccaaactaaccgagtgaagctcgttttgcaagtttgttagctctctcattcatttcatggggcacttgtcttaattcacattccaagaatttgttttgtaagctagcttctggcgatgtcaaggtagttcttcattgcgaagcttctgccatcgaactgtctttccatatgttgaactataaaaattgaatatgtgtgaatttgtgctcttgttatccccattgacaatgcgagctccaactcataaatgaatgcttcacatttcgcctcattattcttgcaagactcactaagcataatggattcttttattttcaaatcagatgtagcttctagcactattcctatctcgactttctagctatttgatgacccatccaaatgaactatccatacccactctgattctattaactttggaataattcctaacgcattaataaacgagttgatctctacagcgaaaccagctagaatgcttgtcccttttttgcctttttgggaagatatgacatatcatatgcccctagcttgatatctcacttttccattcttcctaatgaatctaatttgttaagaatatgtcttaatgaatagtcaatcaacaccataatcagatgcatttcaaaatattgcttcaagttcttatttgtggtgatcaaggctagaacgaacttttccatcgttgtatacctggattcttcttccaaaagtaccttactcagatagaatatcgattttgtttggtccttcttctttgaacaacacatcgctcccaactacttcacttactgctaagtatataaagagctctttgaatggttgaggtgaaacgagaattggtggcaaactgagaaaagctttgatattttccaacgccttgacctattctgttccccacaatttgttgaagctttcttgttacaattgttaggtttatttttatgcatttttagagtctattttagtatgtaatttagttgtttttatttgtttttgttcaggtttacgtttgttttctttttgttttaggctaatggtcaattacatcatgtggattaaaatgagaaaaaatgctaaataatatgaattttatagatttagcatgaattttacagttgtaagatacagtgggtaataaattctaaattttagatgctcaacactctccatctatgatcgaaaataaagtgagaatataagatcacaatgaaatactgaagatggaaaagggggagcaaaggagaggagttcttgtgccctctctgccacgccacaagggccccaacaaaatgggggtcactgcccctttgtgccgcccactccctcgcgccacgaactggaccctgagggggtcccctccacctcctcgcgccgcaaccacaggaccctaagaggggtcccctccacctagctcctcacgccgcaactacaggaccccaatgggggtcccctctacctcctcgcgccgcaaccacgggaccccgaggggggtcccctccacttcctcatcactctctatcagaacaatagagttgttatgctgatcattacttaacttgttgaagaggtaaaatataaccaaggtatatcttttctatcagaggttgaatcaatcaccagaagaaaaattaggccaaaatttaggatatcttatggtaaaataaaacttccatcgaagagaagtaaatgaaaggctttcataatacctctccttttcctctttcaaagaaattaaaatgattgaagttttttatttggaattgtcttaggtctaattcctattacttttgctagatttctcgtaactgcatatttacaatacaatcgggttttgaataagatgaacttttcattttctattttttttttctttttcatagttaacgatgaaagtaataagaatgaaaggtgtttactttttttatcatcctggcatcgagctattttttcgtaggacctccactacagtattgtcaccgcagtagagtttaaccaccaagttcgggatggattggtgtggttcctctacgcttaggacactagaatatcgaaccatgaacgaagaaaggcacgaaagaaaagtatatcggcctggcaaactaaaacatcttagtggccagaagaaaagaaagcaaaagtgaatcgtgtagtagcgacaagtaaaatgagagcaacttaaaccctaaaaacggggttgtgggagagtaatacaagtttcgtgatgctaggcaaaatggtggagtgttgtaccttagatgacgagagtctagtagctgaaagtatcactagcttatgctttgacccgagtagcatgggacacctgaaatctcgtgtgaatcagcaaggaccacctagcaaggctaaatactcctagctaatcgatagtgaagtagtaccgggagggaagggtaaaaagaacccccaattgtgagtgaattagaacatgaaactataagatcccaagcaatgggaagagcctagggttctgactgtgtgcctgttgaaaaatgagtcgggatttgtttgtcttttattaaatctttttcattgcttgatagataatttgataagctactgattttttttttcgtgttacataatatagttggccaacatgttaactaatcggttaagataaattggatcagattttgtaattgtttcttctgcagtacctcgatgtgacatgaacgtgaaagggatttaataatcagtttttttataagagaaaaaataatttattttggctttttgaccccatattgtcaggtgaatcttgaaagatatgaaaggagacgcccccatgaggggagtccctcacctcacctcgcgccacccccatgaggggggttcctcacctcacattgtgccacctcccaagggaagccctcgtgacattgtcactgttggaaaaattctcattacaagagagaataggaggattacaatcaaaatactcaaaatacaaataaaagtatttcatcaagattacaagaaatctagaaaagaagaa

SEQ ID NO: 36459 - DNA, 4860 bp, Cannabis sativa
  modified_base (4006)..(4008): a, c, t, g, unknown or other
gtagccacggaggtcaggggcgatggctcggtagccgagggaagctagagcaaggatctggtgtcgccaggtgtaccatagctcggggaagccgtgcaagaagaggatgagtgggccttgacctttctccgctacgtggatatttattccattagctttcactgtcctgtgctgtatgccctccatgagtgagtgtgatgaaaataagttcttctcttatgttcaaactaataagaaatgtttctaagtgcataagcagatcctatgagacaaaaccatgtcgtttttttcttattttattatttgttatgaataatataaatacatttcttatgtaccatagctgtatattagatttgaatcagatttgtaattattattatttaagtttttttttttttcatctttattaaagaaaatccatagcgattagaggactcaattcaagagaaacatcaattcacgatcggcaactaaataggaagttctagttaagtaatgagcaatactatttacagaccgtctaataaaattgacaaaaacatcaaacaattcatataataacatcttacaatcataaataatactcacaaagtaagaaaacaaaagggtcgaactttgcaatgcttgcacaactgtaagactaccagttttgattacaacttctttccaatcttttttttttcacccaactcaacgcttccttcatgcctaaagcttccaccatttctagttgcaaaatcccagctcggcaacaactgaaccactccaacattgcaccagtagcatccctaataactccagcaaagctgtatgttgcaacaccagaaaaatgacagcatcaacgttgattttcaaggtgttacttgttggtttttcccattttctgccccatctgcaacagtaagataggccgcagtaagagatcgggttgtatcttgagcacgagtccaatccacaagtgatgcgtgagccaaatagggaacacttgtgactgaagggactttgtctgaccaaactaaattattctgatgcttagcagccatactctttctctccccgtccagctgaagcaataagttggcaaaccagttagcaaaggaagttgtaggtgctgaacataacccagtgtcgacttgactccaacaagccttcgcaaaagaacaatccactaagcagtgaaaaattgtttcatccatttttttacacataagacaggtagaatcaataacgacatgtcttgatctaagtctagtctttgtaggtaagaaatttgtagcagcacgctataacatgtctttacctttggtgggacactaaggttccaaagagtattccaaaacgtcgagttatcctcttgagaaccaagatccttactcaattgcagatatttgtaggcagatttaactgaaaaatggcttgaattttcccaacaacaataccacacatcatgcaaacgagttgaagataaggggatgctaagaatcagattagcatttcgttcattaaacaaatcacgaaccaagttgacatcccaagccaaactaccagtaaccattagcgcctgaacattttgttcaacaagagatgtatgaaatgaagtcacccttggattctcttcatttggaagccacagctctaatagcacactcaccataaagcatgtcccaactctgcatctagcctccttacgaactaactcgtgtgtttcgaagatacttcccacacaaagctaggattgcttcctaattcagcagccaagaagctcccatttcgataataacgagctttgaagatcttacttaccaaggaatccggacggctaaagagtctccatccttgtttgcacaataagttcaagttaaagtctcttagaattcgaaacccttgccaccttttgacttatgaattgtccatttgtcccacctcttccaatgaattcttacacatcaactgatccatttcattataggtctccaccagaagaaggaacacattcatcgcatagcttggtagtgattgagctacggtttttattaacaactcctttctcgattttaaaagcagcctaccttcccacccctgaattatttttcgcattttatctttcaaaaagccaagcaaagcagttttattgtgacccacaatatttggcagccccaaataagtgcttccttcccctgcttcactaatacccaatgtagaacaaatactatgtttgaccctattcactatgttggtactaaagaaaactgataatttatgcttatttacttcctgacccgaagcaatctgaaaggtgtttaataattctaaaacatttacagcacattcctcagacgccttacaaaagacatagcaatcatctgcaaaaaaccatgtgggataataccgggggcccccttgcaaccttacaaccacgaatcttccccattctctcatactctcttatcaatgcggaaaaaccttctgcacacagcataaagggattgggtgacaaaggatctccctgccttaaacctcttgttggaacaatcggaccaatctcttgacccccaacattaacactataggagaccaagctcacacacttcataatcaacttagtccagtgttcaacaaatcccattttcctcagcatggcttgtagaaaaccccactcaacccgatcatatgccttactcatgtccaacttaagtgccataaagccatccttaccaacttacttcctttttaaataatgcatgacttcaaatgaaaccaggatattatcaataataagtcttttaggtaaaaaaagcactttgggtttcagaaataccactgggaagagcaactttcaacctatcggccaaaactttagaaacatatcttataaaccacattaacatcctctgtgggagtaagaaatttgagtggactggtgagtgcaaagaagccttccagaacttgaaaaagcatctagctaaggctctcatcttgttgaaaccaattaagggagagccattgtacttatacctgctcgtgtctgatcacgctattagtgttgcatttgtgcgagaagaaggaaggctccaaattctggtatattatgtaagcaaaagattgctaggcacggagtctaaatacccaataatcgaaaagttttcctatcgcttgataattgcctccagaaaactgatactatactttcaagctcatgccatcaaagtactaacaatcaccctctctgacaagctcttcaaaagccaaaatcctcatgaagattattaaagataggctatgcaatttagccaatttaacatccaataccaacccaaaatctcaatcaagagtcaagtcttagccgacttcattgtcgagtgcactggaatcaatgacaaaccatagatttatttataacaagaaaaaccaaaaagtgggaatttcaaaaattatatttgacaacattctatcaggtaatgcatatatttctcttagtaaacttttttttacattttatttaatattatagtcataaccctacaaaaaataatattaaatgactaaatgtttgggctcatttattcggtcagagaaactatctaaattcatactacttttcaaaaattaaaacttatattttacaaaaccattaactagccccactctcatgatacttaattcattcttattttacaagaccggtccgtatttttgcatcttataggtctaaattgcagtcttatatatatatttgatattggattggggaatttgaacttgaatgttctttgttgtaattaagacacatgtaaactgttagtttgccacatcagcaactaacttacctaaccaactgaattcagttggcctcgagtcagctgcaacctactcctataaaagggactctggtctattgttttaggtacagttttgatgcattgttaattgtctagagagagagtaaacaagagagaatacacatacagtgagagaattgattgagggatgttaaagggattgnnnattcatgaaatggcttccctcatgtgaggattgaatgtaacttgtttctagttttgtaacagattgtttttctggtttatgtctctctctcattgattgtaatcaaagataatttagcaataaagattcttcttcacattcaaaactttgcctcattaattcttggtgaattcaattctattcattctcatttcagttcatagttaattgatcgatttgatctcttgtttttgttctgttattatttgaattgtgttgttttcagccgtgttcttgcacaacattcttttatttagaaaaaaatatactatactatatattaatgttcttaaattatacctatgattacattggaaaaatatatattaatcgtttaaattgataatcgtttaaattgatatttattattttttttatttattatttttttaaaataaataaataaataaagtgagaaatgttttaatttatttttcatagatatacaattaagatgaatattaatattatcatatattacaagaaaacaaaaacaccctcactcggtcttatctttcccaaaactcatatcaggataagataagatccaactttatatacctttcgaacaattcaaaacctattaatgtccctatctatatatcttcttaatttgttgtgtaaaagtcatcaatgtagtcagaccctacactctgtaactctcattatacatttctaaccacattcacaagtccttttggaattgcttccacagaactactacccacccactatatgccatgcccatgcgtatacattatacatataacatttatgattatttaaacatataattttattctttcaaaaaaa

SEQ ID NO: 36460 - DNA, 3718 bp, Cannabis sativa
aaaaaaaaaaaaaatccaaaatgtcacaagaaagattagtcattgtaacctttgttgttcttgctgtttttatggccatggtatcgactggatcaggggttggagtgaactggggaacattagctagtaatcaaatttcacctagaaagatagttcgaatgctcaaggaaaatgggttcactaagcttaagctgttcgaggccgatgagttgattttggcggctttaatggggactcatattgaggtcatggtggccatacctaaccgtatgttggaagaaatgagtgacgatcctaaggctgccgcttcttgggttcaagccaatgtgaccagttacttgtacactggtggagtcaatatcaggtttagctacattatatatatggtattaatgtttgtgtgtgtatgaccttcctcttttcttgttcatcaagtgttctactaaatttcactctgaaaccctcttctatctaatttgggtaattggttttcctattatggtaaattagtttccctttttttttttatatattaaattgttggtttattaagactaccaacctctaatgtcaacccttttattcacataaattcaacgtttaaaggctgtaattaattaattaatgcttgaagattccttttccagttttttggttttggttaaattgtgaagactaggtgtttgctttaatacaagctgtttggagtgtttactctttgttaagaagcattaaacttgaaatgggaattggtgtgttttttcaggtatgttgctgttggaaacgaaccattcctagaagcatataatggttcttatctacatactacattgccggctcttatgaacattcaacaagctttaaatgatcaaggtgtggggtcaagggtcaaagcaacagtccctttgaatgcagacatctacttctctcctgattcaaaccctgtaccatctgctggagatttccgccctgaaatcagagacataacaattgagttagtccagtacctccaagtcaatgatgctcccttcactgtcaatatctacccttttcttagtctctacagtgatgaatacttccccatggactttgctttctttgatgggaagcatttcaagcctcttatcgatggtgatagagtgtacaaaaacgtgtttgatgccaatttcgacacccttgtttcggccttagagaaagcaggtttccctgacatgaagatcatagttggagaagttggttggccaactgatggtgacaaaaatgccaacataaaaaatgccaagagattcaatcagggaatgctgcagcatgccctgagtgggaatggaaccccagctcggaaaggcaagatagagatttacctgtttagtctcattgatgagaatgccaagagtgttgagcctgggaactttgagaggcactgggggttattcgagtatgatgggaagccaaaatatgggcttgacttaactgggtcaaagaaaaataaaggattggtggctgtggatggagtggaatatatgctgaaaaggtggtgtgttctgaacccagatgttaaatacttggatgtattgccagagaacattgattatgcttgtagcttgtcagattgcactgctttgggttatggatgttcttgtaataatctgactgtccatcaaaatgcttcttatgctttcaacatgtactatcaggtcaatgatcagagtagatggacctgtgatttttctggtttggctatggtgacagatgaggacccttctgttggggactgccagttccctgtgatgattgcttatggttcttcattgcaaagtggtatgtcagaaaaggtcatgagaattgttggcctatttactttgttaatcattttgctatgattagaggaaaaagagaattaagttttaggtagaaatatcatatcttatgaagtcgagctcgagtctaacaagaatttggatggagcatgcagagtgatttgtgtaagctaagcaaattgcccttatgctataggtctctgtctttataaattagattcaaatagataaaaattttggttcttgaaagtcaaaaaaagtataaaggtatgtaaaggagaaagtctcattgcatatttcattgtcgtggttgatattattacaagaaaaagggaaactagataccaaaaaagttgttttcaaatgtgacctcctttcattctagagttgttgagcataaaaaggaaggagtatgtttggatctagagctttcctaatacaaaaatagttttagtaatagactcatagttgtaaatttaaaatacttataaaaatattatagtcactttttttttttctttttaagaaaagggtgtcttaaataaatatgtttgtttagaaagcctaatatgccactatttgtaaactttttgtggacaactaatgcattacacaaaatgatatgtattgagaagtttaccataacatggtccgactttaattttattttttcctttatagacacaaatcaaatcaaacactatcaactgaacactaaaagtcacatcccttataattttttatttttttatttttatttttatttatttttttacaccaaagagtaatacactccaactacaggattaaaaaataataacatatcttataatctttttcttttcttaaaaatatcacattcaaaaatatatttaggaacattttgataagaaaaataaaattgtataaacaagggtaatctatagtgataataatacttagttataactctttcgttataagttaaatttttcacaattaagtatatgtaaataattagcatttaacaataaatttaacgttaggtgtacctcatttacaataaaatgttaacaaaaaatattattacgctcaaaatttaaatttaaatatttaagtgtgatcggaagctatacattaatattatcgccacaaattattctataaacaatattaataagagcaaatacaattttggaccctgtatttcgtaataattactaattagattctctgttttgttaaatgataaaatagactctgtattttttaaaatggtacaaatagaaatatgaactgattttttgtcaaaataaaatttaataatattctgatctaaaagtgttatgacaaaactgtttatattttttgtatttattcgtgttaggaattgttttcaagttagtcatattaaaaaaaaattacaaagattaaactcagaatcctatttataccatttcagaaaataagaaaatacaaaaatacaaagtctaagtctattttttttttttttttgagaaaaatacaaagtctattttatcatttaataaaacagagagtctaactgataacttttgcattacatagggtccaaaatattatttaccttattaataatggagaatatactattataattatctcaaacttgactcaaaattagagatgaaaattgcacctgttgggtatgaggtctcgcgggtatgtgtggggatttctcgtataaataggaaatgaggcaagcaagggaataattttctatccctgaatgttaaacggatcgggaatgaggataacatgcccctccccgacatggacctatttatttatgttgatcgaggtttttggcaaccaataaaataaaataagattaaagagctgtaagaaattaagagaaaaatttttacgtggttggagcgtta

SEQ ID NO: 36461 - DNA, 7467 bp, Cannabis sativa
  modified_base (5394)..(5405): a, c, t, g, unknown or other
ttaaatcacagagaaaatattactattattatgtgcttcattcacagaccagcttaatcagtttcaacttaattatgttacaaattccaactctcggtcactcactgatccaaacttgtcaatattcaaaaatgacaaaacaaaagctttttttttcaaaatcaagatttacaacttcaacattgtatgaaattaaatgaagctttttcccccctcaaacccactaaacaaagaaggaagagataactctcatatgtactactgttttgttttactaaccaaaatcacaatactaccgagcacttgggcgagcaaactcgtcaatagacaaaaaattctcagttccaataatgtcaagggagcccaagttgagagaagaatgacctgagtttcttgatgtgtcatctgagttaccttctctcactgttgttgcttctctttccatggtgatggcgtcctgaacctccttcagaacttctgagattgatggcctcatgtatccatgtggctgaacacacatcaaagctttctcagctattttccacatggattggatgtcatactcgttgcgtaaggcaggatcaatgatgccttggatgtcaccactctctatgtgtagctttgcctgcagtacatattagtgtataaagaatcagaataaactacaatggaaggaagaagagaaggaaacactttcttagacttacccattggactatgttacgacaattaacgccaaaactttcgttagatattgcttcttgacctgatattagctcaagaagaatgacaccgaaactatacacgtcactcttatccgttagttgctgagagatgtaatacctgccatatcaatgagaagatgaaaattttatacagacaaactaaaaaatgcagagagttttgttaagctgacaaatttcaacttatctcaagcatgttgtgcaaattatcaaaaaactaactcttaatgaaatatggcaaacagccttactcaggatctagatatcccacagtgcccctaactatgcttgagacatgggacaccccatcaacagcaagtttagaaagaccaaaatctgaaaccttagctctcatttgtttgtccagaagaatattactggtctttaaatctcgatgaataatggctggagtacatcctgtgtgaaggtattcaatccctgaccaaacatggagaaaaatataacgtataaaaatcaactggttgggaagttctaaaatctagcctgtgtaaaattggaaaaataaaaaataaaccagaaaagatcatagtgcttaaaaaccttttgccgaatcttcagcaatctcaaggcgcttgatccagttgatacttcgtccgcgagttagtggccctacaaaagagcataaatggttggtccttgcaacttgtgtagattctattgaaatttataggtgatcctaccataaagatgttccttgagagttccattatgcatgaactcataaataagcatactcctttcatcttcttggcaatacccgagaaactgtaccaaattcctgtggtgtatccttgaaagaagagttacctgttccaaagaaaagctaggaacaatccttcaggaaaggccacaaatttataaaatgtaagagactcagacaaaataaaagaatatacctcatttgaaaactctcgctttccctggtaagagttacttgtcaagaccttgactgcaatttctctgtcatctttcaatttcccatagtacacaactccgaaacctccagacccaattttcttctcaaacctttttgtagcaacttcaatatctgaaagtgcaaagcaatgtgcagattctgtgggagtctcgcttttagaagcaactactggcttttgaaccgggagggaatgtccaggttgctctgcaataagtacaaacaacttcatcacattagagtcaattgaaacttaacatccatttccgcctggggaatggtgtaggatcctaatattgtcatggaattgtacctttatcacgatttcttttactccctttgtgcaagcataggcaagacacaatagtaactatgagcaaaacagcagcaccaattgatgcaccaatgattgcattcttacggcttccacttgagctccctttacgaagatctttgtttcccgtaatgctacagataaacaaagtaggaaggcaaattaatttgtagaaccatttaaagtttctctacaaatattacttcaaaactgaagaataaacttctgaatatttgtacaacaagttatcattttttcaccttcatgtaatctagtcatgtgactcatgtccatagaaagaaatactcacttgaaagtcatatttttgttgaaaagaccctttgggactgatccggatagcatgttattttgcacatacctgcaaccatcagattcacccagttgctgccttatattaactatgtcaatgacagtttttcattcaaaaaataatgaatataagagttgcagaaaacatacatttccttcaaattgggtaggtttgttaaagaggaaggcagcccacctgtcaactgattgttttcaagatgactgtacagagcaaagatatgagttaggtaattgttttgaacacacccattctaagaaatgaagtcaactcagattacattatctgtaagttcacgcatccagtgaaatcaggtattgaacccgtcaatgaattcccatctagccatctagcagttaaagacaaacgacaagaaaaaagtaaagagctaaacctcaaaagaattgccaccacccacaaaaacaataatgaattcatacttacaattcgactagtccactcaattttgtcaagtccaaggggatattccctgtcaagttcttaccagacaacatactgccagtcaaaatcagcaccaatgtagttgtgattagattagacgctaaccataatctactcaaagagttaaaggactaggtacccaattaaatcttcaaaaagaattaactattacattgcaactattctcggttgtggatctgaggtacaatgaacccaagaccacggaactggtaggcatgggtcaccgccttctagtgcccagtcagatgagtagcgtgagactacattagaaatgataggccctgaaagttgtagaaacttcaggattagtatgattgtatagcttagaaacaattactaggaacatacaaacaaaagcaatacgtgtagttaatatttgtagctgatttcaaatctagacatcagaccaaggcatccagtatccaataatgcacttaccatctatagaaccttcacttttctccaaatacttattaatctccattgcattcaggagaggaccaagggaggagtctactgttttcccaaatctaaaagataatacaaagggaagagaaatatttgtaaatcctggctcgtagagacggtatttcccttgtgcattttcttcaatattgacaatagctttgctgatatcaggattgccggggagcactagcctaaactttcttgactcatccggtttaagatcttcaatttctgcaaagtaggtcattgcccacccactaccaggaaaaccatccaagttcaaacggtaagtcaatgacccattgctaccaactacagccgtctgcataaccttttcaggtggtctctcatccctgttagcatcaattggcaatttcgttgacacttttgtggttccaggtgcaacatcaaccagataattggctttcttcacagagtctgactgccatagtctatcaaacgggtcatcaggatacctgaaattaacaggtacagattactcacaagacaagttctcctctaaagtataagacaagtatattttcttccattaaagttgaagctatcattctggcgaagaacatgtgaaatataaacatattaagtttttctggataatccagatttaaaccaaacatactctagcgtacctaacaggagcttcactgtctgcaccaaaatttatccttgcagaaacactgaggtagtaattatcttcaaaatcggtgtaataagccgaaccattgaactgtcgaagttcaagggttgatataaatggctgcccagttgtagcattggataaacatacgctgattgtaggagttgaagccaagaatataagctccctagtctctatatcatcagcatccgcaataacaatatttgaccaatgggttgccccaagagagatatcaaacttgggataaacattattgttgtcaaagttaccatacaagaatgttgctcttataaggtatctggtcctacttgtgacattaagtatgtaacaatacttccttgaatcagcaggaaagtgtctcagagtcatgtattccctcctggtctcgtttgcaactgctatactcgctgtctcgccataagcgatattgtcaggactccacattagcccaatatcatctgtgaaagattcattacctccacaatccaaactcacaaaacctgctccaacaacagcagcacataatcagtaccctatatatatatatatcttatatatatgagatacaacaataattatgtaaacgaaaatccatacttccctagaatcctaaatccaatatccaacaagttattaataactttaaaagagtcaaaattactaaatttgcttccttttcttctctatcttgttttatttttatttattattattattatttttatttttttattttttgcttgaagaagcttaagcgtagttcagataacagcatcacatatgaaagattttatatatgaagaccaaatttcattattaaaatttaaaaattcagctagcataaaaaagattattatttccatatgcaatctgaaaagggaaaaaaaaaaagaacaagaagaacaagaaaagcagtgagttccataaagagcgcttttaaagcaagtaacaaaacatggagcggaaacgaaaatgaatgaaaatcaaacaaaagaaaacagagatacctatacgtttatacatgtataatttatatgtacatacattaacgtatatgcgtggataaagattaaagagagtaaaagaacgaacctggcatctgagaagaggatgaatggatgagaaaaaggagggaaaaaacaagaagaggcaatctgaagtagtagtagtagtactccatttgatttgccttctcaaaagagagtcacagacgacgtgacgatcatccaaagaagaaacaaaatagtttctttttcatgtatatttacattaaagaaaagcgaagcaacgcaaagattatattttcttttttttttctctttttctgtttggttactgagaaaagaaaagagagtaaagtagtgagagagagagagagagagnnnnnnnnnnnnagagagagagagagagaatggtttgaatgagtgagagttttagtttagtatttagaattagctgttaggaaagataggaagaagaagaagaaagcagaaggttgagaagtgtgggtcccactggaaaaggtgacagagaaagggtaaatatgtaaatcatcattctaagatgcggacccaccattggtttctgtacaataggtcacatcacatcatacccccgacctctcctctgagtcctgatgttgccactctctactctctagtctctacgctattcttcccttctctcttttttaagaaattgcgtagatatatattgactaaaaaaaattagcgcggtcactataaattaaattacacggtatgaaagacagattcactataccaattaaattgctactgaaaagttcatttaaccacattacagactgtaaaattaaacagtctataagtaaaaagcaaaattacagcccgtcaaaatgcttgagagctttttacattgaagtgcataattagtaatatcccaagtcgaagtagtttccttcagagtattaatcatcgtcttcgagtcgctctcaatgatcacaaaagaatgcttctcttgaactgctgcttccagggccaacagacaagctcaatctctccaataaaagggtcagagaatttgaagattttgcttgccacccacaaaattgactccttatgatccctcgctaaggccaccacacacatcgaatcgttaccaaccttaacgtcacagttgatactaacccaatcgtctggcggtggagaccaagaaggagtcgagcaaatcaccagcggagaaaacaaacaaaggctataatctgcataacaagaaaaaatatcgtcagtacactttttaatgttacaagtataattagtgtatgaatcttatcattcctgattttctaaatcgtatccactattatcgaagtgcacaggaagatctcattgacctccactcctttgtccttcaggccccataagaacttaacccaatcccacattcggccccccgactccggcacttgcatcacaccccaaggggatgatctccaaaggtgagcaacaaaattgcaatataggaatagatgctccacagtttcctcttcttatctgcaaagagggcagaacacctcatcaatatgcattctttaagctagagcattcctgatcggtagagcatttgagaggatattctactacaaaatcttatgacgctccaataccctagaattccaaagtttattccaaagtgtgggtgccaccgtgctaggcagagctcaggacatggtctgagcaagataggcagatttcgtagaaaaccgaccagctgggtcttttgtccaaatccatttatcactgtcttgcccccgacctaccccctctaaggatattagtggttgtcacttggtcaaacaggaaattgagcttgtcaacatcccagttcccatcctcagtaagaaagtttgcaactttttccaactctcagggcgaccattttttggatcgggatagaaattctaaccatgaatcacccacagatcatcccttccttcttctttattacaacttcttcttttctttcttctttttgcttaagattcatttcttttttaaagaaaaaatacaacattcatttcattataaaacaatggcctacaaagagctcaaatgctcataaaatttgggagatctagacaccacacataacattattaagagtaagagaaaaatcatgttttatggtattagcggaccgattactatgtttaaaactaaaagcatataataatatatataaattaatcacaccaatcaacatatttcaccgaatattatagattttaaaattactaagtttcagatatttagaatatcctaatttatttttctaattaaaaaaataaaattatttcctatcacatgtacccaatcattcttactagagttaagtcgggttatgttaagaaatattagatttcatctaaaatttaattggtaactaatcatctatataaatttagatcgaattgtt

SEQ ID NO: 36462 - DNA, 11907 bp, Cannabis sativa
ttttttttttttccattactgagaattgggagtggtgcagataaggtgtttggtccagctacaacaactcgccatgtttatgatgttgctgctcagcaagttgtttgtggtgccatggaaggggttaatggtaacttttatttaattttactaatgtgaatccggttttcgtgtgggctataatgtttcctttcccacataaaatctggttatgttatgctacttaagttcatacataacatacaaacatatgaaaatgatttcaacttggtgatttgctatttatgcaggtactgtatttgcatatggtgttaccagtagtgggaagactcacactatgcatgtaagtgactgagatcatcttatttgtggttttttttttttctttctgtgtgcatcgatgttggttcttctattttcttgccctgtttttattgaacaaggaatgattaggactatgataacaaagattaaatatcttgtcttgttattcagggagaacaaaagtcacctggtgtcattccattagcagtgaaggatgtttttggaatcatacaagaggtaggggattaatttatcggttacttctcgttttatgtttcattgattgaataacatttttcttattttcagactcctgggcgagagtttcttcttcgtgtttcatatttggaaatttacaatgaggtcagtctttcctaactttgttatgatcatcattgtgatgacttggggctttatgtttgttacaagaatttggtttggttttggattaaaatgcttgagtttatacagaagctatagtgaaagaatgtgaagctggttttaatcaatgtttacttgtttcaaattcgtgtatcattccacttttttgttgacatttttttccagtacttaagttgcgttgaatctatagttatactaaactgatatgttttccttccttggttcacttgttatgttcaggtcattaacgatttgcttgatcctactggacaaaatctccgaattcgagaagatgctcaggtgcttattattattattttctttaacaggacatagtgcaaaaatattttatgtatgtctataagtattgtgacattaattttttgatgtagttttccattatttgctcagactgttatataagttctaccatgttcatggattgttgatttgctgtcatttactttggttacaaactttattttcattttatgacctgcatcatcttaatgtctaatttcaagttcggtatttccaatttctaattcatatactgttaatctttcggtagggtacttatgttgaaggaataaaagaagaggttgttctttcaccagctcatgccctatcacttatagcaactggagaaggtatgccaccttttagtttttattttattttattgttgttatctttataaaacagaatattctttatttttaaagtttggcaacatattatgcattgaaatttgtctgaaacacatttataatgtgtttgaatacgaacttgatttttattttcctttctttctcgactgttgtcacatttctcaacatccctttgtttgtaatattagttcttttagattttgttttggtgtgtctgtcactatctgtatgcaaccttttttaacattttttatcactcccatttatgtgcagagcacaggcatgtgggttctaataacttcaatctgctaagtagtcggagccacactatattcaccttggtaatcatgtttaaattgtaatgaaaaacctgggcttcgtggataagaatttctttaatagcttcttgttgttatatgctttatttatgtattctttattaagaaaatggttttttagttttttcttttagttcctttagaatgtgccatatttaattatttttattaattagaacattgtggtagctattattttagtacattgtgcaacagctatggttgaacaatagaatttgttctgaaccaaaaagataactgaagacacatagatgaagcagttagagcattttgacactttgggaatttggagagatgaatattcttctaaatacccaaccacctagtaaaataactttttaaagtaatcatcatatttatatgtaccaaaatctacccttagaagccatgtgaactttcttggtctgaagaacttactgtaaatactcggccactaacttagtaaaatagccatttattttatcctcacttttacatacatgaatctaccttcagaagcccatgtgagactcgagctcttggtctgaacagcttgttttggcctcaaagatttaatatgaatatgccctttgcaactagattttctccagtatgtattttgctttatgttgcctgctgactttttgtgacaaacctctttgggttgatgattgtcatgatatgcaccttttttttcctttaagctggtgatgtcttttgtacattatttttaaatttaacattttcatccaaagccttgatttagtgtggtttttggctgattatattttgttgatcaaggcactagatcttgtatgctaaattcatattttatcttgcagactgttgaaagcagtccacgtggggaaaatcacaatgaagaagatgtgacgttgtcccaattggtaaatttcatttgcctttctacttgaaagcataatatactaatagcagcagcagcaataacaatataattgttgttgtgttgctgttatattgttatcatatatgatattactttagttctgaaattttcattgggttacccaagttctattctaatttggattgtcgttgcagcacttaattgatcttgcaggttctgaaagttctaaaactgaaacaactggattgcgtagaaaggaaggttcatacatcaacaaaagtttactgacacttggaactgtaagatcaatatctctctgtagattggtagcctaactacatctttcttcataattagccttcatgttcatccttaaaatatgctggattgtttgcttgattctgatgttaatcctctctgggtaggcttaggtagtagtaattgcaatatgttgggccatatggctggaaaggaatagaaggatttagaagaaattgaggttaattgggggaggggagtttatgaaattttagctgttcttctttgggtcattgtcattgattcacttgtttacaggtgatctccaaactaactgatggtaaagcaacccatattccatatcgagattcaaagctcacccgtctactgcagtcttcccttagtggtcatggacggatttctgtaagttcattgccatatttcatattgtcttgtcttcttattcatcactgtaggggctttcttcaactgtcttaggtttctggctagataattgtattgcttatttgggagaatgtattgttgtcattgtagcttatttgcactgtgactcccgcctctagcaatactgaggagacacacaacacattgaagtttgcacatcgtagcaaacatgtagaaataaaggcttctcaaaataaggtgaatgtcaggttttttatgttcttggtaacttgttttggcaatttgctctgagactgttaactcattttctcattcttttatgttccccctacagattattgatgagaagtctctcattaaaaagtatcaaagagaaatttccagcttaaaggaggagcttcagcaattaagacgtggcatgatggaaaatccaaataatgcgggatctactcaagaagatctggttactttgaagcttcaggtttgtgggatctactatgataactcctttagaattattagccgatatatctaaagatagtacaagttccaaggtgtcttaatattagtagaaatattcagtcctacaattttattttgctacccccttgaagaagtatttggtatgctttgtggacttttccccccgctaattgttctcttttatgttggcgaagctggaagctggtcagtctaaactaaagtcaagactggaagaagaggaagaagccaaggcagctctaatgggaagaattcagcgactgactaaactgatattagtttcaacaaagaatgtaatcccagcaagtatatctgagcggcctggccatagacggagacattcatttggggaagatgaggtatgtgatagtttatccagcagttaagaactttgcttatgagtttgcaacacattcagagtcctaaattagtagcttcatcttgagacatacagctgatcctttcacaatgcagctggcatatttaccagataaaaagcgagactacgcagtagatgatgatgctggaagctatgggtctgagattcctttggaagtgagagatgaagtgactagtttagatgagttggtcaaagattacagaaggaacaaaaagcgtgggatgcttagctggtttaaacttaaagtacctacttttactctaatatatttgtttagggctgattatacttaatgtgcttattgttaatggtttgaacttgctacttaccggtatcatatcatgcattggcaattagattaattttttggcaagtaatatatataccctgattaatctcaaatattatgtatagaaacccgaaaatacgattggattatcatcaacagctgatagtgagagctcagctagtgggtcacctgcatcttgctctaaatcttcccagagagtaatgtttagtgatatgaaagatggaaaaagaaaatcagtcagtaacaagggagatgatcctaccgttgttgactcgttgccaggaaagacacaggcaggtgacttgtttagtgcagcaagcggcggtcgttgtcttcctccggtaagttaaattctgtatgctattttcggtgctatggatattctctagaaggaatacaagcaagaacttaaatccattggttaatacaagtacataaattggctttttatagaatgttatgtttcgattctgttgtctaaggctgtcatagaatacttgtttctgttgacatcacaagataacttcggtttctttagttctgttaggacattttatcattttgtttcttaaacataagaatcataacactaaggtatctacaggagtgtttagagtctttaggggatagagtcaagtatggggtggctctatgggagtttgataataaagattttagtggctctatgggagtttgatagtaaagattttatatatatatatgtgtgtgtgtgtgtatgtgtgctttcctctcttgtaagaattgtatttcatggtctttactattttacagagtttgatgtatgaaaattaactaccaccattattgataatgaccttgcagagtggtactactattacggatcaaatggaccttttacgtgaacaagtgaaaatgttagctggagaggtggctttgtctacaagttctctgaaaagactgtcagatcaagcagctaacaatcctgatgattcacaaattagggtgagctgctgtttgatgtgttgttttcaagtatcaatctaatttccccacctccctacttaattataaagttcgtcttcgccattaggaaaaaatgcagaagttaaaggatgaaatcagtgaaaagaagtttcaaatacgaattttggagcagagaatgattggatcatttgagatgattccacacacagacagcattgagttgtcacaggtaatttctattggaatttcacttgaacaattgcacctttttgctttgtctgtaagaattttcttttagttcaatgccttgtattttagtctttgtattgttgctgaacattatggatcaatcaagactggttttccatgatttcttctttggaaatggaattggtaaatattgttgttcttcctgatgtattcctttcttttgtgtagactctgtccaagcttactacacagctaaacgaaaagacatttgagctggaggtttgttctcatgtttactttatagctatttaaatgataacccaataaaatataagaaatgcaaaaatcgtttactaagtcaatgtctctctcttgattgatcattcaagatcaaatctgctgataataggatacttcaggagcaactacaattgaaggttaggcataaatctgcaaggtccgttttccttttttctttgagttgcggattgtttatcttgtcttcttacttttatcagctatcagagaatgtggagatgcaagagactattcttctgcttaggcagcaactcaattcgttatcagataaaagtacaagtggtttaagaatcattgctggcaatggtcttacctcagctaatgaaacagagctcggagaaaatagaattgcttcatgcggagaagcttatgccgatgaaaatacaccaactagtgtcatgagcttgaacagagttttatccctcgaggacaaagactgcaacaacagtacattttataattcccaagtttatgttcaggttattcaaaatctcttcaattaattctttttcgtaacagtagaacttaatattctatcttatttcattattataaatgtgtggtcccttgcggtcagctcagtcagttgagtttgctaatctgtggctttataacaggctgcagagattgaggacctaaagcaagatcgtgtgcgattaactgaagaaaaggatgagcttgaagttcagaataagaaattagtagaggaagcggcatatgcaaaagagttggctgcagctgcagcagttgaactcagaaacttggccgaggaagtaaccaagctttcatatgaaaatgcaaaggtgactggcgagcttactgctgcacaagagcttcgatgccgatcagcttgttgccagaatccagcatcaaataatctcaagcaaaatagtttgaatagaggtcgaactgattcctacgctagaagaccagacgatgatgttattttcgaggagttggagaaagaacttgatgcaagatgccaaatggaagctgcacttaaaacagccctatctgaaagagataaagtagaagatgatctaaggaggaggcttgatgacgcgaaacgtcacgaggaagatttagaaactgagcttgcaaatatgtgggttcttgttgcaaagttgagaaaacccaacaataatgatgaagagtcatctgaagtgattcattcagctgatacatcacaagcaagagttagaaatgggtttttaccatctaataatggccattctgatatgtatgatgaaatcagcaaaaagtcaacaggtttagaagatttgagagccaagtatcagaaagaaaggagaaaatgcaagcagctagaaagccatatttccagattgaaggtatgcacaaagcaaaccccctttcgtactgagccagatctaatttgataattaatattgtgtagcgtcatgtttcttcagctatatagagtacataactagttggtttttgcggcttttacttaataacctaaacgaaaggtcaataatgtgtcagtgcacataaatattgttaggagactagttttattattcgcactttgcacgataatttgaattttggtgttcttcatttaaataaagttggtagaacaaaggttttacaatgtagttcttttatgtatgtaatatggttgctaattcaatcataaacatgttctccagggtgaagatattgctggtctggacgtgacaactcttgaagaactacagaacttccatgtggaggctataacaaagatttgccacgcaaaggtagtttctcatatggtttatttttcggttcgttttatacaagcttagtgttactgcttctgcacaccatttgtcaatctatgctcaattgcctttactgattccatgacgactactaaccgtttatcttcgtttctgcagtgcctaaatagtgtattgtagcatgctgaggttgaccaccgtacaaaaattactccactgacagttctaacattgcaaggttagtcttaattgccaataaaactactacattggtactataagctaatcttctacattgcaataatagacctcttaaaagggtatgaggtgatttatgcacataaatataaacctcttatgagctttacttgttggttttgcaggttttgttaaccacttcttcatcattttgtacagtcgaggaaatgtgactagaaagtagaaagaaacaatttgtttctaaaaatgaccaaggaaactgcaatttttgcaagaaaaaagaaaatcccatttgagcattgacagattagaatgctttgttgtacatgaaacttccttgtaacaaaaaaattatgatcatttcattgtgtattcgtatatatataattattaaactcatcatctgtaatgtaggttatattacttcatatcacaaccttaatataacctaacaaacagtattgactctatcgatctattgacatgtattttgatgaacccatttagactttatttgccttctcttcttcctctgcagaactacttaagttatttattcaaaaagaagacctgaagggcagttgctctctgctgctatcccaaaattattagctgcacatgatggcttgagaatatcttcaacatattcaccttccacactgtttttaaaaacaggggaaaaaaaataataaagatgagaaaagtaccaaatgaaaatgttgaaaataacttacaataataataattgaaaagggttcaagatcagaacttgggaagcctgtcacaatttgcaggtccccatccgatttgtttctcttcgttgtcgtaaatcaccatttttccttgcatcgaaatatctgcgaaatatgtaaaatgatgtacctgtaagaaagaagccgaaatgagtagtttttgatctctagtgatagaatttttcttacctccaatgatgtttaggttgcccaatccaacctcagagccattcaagattcccaagcatacatttccatatttctgtgaggaaaaaagaaccagtgagttaagggcagaacagaagggattttaaaagttaaaacatggtcgaagattctcaccgagactatgagataagactccggtggcatttgcagctgagccttttttgcgttggtaaagcttagcgcgaggggtgtgaagaaggtcttagcgtcttgaacggttttgaaggctttgttgcctctccagcaaagaggcaaggaacgatcatcggttgcattcttgagaggctttccaattaaactctttgtgacctgaaacatgctttgctacttaattttcctaaaacaccaaaaaatatacaaaatcaacttatgccccatctgtttctcgcttaccaggctaactacggcgtcataagattgggagttcaagtaggtgtatgagcttccactgtcgaaaatcacatcgaggccttttagtcctgttagctttccaccgaagtaaagctctgccggtcctgataagtagtagtctctgaaaatacaaacaattcagtgttgtttcttatgaaactaattcttattatgttgcaattaagttctgtttgggagcttagaatttactcactctgaaggtttggctaatattggtatccatgagattcctgaagaaggaacaaaatcatccccaaagaagagataacctcctccgcgctcgcttaaacaatgaccaactacatttctagtcagacccatttgagtaagctgtgacaagataccggctttgccattgccaaggccgataacaccagcagttggaggtggtgtgccatgatactcctgatcatatccacacctgatatgagcacaacagtaacaaaacatttgattattctttcaaattcaaaaactaacacaaaatttcatacgaactgttgttcataatccttacccgaaagccaaacgagggccaagagttgagccatttgagaatttgagaggaaagctatccatgaccaacacacccaaagatgatccatgatcggcatagtctactttgtagtcacattgttcagttggcgagttgcagggctgattccccggatattgaacagccgagcaaattggatctgcgcatcgcaacacattgttcttcggcttataaaggctatcacgaggctacaaaatgcagacaaaatccaccccctttcagatcaaactttacaaaatgaacaaaaaacttaaataagttcattctcttattctatacactacacacattcaaaaatcaactcctcaaatagttttccttgaaaaagcaatgcaaaaaaacattacttaaaaatggggaaaagaacaaaaaacttaaaaagttcattctttaatcctatacacacattcaaaaatcaacattacttcactccccaaatagatttccttgaaaggcattgcccttttcccctcaattgagttttttcttacttgggttaatccttaaaaacattacattccattttctctataaagaaaactcttaacaaatatcacttaaaaatggggaaaagaaaaaaggggttagatagttaattggttcatacctttgtgcaaccagtacaaggtgcatcacattggacccaagtgaggtcactaccagaatcaatatcaaaatcaaacactttgggtggattccctatctttagtgaaacagaatagtacctgtcaaaaccccaatattcatatattcaaataaaggtcacttttttaatcatttcattacaataaagttcaaaccaaaaagaacaatacccatgttagaaaaacatgaaaagtttaaaactttactcataaaaaaacattacaaaaaggaaaatagcagaaattgaaacaaaagaacacatacccaagtggataaacattgccctgaacaggtaggataacagaagttcttgatgaaactgagtttttctttgtgggtggttgatgtttggcagctgagaaagagagtagaaaaaaatcagcagagagagacagaaaaaagaggacaatgaatctgattctattcattttttgagtaatctttggtttttcaataatggtcaaagttgaaaaactcgggtggaggggattcagtccttttatagggaagaatccctgaaaagctttctgtgtaatttccaaatggaaaatggaaatttattaatcccaaaaattgtaaaaaaaataatgataaaaaatagaaaaaaaaaatgacagatgaaaatggattggtgagctggagtgtgagtgactaagttaagaagaattgtaagttttaagtggtgcttttggtttctttcaaaaaaaaaaaaaaaagtggcgcttttggtttattctagttctacattagcaaaaatcacacgtggcataatacacacgtgtgttttagaaagaaaaattaattttttcagaaaaataaaaataaaaaataaataaaaatgataaaaaaattctacaatagatattttgtgatgcacttttttttttgtttcggcttagaattttgtagtttaattttttttatagtagtgtacgttatagttatttaatatggtttataaatttttaaaaaattaaaaaaaattaatacactaaaaataaagttaaaatattttattttacatatttacaaaataaaataaaaaatctcacatataacaaattgtttaaattctatttttagctataaaaaatattttatatatttaattttttttttacgtagaaaagaagaggaaatgggtcgattgaaaattagggagtcttacataaaagaaaaaaaaaaaatagggagagttgtgtagtgagtcgaccagtcaaatgcgtgtgggcaaaggtctatattaccccttttgctagaaaatagagaaatgttaagttgttttctagtttaatgaagttttctttaaaaaaaaaaaaa

SEQ ID NO: 36463 - DNA, 14449 bp, Cannabis sativa
  modified_base (14368)..(14373): a, c, t, g, unknown or other
cggatcggattggatccaaaatatgaaatctgcagttagtgcggattggatgttgtttgaccatgcgggttggatcggatgaacacccctaattctaatcgtctctttcacaaagctcttttgaaacgacacgtcgtttaacctaagcgacacattgttgtcgtttcttccaagctttgctgtactatcgtttaaaatacggtgtcgttttgtacttccaatcagtacctctgtcgtccctccctttcactaagctctgtgattcagagccaaagattcaaaaaccctaaaactcaaaacccttccaatgaactctttcactctttgtatggcttaaaccagaacaagccctagcttttgcttcctccaatcactactgagttctgaatcaaattacgacaatgacgaaggtgtacggcactggggcgtacgatttcaagcgtcaccatgttgctgagtacccggtggggtcacagcaccagctttccgataagccggtggagtccaaacccggttccacaacgcttcccagctcaatcacgttgtcggagattcagcaggaccggctcactcaacttgctatggagaattggtccaaagctggtgaagcagccaagtcgaagaagccgttcaagccggagctggttaaggagatttatgagacggagttattggttaaagagggtcagagaaagcctgttcctttgcagagagttatgattttggaggtcagtcagtatttggagaactatctttggcccaatttcgatcccgagaccgcgacttttgagcatgtgatgtcgatgataatcatgattaatgaaaaggtttggagttttttttttttttaatctttgaatgttttagtattgtattacatttcgacaattacaagctaagattgtatcttggagaacttcacttatattttggctttgagaactttttcagtagaagtcataggcttataattcaatttttttggggctatggggttggtgagttatgaatggtaagctcacatttgctaattgaagtacttttatgtgagtttgtgttgtagaattttgttcttatgaggtcatatagactctaactagtaggagtgttatgagttagtctatttggtaataggaagagaggagaggaagtaaggaagtatattgttcttgtaatgtttggtatgaatggaagataatgccaaatttgtttgttggaaaggtgaagtggaagaaatgaggatattttagctgtattgaacagctcacacctaaaatctctcaaatgtgaaatgttgggaggatagaaatttaaaaaaatttatgaaattcatttcctaatgtctgccctaagaaaattcttcctacctatcaatcactctattctaatcatcaagtaaggtctatgcctttcatcctccttatacatctacctcttaccatacacactccaagtttattgccccactcctcttcacattatcagttgactggtttgcacatatttatattgattttatttttcaccgaaaattaaactgatgcattggtataattgttcttaatacttcttttcctttgtattgaggttttcataagggaatacgtaaagattttggtcagattacttatttgtcttttcaacttgcagtttcgagaaaatgtggcagcttgggtttgtttttatgatcggaaagatgtgtttcagggttttcttcagagggttcttcgtcttaaggaggtttgttccatatttttgaaagtcggtttttttccctcctttgtaaaggatgtataattacttggtcacttaatgtagtttgatttgaagttgactttattttgacatttagtaaatttatcaagttataacctttagttgaaggagccacaagtcagatataagattgcaaatgattgatgttggtgtttgagattaatgattaagttgttatttccaatcgtggttgcagggaagggaactaagtatcgcagagaaaacaaattatttggtcttcatgattaatgcatttcaggtatcatttcttttgcaatacagttttccttataaacaattaactattttaacttcattgatatttaggccaattatttgtttttcatgttgtcagagttatattttataattgtgttactgttttccttttaaaaactgactagaccctagattactttagatttcagtttcttctaggatggctaattttgaagtaggtagcataatgttgatatttgatgtcactacttgcttaacattgcacaattttggtacacttattcattttttcttactctgttttacattttttttttttggagggtgcgccaggcccatgttgtagtgcaacacataggcgacacgtaaaggcccgagtagcaagctactgaatgggcctttccctttaaaaaattaatttaatatcgtgtgggccgttggcccacatatcagatatttaatggcatgctgaatatttaatggcaatttctgtcttttctgatttacctggatttttgagtatatgatatcttacattttagcaccgtaaaaatttggacatttgtgatagtttttttaacaatggtattgtttcgcagagtttggaagatgaggtggtcagtgagacaatccttagattggcaagtttgccaacttggcacagtttgtcctatggtagatttcaggtaagcttcaatttcaatattcatttaggatttttttcttctgattggaattatacatgaatgaaaaacttatatgtttgtgatttgtttgttttttccccatcggtagatggagctttctttgaacacagacttgatcaagaaatggaagagaatgctaaaaagggaggcgaaggaagttgcaaaacgcggtgagacttttgatcccgtaaacatgcctgaagtgaagtttttgagaagtctcatcgaggaatttcttgaggttgtttttcacacttactttttggtgatatgttttggtaaatcattgtatatatgtgggaactaatggctacttttcatgtccttacagatacttgattccaaagtttttccctcagagcagggtatcaatggagatactaataaaatcggtcatgttggtgacgcatgtatcttgtactgcgagagatttatggaatttctgattgaccttttgagccaattgcctacaaggaggtattatcacatcttttttccttattaaaatgagatttctttttcgatacttcaatacttaaatgttgtcttctagtgcaggtaatatacttgtgtgtgtgtgtgtggaaagatattacttagcaaaaaggaaagagatattatttgggagtgttctcttgtttctcccatcagctatttctttttttttttagttaataactcatgaattttactttctaccaatcctaagtttctactttttattaaataagtgtacaaacacgttatcttgtttgtcatgcattagtttctctctgtagaagatgagacttttgcatacccactttaatctgattttattaaaaagttgatgttttttctattatacactattttgacttttcttaccataatacttctcccttccaatatttggtcacaggtacttgagacctcttgttgctgatgttgctgttgttgccaaatgccacttaagtgctctttatagacatgaaaagggaaaactttttgcacaacttgttgatttactacagttttatgaaggctttgagattaatgatcatgttgggacacaactgaccgatgatgaggtgcttcagtctcactatgatcgcctgcaatctttccaactatttgcttttaaaaaggtttccaaggtcagtataggagatgtgattaataatgtaaactataaagcatcctcccttggataatagataaaatttggaggaaggtacttattaatgaattccttttctttttatcttcttgtagttgagggaccttgcgttggctaacattggtgcaattaacaagcgcaatgatctctccaagaaattgtctgttctttcttctgaagaattgaaggatttggtttgtcacaaggtatttttcatgacacattgatagccaggttttatgtatgcttttagtgtgataagtacctgctttatgtcttcataatttaataaaaccccttaagaagaatgtgtgaagattgtttggtctctgtttgtgtttctctctctttctctctctcttaattttcctcttgcgtgaaatgtggattgcttattggttttgtagatagcgataatatggtttgttgtttatgatttggtggttcttacaagctctattttcttaggccagacccatttcttctgcattatttaagatttttctattctatattcctctgtaagtaacatgcaagtattttgtataatgtatactactttatgggcatctgatgctggttggaactggtcgttagcctacgtgctttcggtggcctcagataatgtggatttttttcattcatgtaatttgttgttagaggaacatttaatttgagttcatgtatctagctgtggtagtgttgcttatactcttaccttattgcagcttaaattggtgtcaacagatgatccttggtccaatagggatgattttctcattgaagtcatggtttccttttttgagaagcaacaatctcaaaaagaagccataaatgctcttccactgtaccctaatgaacagattatgtgggatgaaagcgttgtacctagcattaattactcgggggagggttgtctggcacttccaaaacttaatttacaatttctaacacttcatgattatcttttgagaaatttcaatctcttccgtcttgaatcaacatatgaaattcgtgaggatattcaagaagctgtcccacatcttctggcccatattaataatgaaggagaagctggttttcgtggctggtcgaggatggctgttccaattagagaatttaaaattgctcaggtaaagcagccaaacattggagaagttaaaccatcttctgtaacagcagaagtcacttttagcatttctagctataaagcacagataagatcagaatggaattctcttaaagagcacgatgttctgtttctactttctatccgtccttcatttgagccgctaagtgcagaagaagctgccaaggctagtgtcccacaaagacttggacttcaatttgtacggggatgtgaagttattgagatgcgtgatgaggagggaactttaatgaatgattttactggaaaaattaaacgggatgaatggaaaccaccgaaaggggaactgagaactgtaactgttgcattagatacagcacagtaccacatggatgtaagcaatattgctgagaaaggtgaagaagatgtttacgggacttttaatatattgatgaggaggaagcctaaggagaacaactttaaagctattttagaatctataagggatcttatgaatgagtattgcattgttcctgactggttgcacaatatatttttgggttacgggaatccttctgcagcacaatggactaatatgcctgatctcttgaaaacagtggatttcaaagatacttttcttgatgcagaccatttaaaagaaagttttccagattatcaggtagctgaaaattcttccctcttttttgttttttgtatctatttgtatggtaatgctgttgccgatgaaccatttttcatttccatttaccaacctgcaggtttgttttacaaattccgatggtacagaaaatttggaccctagacctcctttcagaattactcttcccaagatgctgaaaagcagcactcatgctcttcctgggaataagaagtctgcagctgattcaaagaatgatgtctctatggctgatgccgatagcgagaaagagaaactttttgttgaggcatacacccctcctgaccccggtccgtatccccaagatcaaccgagactgaactcagttagatttacacccatacaggttctatgaatcttcttttttcaagatattacttttctttagataagtgggaagttttcttgaggttaaattttataaaatttgttggtgtatattgtactacttgtatgtttggcatctagaaacaaattatgtggtaccaacttcgggaatttgaacaaaaaaattgcttttggtaaattgtttggtccaaggaatcctttttcttttttctttttcctttctcattgtcccccctaccattggttcatctaaattttttctagtttaattgtcaactaaaatggacttcacagaaacttttgtttgtgttatgtgttccatttttcactgattacttgtattttatcacactgtacagattggagcaatcatctcgggagttcagccaggactaactatggttgtgggtccacctggtacaggaaagactgatactgctgtgcagatcctgaatgttctttatcataattgtccttctcagagaacattgataatcactcattccaatcaggcccttaatgacctttttgagaagataatgcaggtatctgctcgaatttagttactatggggaaaacggtggtagtgcattgttttgtgtatatgtgtgtgtgtaactttttaattaatcatttgatatttcagagggatgtgcctgctcgctatcttcttcgacttggtcaaggtgaacaagagcttgcaactgatcttgacttcagccggcaaggtcgtgtgaatgcgatgcttgtaaggcggttagaattactcagtgaagtggagaggttggcaagatctctccaactccccgaggatgtaggctatacctgtgaaacagctgggtacttttggctgcttcatgtgtactcccgatgggagctatttctggctgcttgtgctgagagtgaaaataaaccatcatttgttaaggaccggtttccattcaaggagttcttttccaacacagctcatccagtcttcacgggggagtcatttgataaagacatgtgggccgctaaaggatgctttagtcatctcaagactatgttccaagaacttgaagagtgtagggcatttgaattactcaaatcaaccgctgatcgggcaaattatttaatgacaaagcaagccaagattgttgctatgacttgcactcatgcagctttaaagaggaaggactttcttcagttgggtttcaagtatgacaatttgctgatggaagaaagtgcccagattttggagattgaaacgttcattcctatgttgcttcagaggcaggaagatggttatgcccggcttaaacgatgtattctgattggtgaccatcatcaattgcctcctgttgttaagaacatggctttccagaagtatagccacatggatcagagtctctttacaagatttgttcgtcttggcattccttatattgaacttaatgcccaaggtagagctcggccgagtattgcacaactttacaattggaggtacagagatttgggagacctttcatatgttaaagagggtgcaatatttcatagagcaaatgccgggttttcatacgagtatcaattgatagatgtcccggattatcacggtaagggggagagtgccccttcaccttggttctaccaaaatgaaggagaagccgagtatattgtcagcgtttatatatacatgcgcttactagggtatcctgcaaataaaatttctattttgacaacatacaatgggcagaagctcttgcttcgtgatgttataaatcgacgttgtgttccatatgacttcatcggtcctcctaacaaggtatggattatgtgctttctttgacagtactagaaatgatatattggtatgaggagagtttggctgtatgaaatcctattgattaaccattgaagacaggactttgaaattattttattctagttgtaactttcacttgcagattccatctctataatgctgctcttcttaatgtctttcaggttacaacagttgataagtttcaaggtcagcagaatgattttatattgctgtcacttgtgcgtactcggtttgttggtcaccttagggatgttagaagattggttgtcgccatgtctcgtgctcgacttggcctgtatgtgttttgtcgtcgttctctgtttgagcagtgctatgaacttcaacccacctttcaacttctacttcagaggcctgaccgccttgggcttaatttaaccgagatttcatcgtacacagaacgccatgtagaagacactggtcccacacatttggtcagtagtgtagatgagatggtcaccatctaccagcagctttatcaggtatgttgctttcttcatggccttttttgctactttatattttgatgaatcgcttctcttgttacttttaatgctttattatgtcaaagtataagcaactgtgtgtgtatgtaatatgtatatgtgtctctgtatttctggtgtatttatccattttcttctcatttcaggcaaagtttgcaccttatccaggacaagctgctctaatgacagaggtgttggaggagcagaatgatcatcaaaatcctatatcattgcccaatggcatggaagctgaagcaccaaattctgaaaatggtgcaccagatgaaaccatgtccgtagcagctgaagtaccaaactcggaatacattgcaccagatgaaatcatgtccgttgtagcagctgaagtaccaaactctgaaaatggtgcaccagatgaaacaatgtccttagcagctgaagtaccaaactcggaacacagtggagcagatgaaagcatgtctgatgtagcagctgaagtactaagctccgagaatggggcacccgaaaatgtaccagatgaaagcaacatgaaagaagactcaaaatcaaatggtcccgagagtcatttgaacaggggggtgatggataataataatcctgaaagtgattctcaaacaaccaacatggaagaatagattgggttttcggtgatttgctgacactactcttaatcaaaagcgggaactgtagcctcaagtctactccataccaaccaggcagtgcaattgacatgacttcgatcaagataaagcttcaaaacgtttacgattaaaaggggtttacaaatgatcacttgctgtttaggttggaaagcaagaatggtgaggactccaaatcttctaacttacaattctctactttttgttcaaactcagaaatcaaaaatatttgagggttccaaattgatcatgaatgtaatactttaccaagaatgtgtttgttggacatctcttgtaagtagaaagaacttgaaaaattgtggagtatttcttcacaattcaatcttttttgtctcgctttatcttaaatcattttcatattcatatttggatcagggctgttgaatatgtcaattctctcacaacatttcttatgtatcatattctagatcaatatttttgttctataaaacttgtagatcaatttgcggcaaaactctctgactatcaatttacttgcaaaaaaccattcaactttatattttagtgagaaaatctttcaaagtactgtttcgttttcagtctcgttaagttttaattttgttcacgtgacaatgacatgtcattaaaatattatctagcgtggccatattttacaaaataaaaattaaaatgagtaattaaaataaaaataaaaactttaagagtattttgcggtaaacctcctcaattatcaatttacttgcaaaaaactatcaaattttaaagtttttttggataatttttatttttattttaattactcattttaatttttattttgtaaaatatggccacgtaggataattttttagtgacttgtcattgccacgtgggcaaaattagaacttaatgaggctagacagacgacaccttaaaaatataaatacaacagtactttagaggatttttctaccaaaatatgaagtttgatgttttttttacaagtaaattgataattgaaggattttaccgcaaattaatctgtatttacaaactccatgatgaataagatgatgaagtattgtaatgataataatattaacactcatcgattaaaaactgtatataaattattattagggatgaagtatcgaatactaaagttacatagattagctagtgtagatttatatacaaaattgagtaattatcgtaaatgcatggattgatcttgaactggttaattaattcatgttcttcatccaataccattttattatagataattcaatatgtatatatatatatacataatataagaagaagaagaagaagaaaatcatctataaatacacgtacaagtatatatgtatatataattagtggaagtaaatgaatgtgatgaagagaataaatataataatgaattagttagtaattattatgaggatatttgggaggtggaggagacttgtagtagtataaagatgattgatacaagtcatgaggagccattggtacagtacttgtactagtactcatcagccgccttagtagaagtactactccggcttcagatggcggcagagacggtggtgaattacgatagatacaatccgcggtggttgtagctgttgtagtagtattagtactaatcatcatcattaagcataataaggccaataaaccataatacataatcactacaacaacactattattattattattattcatattgatcacttttatgatcaatttcagcttcagaaattatcataccctaaatattaagacacttctttcattatatatatattagtatattagtccaaatctaaagattattaatgctagttatatatatatataacatatgtgcgcgttttgattatatataactttaaatacatgacgtaaacgatcgatcgtgggatgtaatgggaagccactttcactaattatttaattttgttcttcctctaaataattaaatttatatatataaataaatataatttgttcatttatttttatataattaattggataacaaatataatattattataaacaattgatacatacagcatgaattggaagagtttatacaatacaagtagaagtagtggtagtagtagtgcttatatatattaatttggagacttaattattttattatttacttttatatattttttctcaccaaaggtaatacttgtacgaaaccaatatatatacagtgatagacctagtagtgttgatgtgggggctatagctcccactaacaaaaatattacttttcaaaaaattaaatataattttttttaatttgataattatagaccaaaataatagaaaagtcctcataaaattaaataaatctagtaacagtgattataatataggtataaatatttttaatgataaataagctcccacaaagtaaaaattctgagtccgtcactatatatatactaggttaatattacatgcaatacacgtataattaaccttttttaattaagttcaattaagtaatattaagtacaatacatgtgtttaattttttttcattaggtaatgtatttttttttttaatttttaaatggaatttgagattttgatgtttaagaaaaaaaaaattagctattgctacattgttgtgtcatttggatatgattatatatacgtattttttaaatttttaaactttttttaattaggtaacgtatactatattcttaaccaaaactcacgtgtgtctatatataggctggattcgtaaatttgatataaaagttttttattcccaaattttacgaaaaatatggtgtgtgaatcgatttaccataaccaaaatgaaaagcaatcaatttcttattacaatcatttcaatttaaactataatattttaagtattttaaattaaaattaaaatttctttatataaaatatttaataaagaatattctgttaattaataggatattctgttaaagttaacgtagaaacctaaaagtattgttaaaccaataattctgttacatagccacactttatatagaatagatacacacactggtgcactaattagaatttttgccccctaaactgtaacatgtaccaaatcatgctccttgaacttttttggctgttcaaaattacccctgaattattgagattgttaaatttaaggattattacctaatttcattcaattttactatttcagtgattgtttatgtactaaaccatgctcctcagactttgatatctaccaaattaatcatacccctcgaactttgacatgtactaaatcatgcattctgaactttggtaccattaaatttctctacctcaaactttgcatttgataacatggttcttctcatagaacctcttgactcaccagaactttatgtcaacttgtacatctttctcgatttctctattgtcagttataagtgcaaacaaataacagaactttagagcttacgacttaaaataatgttttcttgaatttcaataccttctttagaacagtccaattagctaggaataggtctgactcagtggacaatgggtgaaaaatgggccgactcgatccaaaaatcattgtttggatgagtggactcaattttcggaagcaacattctgacatctatactggatgtgtgtcggacttctgatttaagtgattctagtggtgttagatttgtcttgttgaaagctttgacttgatatgtaatacctttatgtttaactctaatacttatttattgtgcgcgaaagcaataaatagcatgatatgatatatcaaagcaaaaaaaaaataaaacatacaaaattacatggttcgacaattcgcctactccacgggaggcaactgatattattaaactgagtagaaaatatacaaattacaatgtaaatttgcacacaaattatatctctcgagtatttttctcaaagtttttctacaaactgaataaaaatactcacatattcacttactatttttccaaccaaaagtttggctgctctctaaaatttatccactaccttgaactgatacattatgctcttcaaagagcttcatggaaaaaattcatttccaaccatatataattaacgagggagcataaattaataactattgcgtaacttcattgattaataaagcaaataataaatttgaaatctcttaatcatcattcaaccatgtattaacttcaaaccatttcaatagtttcacttttgagccaaatccaaatatccaatgtgtatatattaatagatatatattttgaaagtaatattatgtgtgtatataaataaataaagggaatcatcatataattcctatatatgttgttataggcttaattaagaggaatgaagagtagtcatgtgttgatcagatctatagtgcctctcctctatctccattctccaaggaattaaggccacttgcatatatgcaaaatatttaatgttacaatagaaattaaagataacttaaccaaagtgagtgaggcagtacttaattatgatcatcaccacaccacacattcgccagaatatatatttatttatatataatatttatgatgttgttgtcgttctcaggtttgtgatcagtgtcagccaccaatattttgtgggaatgacatatattagattagattagaggtgggccaatcccaccaattaatccttaacatgcatgagatgatattggacagccacctactttactgctacttattattattttattaacataattacttatccactctcatataatttaataaaataatttttaaaaaatatcaattattataatcgtagtgcgccacttatagataatgttaaacaccatcaatgttcagttagttcaaaactgttataactaattgaataattcaaattaatattagattacatcaaagtaaaaaaaaaataagaattttatttatatatagactttatgagcaaacagtaggacattttactaaagctctcatcaaaaaattataaaattacattaaataaaatatgagatgccacctcattaatcttaaactcttcttgaataatgagtattactgaacactattaattggtgccaatattttttatacctaatgtctcatgattagttagtaatattttttaaaaactattttctttagttatataaagtttaatatttaattacactaaaaacatttagtgatatgatacccaacaaaaaatactaagcttcaataacatcttttaaggattctcatttatattatatatgccactgaggggtcgtttggaacgccgtattannnnnnattgtattgtattgtattatatttgaattggattatatatcatatttttatataatagtatgttaaactttaattt

SEQ ID NO: 36464 - DNA, 7371 bp, Cannabis sativa
  modified_base (7320)..(7330): a, c, t, g, unknown or other
ttttttttttataaaaaaaaaagagatcatttgtatatttattaattaccgaatattaatcctatgtccaaaattcatttctgtctaaggaaaaataaaataaaaaccattctactaattgtagggagatttcagcttctatgagaagacttggaaaaacatatcttcttcagcaaagcaattaatcaaaagtctcctaacagttgatcctcaaaagaggcccagtgctgtagaggtatggtatgctccttccatcattattttttctttctctccctatctctatttatatttacactaataatatatacacttaaatattagacaatgctaagtacaattttttttctcaatttctgtattattcaaaaatatatatatatatatatatcaaaatatatattttttttaaggtgacattcgttataaatacaacattatttctataaatttttgacatttcagtttaatacacatgtttaaaaaactccaaatcttttgttaatactgtaaattattatatatttttttaaaaaattatattgtaactataattaactgaaaaaaataaatgtatatatttttaaacacagctgataaaaagattgtaataagatgttaattaagttgtaccatgcatgttttgtatattaatatttgtgtgcatattatttatatgtttttcttttatatatctataagcatatttaaattaaatccatctttagtaaaactataacacttgcaatttgtttgtgctatgtatatcatatctttattaagtagttgcaacttttgtttttcatccttgttatttaataaaaactgcatatgaaagtactaattaattaattaagttggttaaatatatgagcagctgctggatcatccatgggtgagaggtgatttggcaaaggaggaacaaatggatggtgaagtggtaacaagactacagagcttcaatgccagaagaaagtttcgcgctgctgccattgccagtgtcttaagtagctccattttcttaaggactaaacagctcaaatccctgttgaaatcccatgacctttctcaagatgagattgaaaacctccggattcatttcaagaaaatgtgagtaattgcccaaaccataaacaaaatgtcttaatcaaagatatacatgatcatgatatatagattcgttggtgattcgaacatttcatgagtttttcttagtttttcagttactaagcactggattcattagagtattgtatatatataaaagaaatatacaatacaaaacagtataattatgtaccaaccattacctaatgaagagcatatattgcataaatgaacttgcctctaacttttttcttttgtttgaacttgcatttttcaattcataactttagctaaaacaatgtgcagatgtgcaaatggtgataatgctactctgtctgaatttgaggaggtattaaaagccatgaacatgtcttcgctagttcctatggcatctcgcattttcgacttattcgatgacaaccgcgatggcacggttgacatgcgagagatcctctgtggcttctcaagtctcaaaaaaactgaaggtgatgaagctcttcacttatgtttccaggtaaatccaacgaacaatcacttctctaattttctttaaaatctcaacacaacacataaactccatcacgaccttgatttgactcatatttatgagcctaaactagacatatgatattttgatgagatattgctggtgttactcaactagttactcatataagtaacttattattttgtatgaaccaagttactaaaagaaatatacttaaaatatgtgaaaaggcttatgaaatagaaggcttgttatttacttctctctagctaaatcatagcattattcaaccacttgatgattccctcttctttattctgtttactgcagatgtatgatacagatcgatcgggatgcatcactaaggaagaagtagcttccatgctcagagtaaaaacttttccatttggctaaaatttcaatttttattgagttggtttcccttaatacttttttcggatgtagttcttctctttcagtggtccaataatgttgtattcatataaataattattaatagaatgactggttgattgtgttgtatacataggccttgcccgaagagtgtcttccagcagatattactgaacctgggaaactggatgagatatttgatctgatggatgccaataatgatggaaaagttacatttgaggaatttaaagctgctatgcaaagagatagctcactcaaagatgttgtcctctcctctcttcgcccccaatagttttcccacttagaactttgatgtgataattactttataatgttcttccttttcatgtatcatcatcatcatatattataggctttaattagacaacaatgacccaagaactaaaaagacactttgtataattttccaaattgtaggattaagctttctcaatcttggcaatcatctatttgatgtccaaatacaaaatatgattagctttttaactactattgctaagaaataattagctgagtaatttatcattagagtctaaattacttatcctgttttgtctttaggctcaactgattggctaatgcttatttctcacaactgtattattcaatttcaccattttctgttgtttgatttttgttatgattgattctttttgttgttctagaaggtgtgaccccattaggacaactgtagtgattctagaggatatttctctctgctgtaattatttgataattttagaattcttatagttcagtctcattaggctaagcttcacctttcattgtcgatttgcatattttctcacttggtagtacatgaagaaggtagagaccttctgaaagagaggaaaatcaaaagagagagagagagagacagaaacagagtaacacaaaaatgaatgaaaagcattactcaatcaagtaacttagccctttatttatacacagaggttgatatacaaacaatttcaaagcaaaacagaattgtagacagaagtagttaagtaacctaacaaacttaaccactaactaatacaccatagttatgtaacagagtctaaaacatgcttaacatctcccctcaaacgaaaaagtatctcatacatcttgagtttggatcaaaggtacaagaatctctctgttgacaagggctttgtgagccatctacaatctgatctatagctggtacatatcgaacaaacaattgcttggacagtatgtgcttcctaacaaaatgcaagtcaatttcaatatgtttggacctggcatgaaacacactgcaatgccagcaacactttgattgtctacccataagacaagacaaaagggagtggtgatttgtagttctgaaagtaaggacattaaccatttgatctctgcagcaacatttgcaagagatccaaattcactttcagagcttgatctggccactacattctgtttcttggcttaccatgaaaccaagttccctccaaaaaacattgcataagcacctgtacccttcctgtcatccacacatgatgcccaatcagcatcagggtatccctcaagtgtcaaagaggtggctagtgtgatatgaagaccatgggagatagtaccttttagatacctcatcaactttttgcaggcctcccagtgggtgttatttggagcatgaatgaactgacttagcttgtttatgatgaaagctacatcaggtcttgtcaaggttagatattgaaaggcccccaatgtgcttctgtacaatatcttattagcaaatggttctccttccttaagggagagtttgatactggcactagtagggttaggacttggcttggctccatccatgttaagcttcacaagtaggtcagtgatatatttggtttgggagagatacatcccagtagagtctttatagatttccaaaccaagaaaatagtgaacaggacctaagtccttcaaggaaaatgacttattcaagtcaagaacgaatttgttaatgatctttgtgttgaggcctataataagaaagtcattaacataaactagtaaaattatcaggttgtcaccaactctataagtgaatgaagaggaatattttgaggttgtgaatccccactgtaatagggtgttctttagtgtttggttccaagctcatggagcttgtttgagcctataaagagccttgtgaagttgacacacacgattaggtctggaatcatccacaaaaccctctggctgtttcatatacacagtctcttgtaggtttccattcagaaatgcattactgatatctagttgtttaaccagccaatttagagaaacaacaacggtgagtatgatcctcaccgttgcaggtttgaaaattggtgagaatgtctcctcatagtcaatcctaggagtttgtaagtatccccttgataccgaccttgatttcagtctattcaaagttccatcaacattaagcttaactttatggagccatttattgccaataagagccataccagggtaatattgaactccaagtacctactcttttaagagcattgaattcttgttgcattgagttcaaccattgaggatgttgaagagcagctgctattatttgaggtttagaggggattagggcttcaattaaaggatatttggtggccaagtgagcttttggcatgacaattccattaagtgatctagtcctcatagtatgtaaccttattgtagtagtggtacctgcaatatgtatgaacatcagttgttgggttgggaggctgagatggggatgcattagaagtggagacatggtcagtttgtatgtatggtaacatgggagggtgactgacattttgagaattgagatcatgagtggtatttggatcatcattggtgacatctatttgaatagtagtgagattttgttggtttgtggttggtatagatttatgttggtcaggttgatctatctgttggtcatgagattgtggtatctggtgttagctaaggtatgggatattttgttcatttggttgatggttttggtaaatgttaggtgggacaataggagttggggaaggtgggttctcgtttgtgccaggagttgtctcaggttgcatttgagtagtgcggacaggaacaagtatcacaaatgagttagcatagttattattagttgtactagtagtttgaaatgtagaaataggacaaggggtatgaacaggtacctagttattagttgtggtagtatgttgagcaggaaaatgcatctcattgaagacaacatgtcgagagatgaggttctaccacttggatgatgacagatatagcccctgtgttatgttgagtagcctaagaacaagaatttcttagacctcagttcaagtttttgagccttgtaagctctaaggtgaggaaaacaactgcatccaaatggttttagcaagttgtaatcgtgaaagaggcattcataagggctaatattttagagaacaaatgttggacgcctgtttatggtgaacactgtagaagccgtggcatgccaccaatattccattccaagaccagcttgagccaagaatgtaaaacctgtttctattacgtgtctatgtttgcgttcaacccttccattttgctcacttgttctaggacatgggtgttggaagtgaatgccttggtctgctagaaatcaagaaaatggtctatactcacccccaatcaacttaaacacttcttataggtaacccaaattgcttttccacaagacatgtaaactttatgaagacatcaaaggcttgacctttcaatgttaggggaaagattcaacaatattgaatgtagtcgtccaaaaaatgaatatagtatttgaagccctctttggatgtaatatgagatggaccccataggtcagtatgaattaaagccaatggttcattagctctactgttggaattttgaaaaggtagcttatggctttttccttggtgacaagctttgcaaaattgtaatgtacttagggaacctgtgtatgatatgtgaggtaaaatttttgccaatgtgttatgtgcttggtgatgaagtttactatgcaaattatttatgtcattagatttgaaaacataaaagacttgactaggaatagtggaagacgagtaacaagaatttgttttactactttctaaactagtacaagagtttacaagtctatgaaaatgactattacacaaacaattataatgctgtaagagtcattagaggcagttataagatgacatcggatagaagaattgagactatcaccgagctgatataggccacccttagccttccctttgaggagcactgtccctgtgagtttgtccttgacaaaacaacacgatttatgaaattcaagaaacccatcatgtcagctgttaattaggaaacactaataagattctttttcatggaggggacatgaagaacaaaatgtaaatgtaatgactgtgtgtttgagagggaagggactgtaatgaccaatattagaaatgactaatttcttaccattgcatacagacatggtttcagtgcctgtgtatggagtagcatcattagaattctgtgtccccatggaaacatggttcgtggctccaatatccacatactaggactcatcatcaccaatctcaggtatcataaatctgtgaagagcctgaagatcgaagagaatattagattcaatcaagtgagcttgaggggtgaaattaccatatttatgagtgacccagttcttatcaaagcggtagtgacatactgctactgtgtgccctgttcgaaggcaaagaggatagagtaggcgagctccagttccacggcaaaaggaacaagtttgattattattagtggcattacctcgatcacctccacgaccataagagtgagagtttgcatttcttgattgctgaaatgcaagattcgcttgaagcttaagggacgaatatgctacaaagttgttatgttcaatacgagtttcatgagaaagatggagggcttgaacttcttcaaatgacagaagatcactgcgagatgttattctagagacaacagggtcaaatgccggacctaggccattgagcagctgcaagatcaagtcttgatcattaattgggaccttgcgatcgaaagtgcattggcaatcgactgtgctttatcaacatagtcagatattgagagattggctttttttggaggtgggagaattgtgtttgatattattttaccaggatctnnnnnnnnnnnacaagtatgttgattaataccctaaatatgaacttctaaaa

SEQ ID NO: 36465 - DNA, 3206 bp, Cannabis sativa
tagcgattaattgggagaaatgaaaatataaaaataaaaataaaaatagaattgaataaaatttaaaacttataaaaaaaattgataaaaaaattaataaattttttttcttgttaaaatagaatagtgttttcttcctttttaaaatagaataatcattccactaaaattgtggaaaaaacattttattagaatgtcatttcaatactttaaaatgcaaccaaataaaaaaaaatgaaaaaaaaaattgtttcatttgcatttcattttattacctccaagcaaagggtacttttttttttttttggttttttctctaattatataatgattattcttaaaaaaataaataaaggccaagatgaagtcaattactgaaatttcatttaaaataagcgatgaaataacatacaatacaagagcacaaggagcaagagaaaatcaaacatccaaaattgttatatatatatagaatatttacatgaattccactaaagaaagaagaagaaaaatgtgaagtacaattctagctaaacatagtgtcttttttttttttattattagttttcctttttttgtttctacaatttgaatttagggatggagtaatgatttttgaagtaggatgatatgtgaagaattattagaggaacaagtgttggtttctttattcataatcctccactggtcagaaatatgtttggctattttatgggcatcagaagctgttcccagaagacctcttcttgtgaacccaactgtgtaaagcccattctctcccttccacccctcaggaaactcccttctcggcataccatcttttgtgaaaaaatcacaactctgcatggcattaattaattaattaaaattaaaaacatagaaaaaggcaaaacaaaaaccctttttgtttttgtgtgaaagaaagcgatgtgtgattcataataagataaagctaaatctaaaaaataatattttcacattgttattaccttcagccaagtaggaacgttacttttgtacccagttgccaatattatagaatcaaactctttctcttgtccatccataaatttagctccatttctcgttatctccttcacagtttccgtaatctaaaaataaataaaaaaaaaacataaaaaggtttcccatatcaagactcacattacaatacattagtttgatattttttgatattaaaaattgtaccttgatttttccggatctaatttgggataaggctcctacatctagaacgggagttttaccagtagcgttcttgagttcaattgggccggttttaggccttcgaagacccaattgttcagtgttaccaagggtcaaactggaagccaagagaaggatcttgtcaactaccttcagtggtagccatttcagtagtgccattgctattccgaaagttgagaacccaagtatttctctaggcagaacatggacctgtaataataataatattattaataaaatattattaacaaaaaagtaataatgattcaaaaacgacaacgatgctattgaaaaaagtgccaacaatggctgaaaaaaaaaataaaaaaattcaaaactaggaagaatagtcaaaagttggaatttttttagcataaccaaacttggaagatattaaaaatctacaaaaataagacaaaaggcagtgtgtttggttgagagagagagagagagagttacggtgtttctaacgaccatatgaggagctgcattgtgtctacaaaggtccaaactaacttccataccggaattaccacaaccaatcaccaacaccttctggtttctaaactcactaccggacttatacccactggtgtggacaaccggcccctgaaatttgtccagccccaaaatttcgggtatagctggctccgcattttcgccggtggctacaatcagccaccgagaaatgtagtcggctacttgggtctttacccgccaaagccccgaacccgaatcgaattgggcattttgaacggcttggttgaagcggggtttgattgagaagtgtgaagcgtaagactccatgtaagagatgaactggtgtttagttgggtactttggaaaatcttcagggaaatccatgaaaggaagctgacaaaactgttttggaagatgaagtttgagacgatcgtaagttctttgttgccaaagtgaagctatacagtcacttttctcgagaaccaaacagggtactccttgacgagctagacatgccgaaactgctagaccagatggcccagctccaaccagaatcggtccttgaacccaaaaaacacatttcttcgactcttgttctttacatgatgaacccatgtttacaaaatcccaagaaaccaaaatacaaaacagtttctttgtatgagaagaaaaaagtgagacgaagaggttttaaagagagagtgtgagtggagctttttcaatgcatggaaagagagagagtgagagagtgaagtaatgcaaggcgtaaaggttaaggaaaggatttggttctgtttctcaaggcccttttctcttcaggctcagggatttgtgggattcaagttgaagtacttagtagtgtatatacaaagctcagtataaataaataaatgcgtaggtagattatttcttcattattttagaggaataaatattgatatgtcacgtgtcaccaacttcaactctatgcaaaacccaattttaaaatacgttaaattacatataatacagctatatatatatatatatatatatatatgcaattcagctctctgtcttagctgcagagcaatttataaatttgtaagataactacaaagagcaacagagaaatctttctatgaaaacaatgacatatcctacataatactggaggaacatacatatatatgacgtcgaaatttaatctttcttattttattttaaataattttacatatatatatatatggtatgtatactattgattctgttgtggaaaatttgctaaaacatccttaaaaaattaaacaaatctcttaatatactatatttaaataaatacactaaatatttttcaaatactcttaaacctaaaattagccttataattcagaacaccctcgtctccctctctatctatctaacttcccccagggccggccctgaaacaaagtgggccacaggaaaaaaaatattttttgggcccttatgttaga

SEQ ID NO: 36466 - DNA, 3330 bp, Cannabis sativa
aaaaaaaaaaaaaacaaaaactcatgtttgggaatccaaatattaacattaaaacaatatcacagatttacgtcatacaattaacgtttgcatctatctcaacagaaaagacaactaagaaaaattcgaatggaaaagaaaagagagtaaaaaaggaaatattttggggtcaatgcccttgttttttaaaattggttgacctttaaagttgtattgacacaaaatgagacatccacacaaacagctgcagtaataatataatataagttatattgaaacgctacagacaggcaaacagagttcatatagtatttaatgtcttaaatctctcaacacagttaaaagaactacaattattctattcaaggaaaaaagaagcaagtttaactcacacatcaaggctcttgtgtggacaaataaaagcatgtaatcagctaagctttaagctgattcactccccgcccttggagaaccatgattatcatcctcctcctcaatagggctcctgtcatccctgcggattggagtgggactgcggctttgaccattagtaggactgtgactgcgactgcggcttcgaatatttgtaggacttcggctgcgtccatttttgccaccattacttcggtacctctcatctccgttgtcttcaccagcaccattgattgggcttcgactctttcctcctctgggactagcactgtagtctgatctacgatctcgaggagatgggctacctctcactttggggcttctctcatcaggtgtggcatcacgctgcttccttcctttggatggaggaggtgagcccctcaactgcttaggacttctgctatcatgtggactccttctgctatcatgtggactccttgatcttctctcggcactgcgtcctcctctcttaacaggtgatctggatcgactgcaaaaaaaataaaatgtttcaaagataactcttaaaaagctttgattagaacaaaatcaataaaatttcttcagcagaaataacaaattgcagacaaacctgtaactgcggtccctgctataactacgacttcgactcctgccatgacgtggactcattgagcgtgattgactccggccacgtctacaatttttgttcaagaatttataaaattaacatccaaaatttaaaagagcagatacttagaaagcaatgaagtgatatgagacagtatacttagataacatacttgagtttcttcggactgttctgacaatttctttcaatgtgacctcgctctccacaacggtaacacttattcttccaatccccagccttacaatctcgagcccagtggccatcaattccacaattgaagcagcgccctgatccaggaggaggacctctaccaagatactcacgcgatccacccggaccacgtggtccctaaatgtaaataaggcacattcagtacgtaaatataataagtatctccaaagaaaacttttaaaaattataaaacacaaactaatcaatttgacttgagcaagccatgagatatttgaagagggatataaatcatacacttaccccccgggcagcttccacaatgaggcgagttccttcaaagtctcggccattcaaaccatatcttgcatcatcagcatcccgtgggtcactaaactcctgtttaagaaaacacaaagcacaaaatatgcaagacaaaagttgaaaaccctatataacaaaaggacattatgaactacaatattacttaatgagtgattgtgtgtattttgcaagagaaagaataagttaaggacatacaacaaaggcaaagtcacgcttcatatccacatcacgtactctgcataaattgggtccagaaacagtaaggccatcatgacaatgtatcaaagggatgatgatacttcgctcctcactaaacaccactttgggattgttgccatttccatttaaaacacgcaataacattatagaaagactcgccaaatccaccaatgagaccctctcaccacagacctccaggtttggcaaaagccaaaaaaccttcaacaagatcatcatgttaaaccatacagacacgtggagggggtacacattctcacgaagatatatatgtcatttcaacataaagcacaaggaatggattggcaaaggacatacacacctcaataatggacatgctccaatgacttattttggaatagaaggtataacaaaaagaaaaccagataaagcacaaaagtcatgcttaatgttcgcaaaagggttgctgaacattataggttctacatgattttgacacaataagaataaaccccaagaagattaaaggactggcacatataagttgaccataaatttacaagaaaaaaaatataaccactctcataataccataaagcctagcctatattcaaagtgataatctaaataattgctgaaaataaataaactcaacagaaattggttaccttccatatctgctaaacagatcctcaagatcacgtcctctaactcgagaaggcaagcgaccaacataaagccgagttccaccgtaacggtcatcataccgaggcatctttattctttacctaagataaacatatcaatcaaccaagaaaattcaaaaacatatattacaagtttgcacattattcattccatatattatacagcactacacgtatgcaagaattctttttcaagaaaaaaaaacaatattttcactttacaatcgaggagctcaaatcacatttaccagcccactttcccgaaaaaagaaccctagagagagagttttggttttgatggggtcaaatgaatctctaaaaaaatatatacaataagttttaatactgaccacatttaaaagatgttgttcaataaattttagcaacatttacgttgaactctgttgtatggtaatagcagagaacatttcagaagaagacatccatgggttgagacaagtgttcaacaatatggacacagatgaaagtggcacaattacaccagaagaactgaaaactgggttgtccagcttggaatctaatgggctgtttggcttcataacttaaaaactgtttttagtttttaaaaatagaaatcagtttttaaaaactaagttttaaaaaactgaaaaacagaaaacatcaaaatgttgttttcaattttcaaaaacaattctttttgtctaacatattatattttatatttttgctcacatattcggatcctatacccggacccgaatgagttcatattatggtatagtgttaaaatattgatttttttagtaagataaaaattaaaaataattttaaaaaacttgtgccaaa

SEQ ID NO: 36467 - DNA, 7679 bp, Cannabis sativa
atgtaaatatttttgtcataacacctttagatcggattattattaaattttattttgataaaaaataagtttagagtcctatttctacaattttaaaaaatacaaagtaagagtccaattggtaacttttgtaaaacatattgtctaaaatagtatttacccgtatttttatatttatagatgattttttttttaaatttttggaggggtcacaagaccactttcatagcccttatatcgatgtatgatgattagatgattttacgagttacaatttttctaaagcatttttatttggtaatttcttgtaaattagttatgtatacattcaaagtgaataaacttaattgattggaggatattttttttctttatttccatgtgaaaagaaaatagaaagcaatatataggatataattaattggagcattggtgagagtgggaatgaaggtgcgcgcggcagctccacacgatgagatataactaggtactgttactactgttgtatatagtgtatagcgtatgatgatatatatgatcagacttggtcaagggtgattggttataatgtactttcaaggtggttgagagtgttataaagacaacaattattatatcaccggcaaatgagtgttcattttcaacatcacccagttgaattttgtgtcattgctcatgcatatataagctggccatgagagaaaattaattaactaataaatatttattattattgctacgtagatcgatctcttacttacatattctcaactgcatgcattaatgtgtgtgttttcactcctataatgtttgtactataaaagtaggttaagcccactaatggtgaagcaatatattaactattattattacttcctcttctccttctctttctctttctttttgagagtaagagagtaagccaagaaaacatggggagagtttctaataaacatgtgagtgtgttgggtgtggctggtcttatgtttgttttggtgattggagttgttcaatgccgtaagcttgagaaagaaacattctcggatggtgttggtcttggtggtggtggtggaggtggaggtgggtttggtggtggccatggtggtggtataggaattggaggaggatctggtggtggacttggtggtggttttggaggtgggaaaggaggtggctttggaggtggaggtggagttggtggtggtggtggtgttggcggtggtgccggtgcaggaggtggattcggaggtggcaaaggaggaggaggaggaattggtggtggtgctggaggtggaggtggtaaaggtggtggctttggaggaggagctggtggtggtgctggtggaggcgttggtggtggtgctggaggtggaaaaggtggtggttttggtggaggagttggtggtggtgctggaggtggtaaaggtggtggttttggaggaggagctggtggtggtgctggtgccggtggaggagttggtggtggagcaggaggtggtaaaggtggtggttttggaggtggtgccggtggaggagttggtggtggagcaggaggaggtaaaggtggtggctttggaggtggtgctggtggtggagccggtggaggagctggtggtggagtaggaggaggagttggtggtggagcaggaggaggtaaaggtggtggttttggtggtggagctggtggtggagtaggaggaggagttggtggtggagcaggaggaggtaaaggtggtggttttggaggtggtgctggtggaggaattggtggtggagccggaggaggagttggtggtggagcaggaggtggtaaaggtggtggttttggaggtggtgttggtggtggtgccggtggaggagttggtggtggagctggaggaggagttggtggtggagcaggaggtggcaaaggtggtggttttggaggtggagctggtggtggtgtcggtggtggagcaggtggtggctttggaggaggagttggtggtggtggtggagtaggaggaggaataggtggtggtgcaggaggaggttttggtggtggtggaggaattggtggtgggttctaaacaaattacaccataaatgttttagctacacagccattatatagcaaacccaactgtgtaataatcacacgagagagtgttcttaatttggtagtggcatcaaatgggatgaaatattaatatcgatatagttactttactatttcttactaattattatgaagaaaataaaagatagcttttgatggcttcttccattccatgcatatatatatatatatatataagtagagggtagtcaaactaatttatatatatatatatatatttatataaaatttattaataaacatatagttaactcaaactaatttactctttcatccaaatccaaatcaatcaatattataaatcacctaaagcatatatatatataatataagtagagggtagtccacaaaatgaggactaaataataataagaaaatctaaggcttgccacatataacagcattgaattaacaaacattcacatccccagaatattggagatgaatatatgcccactgtaaatattaagagttttaataagagagactttctccacatgaccaaatgatgatgatgatgaagttgaattgatcatagccaaactggtagccattctgtcccatcaatgaaatcgatggacatgaatggaccaacctcttcttctgtcagctgtttcgaccaaggagcccgatactcagtgtctgctcctggtccatgggttttgaactctgcctggaacaagttcctgtttcaaaaattcataaacatatatataagaaaaagaaatattaaaaggtatcatatcgctattggtacaattaagtgttaggctacacgcgatttaaatagcttgatacaaagagaatggcattacatatttatacgcatttcatactaccataaaattgttaacaagtccctatagcctttgcatagtgtaacataacttttgtggaatatcgattgccattcttaaggtgttacctcatagtggtgtggtgcctaatagcaatgctcgtataaaaataccagatgattttgagaagtatatattaattagttatatatatatatatatatatatgtagattcttactctgaactgttggctccactgctccagttagtccaaccttgtgggacaatagtcctagaaaggtatgtcttagcaaagatggtcctagaataaggcccttttgctcttcctaagtaaacatcatctgtaccataaacctttcctttaacaaacacaaaaccactattgtcagttggattctccctgttatgtgctgtgattgatccatgtattgccaatcttttgtccgagattacaaatatctcacagctctgcaaacattaacagattaacagatatatatatatatatgtatatatatgaatcattattatgcatagtgttatatatatgattttttatatagatataaatatacacaactaattcttacgtgatattgtgatcttgcacggccaaaaatgaagtccacagagccttgaatatagcaattatcgtagtaatgtctgcctttataatcaaagagagtgttgtgagtactgtaaaatgcacaatggtaaaaggcaaccttgtctgcagccacaaatgctgccactgattgattttgagatgtgtatgccaccccagttggagcttcattctacatatatacatatatttatatacaatataagatatgtatagagtcacatcattaagtatatgattatatatgtaagtataaataaaatatgtaccttgaagctaataccgaaggcaatgaagtggggagattcaaccttaaacgttgcagactcaacattgtcacttgagctttgagaccaaacaatatgagtccttcctctaccgtttcctctcaagaaaatatatggcttgtttggtggtatgtgcaccttttctctgccataagtatatatcgatatacataattacatatattgtattagcaatagacttttaaagagaattgaaattttggcatgaagaagtttgtttttcattacctgaagacccctttcctaaggtggatgataatccattgagaattgccttcaggaacagagtctatagcagcttgaacagatttgaattcaccattgccattgagatcaaccttaatcgtcctgtttgtgccaattttttgtgtcaaaagaggagagtcaatgacagctttggcatcaaagccatggacaatatttgtcaaagagactgagatgagaaaagttatagctaatgatacatgaattgctttcgtgaaagaacacatgcttggaatttttgttttagttttttggttaatttttcatttgggagagattacagtttttgagttcttatgtgattcaattatggtaaatctttttgtggaggttcttaattgaagagggtttgtcttattatttttatggtacatagttcatttggatggtgaaattgagtgttgttgaatggaaggcatgcaattttggtagggaagatttttctctctctctattttggagggtttctaacaaatccttgtgtggtttacatatgttggttaaattttagctcatttcttgttaatatgtcaaaaataactaaaactaaaatgatatcattaagtagaaacctcatattcccttcctatactatttttggcatttatttaatttattcacaaattctctaatggacctctaatcatttttttagtttttgcacacaattcattttcttttcatggatccactaataataataatgaaaactaatatgtataagagattttcttgaaaaataaaggactagctttaagtgattttattttttcatttgtacatattagttctaatttttttatatacagaaaaaaaaaagagagagagagacaattttggatttctaaacttataacttttcttcaaattatattttaaaagaccaaatagtaaatacatcccgaagatatattgatcatgtaataaacatctattaaaaatctcccttttaacatttatacagtaaatattggtttaataattattttcgatcacaatcacaatggccatgtccatgagcttgaggcaaggctgtcctcatggcacgatgcagattcggttatcatgtatatacatatactatggctgttacacttcatcagtactatgacaaaagattacatagtcaatgacagcctttaaaaatgaaaagatggtataaagttttaatatgggaaaaccatgagttggaaaatagaactattgtgggtgatgaagtgtataataataatgatgagtattgataagaagaacacatgttctacttgggtggtttcaagtcattgtcataccaagtgaagtgattcaaactaagtgatatcagtacttgtattggttctgttttcttcctgcgtgtgaatacttatttttatatatagaaacaaaggagcaggtaatgataaaatatcataatccagttttggaaatacaaataaatgaggaatgtatgaactttaaaattgtgtcattctactatatatcatgatatatatattataagctagctctagagaattcatactatatactttaagtaattgtatagattaaagcttatgcaaacctttgtcaacttaagctgtgcagctctaattttcttgtttcaagtaatattactactactgctgctgctaccaaacttgggttttgtaaactacacaagagtaagaagaatggttcagcagctgggaattatagttgtattgacatgtcttttttcagtgttgaattatggggttgaaagtagtggaggactttcttataatttctatgagaaaacatgtccacaagttgagaatattataagagatggtctcaaacctgttttctcttctgatattacttcacctgctgctttgttgaggctcatgttccatgattgccaagttcaggtctttatctctttctcttcccttctcatatccatctgccattaaatgagctaaacaagattaattatcttactaacattgttgtcataatgataaaccaattgcagggctgtgatgcttccattctggttgatcaagacagcgaaaaaaatggttcatcagagatgacttcaactaaaaactttgcaatccgacagagggaaacgataagccttctgaagtccatggttgaagtagcatgtcctaaccaagtttcttgtgctgacattctcatcatggcagcacgtgaggcagtagctacttctggagggcctcggatagaggttcccttgggacgcagagactcctcgagcactccaagctacgaactcgccaatgctcttcttcctccttccaccattggagttgaagaactgcttcagatttttgtcaacaaaggaatgtcagttgaagaatctgttgccattatgggtattctttgagcattgttacttaccatattgcatacaaattagaacactatgagtaattgaataatatagaaggcataactgattaatccatgacataattgagaaataatagagattagtagcataatactaaaaaagttttagttaattagaaaagctcacacttcttttttgacccattaattatatagacattttcacaaacagttgatacgcataatatgatgttttgcaggttcacacacactgggagtaacacactgtttgaatatcaagaatcgtctttacgaaggcgaagagggtccaataacaggaatggaacatgggtttgaagcgtttttaagattaagttgtccaaagaatgaggaatcaattatgagtaagtcgaggtttgtgttgaatgacccaacagcacttgggtttgacaatttgtactacattaacgccatgagtggacatgggttgctgagaatagatgcggagatggtaatggacagtcgtacgacaaactttgttcgtcgttttggttctgaccaagaagctttctttcaagccttctcttctgcttttgttaagctgtccagttatggtgttctggttgggaagaatggtgttattagaaagagatgtgatgttgtagattaagattaagattgaattgaagtgtgtgtgtttgtgttttatataagattttagtttaaaattaggtgtctttgtgttcagtggttttttaagattgacctcatcttatttgaggattatgtttatgggatagagatccaaattggtaaatttcgaatttaatatatctattttatataaattatggttaaagtggaatttttagtttaaatattttttttaagatttttactataattttgatagaatattctattacttaataaattttttttttattaattttataatattattatatatgtttaaaaataaaaattatataaatattttatataaaaaaaattaatttaactttaaattaaaataaaaaatatatataaatattttatataaaaaaattatatttaaaatattataaatatttgttactatatttttaattttactattatttattttaaaaaaaattagcatagtctaattttaaaattataattgataattaaaaccagttaactgagtctgcaagcagt

SEQ ID NO: 36468 - DNA, 4837 bp, Cannabis sativa
  modified_base (899)..(900): a, c, t, g, unknown or other
tttgtctttattttttctttttaagaagagagttgttttttttttgtctttttctcttaatgaaattatatctctcactttttttttttatattttttttattattttaatttttctaattaaactatcaaactttttatattcctcaagcaattttaatatatttcaaaaattatttatatgaatagaaaatagtagtttaaacactataaaatattttttttttcttcacccataaataaataaataagttatatttcaaaataataaatacctatatattattacactaataattttaatggtaactttttatataaataaatattttattgcctaatgcgaatgctaactttttatatttgattgcaatttactaatttattaaatacaattaaaattaatatgaaaagttattaaaaagtaacataaacatatcttacataaatagctgatttcataggttactattttttttttcattttatttaaaaatgttaccacacagtattttattagtatactatacggtaaattttaaatacaatataataaaaaaattacaataatttataatattacttaatatgttgaatattattaagcttgaagttttattattttttattaacaaaatataaaaaaaaaataaaaaagttatttttaatattagtcctctttttcggagataggaaaatagttgtttctcacatattaatatgattatttaattatttatatatgtgtaaaattccaaaataaatattttaatgaaagagtaactaattgatatcttattcacatcaaaaactactaaatggttattttttttaaaactcccaaaaagcaaaactttctggaaacgaaaattttctaattttttctattttcggtaattnntttgaattttggtatgtatgctgacgtgacacattggtagttgcacaaataattttcttaaaggtatttctgaaaataaaattaattttaaatatattattaaaaaagtccctaatattttttaataggaaagtgagtggccatgagcctcgctaggtgagaaggtggccatgaggctcgctgacgggctcactaaaaggcttgtctttgtgtttaactatagtcccattttgtcaaatgtcaggtaacactagaattaatatgctaattatacaactaaaatttaatttatggttgtgcttttatatttattattattattattattattattattatttgagtatttgttgattcaaagttgatgaataaattattttttttaaaacaaaaaagatatttataataattttttctttaaatgaataatattagattacaattatatatatgaataaagttgttctattgtagctacaccaaacttggtgattactgtagactgctctataatcagatatagagcctttggagaccatttctccagctattttctctacaagaaaataaatgatatacttttacatatcttttgttttttaatctaaaaactaaaacttattttaatgaaatcggcaattaaaatcctaagagtaccaaccaatttggtttatagcaatctaagtacattgaactcgacaacaatttcatgtgcacgtttactaggaaagaaactatttcaatttgattcgtttcatttatttattcatcattatcattatagttatagttatcgtaatcctaataaaatatatttatatctatttggagatccgaaaatcttatattgtgatatgggtatattaaaaaacttaataagaatatattatatgtttgcgtgtatcttttcttttaagataattttgagttttttcttcatactttcgctacatgtattcaacaaccattaatttaacatattccaagtcattttttatagagttccatttgtcttacaactacaattaagtgattcccttcaataaataatagtacttcttattgttaatttgttaaatttgtatactgtgtactataccactccacaaagctgtctctgatacataatacataagtaatcatgtgcatacaacgatgctacttaaatgtttcccttaaaaaaataaataaaattaataatggaaatttataaagtcaacaaaagaaaaaagaacaaacgctggtttgactccttgtatgtgaaagttgtgagaagagcctaataaaactctggttgtaggcctcttatatttttgtagttataaaaagtttgcatttttacaattctttattatcagaaatggataaacattttttttccgcataatctaagctctacgaggctaaaacatacactaatcacagttaagatagttacattgattttaatgttatattattagcacaacaaaattttgaatgaaagatttccatgtaaaacagtgtacatgaaaaaactctctgatccctctctacattcctatttagccagtatataaaccagcagtgattataaaaagaaaaagataaaaaaaaaaaaaaaaaaaaaaagtgatgaaaattacaatgttgaggtgaaaaggtgtaaactttaaaaagattaatcatcaaaccacagtggcaataccattgtatcttggtctagttctatcaggtgaaagggtttcttccatgacttttctcttgttattatttgtcaattgttgttgttgttgagtttctggttgcagatgaattttctctgacagaaattcttgtttcactaaattttcttctgggttttcttggatttcctctggtttatcaacttcttgatctttcaacttgtttttcatcaaatgaggttttagttttttcacgtctgctaattgtactggctttaaaaaaaactcttctgctccttcttctaaacatctataataatcaatcatacatacccaacaataataatcagaatccaaacccaaaaatccaaattaatcaaagtttttttctttataattctttctttgctttcactcaaaattttacctgttgatccttgaaggcacattctcagatgacatgatcactactggaatgtttttcagatatgaagattcctgaagtatcagaaaagattcttataaataccaagaatagaaaagagaaaaagaaatcaattacttcatgaatgttttctcaaaggatctagtgtgatgacaacaaataaatgaaaatgataatctaaacaaggaagaagctataattttccttctggtggaaaagtaggtaagaaaatattcccaaagagattttcaccagatattttaaagccaagtggtcagacaagcacccaaaaagacaaaattttcaaccgctcaatagtttagatttggaaagaaaagtcttgtaccagacgcatgaaaggttatgtaaatacttttttcatggtaggtaattatgtatatgaatagggtgaaaaataagataccttgattttctttaacagatcatagcctgtcatgcctggcatacagtaatctgtaataataagattcacttccacatcctgtaaaaccacaaaaaaccaaacatttatcagaaaacacagttaaaataatggaaaagtggctaaaaaagagagagcaaaattgagaatctgtgacatttgggggacaataaacaaatcacagtacctacctgactatttggagaaatagaagatgtatctggattgctttggtcatcttcatgaaaccccagaaactctaatgctttactaccagaatcaactgtagtaactgtcatggaaaacacaagagcgcattgcaatcaaaatacagaaaccaaaatatacatatataattatataactagaccacattaattaaagatgaaaaaaaataaaaataaaaagaaaaaacaattgccataaaaaaaaaaacaaaaacaaaaactattatttctttcttttctttttgaacaatagcttgattatatagaattatatgtatatatagttaccttgatatgatgaggttttgagtagcctctcaattagttttctatcaataaggctatcatccacagctagaacatgatactgggactctgtagtggccattcccattgtgtatttctcacccaactgagaattcaataagctcaatgcaaataatacaatataaaagatagaagaagcagctgaaagaagaagacctccctttttttttgatggttggagacaaaaagttttcttatttttctctctgtctttgttatatatctatttgttttggttttggttttggacaaaaactattgcaagtaggaggaggtagaaggaagaaaaagagagagggttttgtattgaaataaaagacccaccaaaaaccacaatcccacaaagcaagatccgaccagatttcctcccaaatcttgcaaattttccaaattgatttttgaattaaggggcaagcaaggcaataaaccaataaataaatcaaaaaaattaaaaaaactaatagctcaaaagaatattatttttttggttgggtgatggagaagggtggagatggtagtgggggtggtgggtttttttattatatatatatataatatacaatatctattttatacatacataaaaaaaaaaaaagaccatagcatacatatagcattatagtaaaaataaatgtctgagaaaataaacaagaggaggaaaagaaagtcttggatgaaagtgagaaaaggagaggaaaggtgggacccaagaaaatccggagaagagatacaggtgatgtcagcaatggtgcctttttcctctgtgggggtgtgtgaaatcatgtggcgatttccatatcttgagcaggtgagagagagagaaagagagaga

SEQ ID NO: 36469 - DNA, 7397 bp, Cannabis sativa
  modified_base (7360)..(7361): a, c, t, g, unknown or other
ttaatttttttataaatttttaattttttttttaaaaaaatttgaagcatcagttaaatattaccgttaaatatcaattgaataatcactgcgtacacctatatacttatttgacatctcaaattttttttaaaaaaacattaaaagtgttttgtcgacaaataaaaaagtaaaataattaattaaatatatacaaatttaaatataagaaaatttcacggcaaattactctatattttattttgcatgaaaaaattgtagctcttattttgcaattttaatttttttgcacgaaaaagttgtaactcttaatgtcttgttttgattccatgaaaagttagcaatatgttctgtatgttagtattagtatatacatatgtagatctttttgcagtgtgtacttaatgcctccactgatttacacaaatgttagaattatatgattatgaatggtatcatagacatttttatatacattaaaatatttcattatacataactaattatatttacatgaattttcttaatccaaattaatgtagatattaggatatatataatgtagataatatgctacggacctaaagatgtcaatagctaattagctactctatcatgaaacgtatgaacttttcagcccaatctatagccattggaaccagcccaattagaaaacatatacaccattgagcccaattcaaccttgaattaccaccaagaagatgagcaatctcaataaaaatcaactgcaacaccaaagtgacaccaaaagccacccaaaacatggccctgaacaaattcttcagcaccatttcccttgtattgaattgattaaaaagctggcaaagaacaaagctattaaatattatagtcctgttgaccttttgatttgtgccaagaatagcttgtcctttgaattggaatgtaactagtatggaagcttgggatatagcttgtgatattatatttatcaacatggcttttgttataataaccgcttctttatttggttcagatggtttctccatcaacttttctgatgggggttcagtcaaaagagctagcccaccaagcaatggcactaacatgttcacccaagacgattgaatggtcgttatgggcatatttccagtaaatgctactgtgatggttgctattaaaagccctgaaacaagcatggttagctcaagtttgatgtagttctgaatgttgttatttataaatcttccatacctcaacatagggagaacaatactaatatttgtatcccacatgatgatatttgcacttgctctgaccacattgttgctccaactccccatggctagtccaacattagcagctttaagagccggaacatcatttgttccgataccgataacagctagcgactctccattcttccttaaaaactttactaagaggtgcttgtccgaagggagtgagtttcccatcactgagattctacccaccatcttcattctttcctcatcatcttttagattacgaaactcatgtcctgtgatcacctcctctgctgttggattatcctcaaggatgccaaactgttgggcgattgccacaagagtttccacatcatcttttgagacgagtatgattctaacaccagcaatcttacaagctttgatggcctctttaatatcttcccggattgacatcttgagactcactagtcccagaagtgtcaagtcattttcctcaatcgttgtgggcgcaatagtttgtttgtaagcaaaagcaataactttaagatgcgttgactccatttgctcgacaatatgattaaattccaaccttttatggtcattcatatcgtttagaatcccttcattgttatagtaacgtgaacatcttggcaaaatctctgttgctggacctttacagtgcatgcacgtagtcatatcagtgtcaccaccataatcgttcttcgtcatcatcaatagtaaaccttttctttcctcatcatcatcgatcaattccctaacttggagaatggtagtacatgattgccgcctcaaagcttccaactttgactggaacctaaacaaggcccaggaaagcagaggctcatctgtttcagaacgaaaagcttgtgggagaacaagtgtggagctaattccgtcgcgaatagcttctcctacatgagaagctataaccgattcatcggttatttcagcttctccgatcaagaacttgtccacttcgagtggctccaatgttaggcctcctgttctgtctgtacatatggctgtaacagagcccattgcaacacaagccgacagttcttgagcaaatgtcatgcctgttcttctccagtaagcaatagcaagtgttatgcaaaatggtaatccttcaacaacacctacaaggagcatggtgagtgatgagattaaggaattagtaatcttcccatttggtttcgtgacaatcctctcaactaaatctttgaactcatcgacagtgattggttttcccctgatatcagtgattcctgacttggcctcttgtttagtgagctcaaagcgcaagaacaacaccacaataatgaatatggagatcaaaagaccaactatttgtttccatgtgttgatcttatcaagctgatcttgaaacggaccactctgcttcttgatcaccaaatcatgatgatgacatgatgagacactcatcatttcagcccacacagtgttttctcccaaagcagtcacaatcattctaccttggccattaataacctctgccccataaaaaagaaaagggtcagaagcattaactacaacattggagccatcatctaattccaagtaatcaccagaaaccaacaaaccatcggctggaatctgatgccctcgttccaagcatacgagatcacccaacaacatatctgacataaagatcttcttcctcgttcctcctctaacgacatcaaccatcatttccttctctcgatcatcttgaagctgctttctctttcctttaaaaagatcattcaacaagtctcggatgattgggaaaacaaggagtatgattaaggcgtttaagagaatgaccccttcacaccatcctgttctgaggccttcttccttaattccaaacccaatggagaaaattgcagacagtagaagaagtaacatgatatagttgtttgaagatctaaataggcgtagtaaaatgaagggttttgaaggagttgggttgaatgttttggaagctaattggcgaaaacaacagtgttggtcatcttcaggaattcccttctcgatatcggtgcctagagcttctgcgaatcctggtgcacctccgaactcaagtaaagaacccacatccttctcctttatgatgttgttaatgtttttgaactggagatgtgagtcgtcctcgtcaatattgttctcggctgaaatgacggcgtcttctgctgactccttcggcgctgagtccccctacagcaatattatatttgcatggttatattacgtaacaaatttattataattttatatttgaatgacaatacaaaaaagtaaaaatttaatatgaaatacagtcaaacttaaagtaacaacaaataaacttacgtaccatgtcgtcatgtgagggtggtggagtctttgtaccagtcgtcggatgctgatatccaagtggttgttccttttgagactccaagtccatactagccttatttctccgtataaatatttaattacaactttaactatataaaaaatattggtacgaataataaatatatttatatacaaagtttaattatatattaaaaaaaaagaaaagtaaaaatataaaaatatttcaaaaacattatataaaatataaaatggattcaaagggccaatagttacatgcatgtacatatataataatagaaaacaaatcaaacttaatttggtgtttctatatacctgtatataaatttggctaattaaactatactatatttgtgaaggcttcacatgatcaggtaataaaccagaatagtgataattaatacaactttgaaatcactacttgaaggaaagatatataagatatgatcataaaagtagttagagagagataaggaggtcaggtataggcaccacccacttatatatatgcagccttagcgtgtattatgtacgtatgtacgtacgcactacgcaatcaattgaagatgctcaaatttcattgaagtttcctttattatatattgctaattgttaataataatataagaaggattcgatacttttttgtaatgtcattttctttataccaaactacttataagagactaacttattaaatcatatttacaagtcagtttaagtattttcacaacaagttcgaaaaaagtgcaatgtatatggaattgttctgtattattctcaaagtatatacccaagtattataatactctaataattaatttgattgatataatttttttctttaatatatttgttctatatattaattatatagtaatattttcacgtacagcttttttttttttttttttgaaatagccaatatttttttctaaatatgtggaaggaacagccaagaattaagatggaatttcttattagttattacgtttttgttaattttaatatgttttttcagtactcaagcaaaccgctaccgaccaaatgagaggtttgaacggtttattgggtccaattcaaaataaaataaatatttagggatgtaatttgttgtagaatttgtagtttttttttttttttcttgaaagcgtagaatttgtagttgtgtacataaaaaggtcgatttaaaaattagcgaggcaatatatatgtattattaatgtggtcaaaaaaatatacataatatatctataatatataaattaatagttgctaacccccaacaactctttcattagccgtatctttctttccatatatatatatatggctatatttatttatatatatgagagcattatgttttatatgtgacatttatgtttccttattcatattttattttttttaattaagcaatattagatgtcgttatttaattataccaataatattagatactaataatactttttaacaattctataaatatatatatgtatgattacatgtaagatgcatgtctcttgggtttggcttgctgtcaatattatgcatgtctcctaaattgggttgggttgctctcactacatttgcagtgggcgttgtatataagcatcttcatctcgctcaaattgttcgcaccacatcctaaaaaaatactttaaaatctttcacagtgtagtcgcggtttgaatttttcttaaataatacggtttgcaattttaaattgttaatatgtgcacattataaaaatattaatttttatatttatttaggtctaaatgtaaatgtccattccaaagcccactaattattgtattattgaaacttaatttttttcatatttatttttacccctgaagatatttttgataattgttgctcaagctttattatatttgtgataatttaattattggtgatagtttaaactacaaaactgcaccacactatactattttttgtggtgcaggtacaatttagaaaattagaaaaactgtatgtgcatgttagtttgaaaaaatagttaaaaaatgcaccacccccgtaccgcgaacatccttaattgtacaaccaaaaaatttagtgggccaccaaacgtgatgtgccaggagagatggtagaatgattcataaatgagcactatagtggccttcaatatttttaaatataaaaaaaaaaaaaaaaaaacaaaagaaaaatataattggttaaatgtaggaaagtaagactaatggggtaactacattgaacatgccctaatggctaaacatattatcacagcttagatcttgccacatatgtaatttgtctacttttaaaagactaattttatatgaagtgttgcttaatataaaataaagccatatgaaattttctctctttttctttttaaagaaaaagttactttttactgtgtgatatggaattaggtaatttttatagtatatttacttaaaaggtgaatgagaatgaatggtatagttgtttccaatacaattgttattaaattttggaaagaagaaaagtagtaggactcatacaaaaattaggagaaaacaaaggaaaaagttctctccctatttttataggaaatatttttcattttcctaacttaatttatttttatttttattttattaattaaaaatgaaaaagataaatataccctttaaaaatttataaacagaaaataattacatattctaataatgataattttgtcaaattaaagcattccgattaccatttctagttatgtaaataaaataatgtgaaatagtttagtaaacagcataataaaatattatttcctattattttctattttaaatcaattcatttctctcattgattattctgatattccaattacggtctaatattttttgtaaaaaaatgtatcaaatcttctataaatcaaagagaaaataaaaaaataaaatattattattgggcaccagtagtatttagtaaattctagatgtgttgtcttataattagttagcgatactctttataagtaattgcattaaattatataaaacccaatacataattagactaataatgatattgatacgtaagaaagtgttaaatactacaaaattgagtaccttttaatatttttctttaagataatgtatgtacttattggagatatgctcttagatgtaacggcccattgaagatatgctcttagatgtagtcgggataaagcctctaaaagccatcctaggattttttatttttttggtttaaaaaactcctaaaaatgattattcatcatgtttgatattatgttaaattgtttttgtcttaattaaaaaatgaattttttttaatccaaaggtttggtaacttaatcatgcatgaatctataattatatattccattatttaaaattagatttttataactacataattattttcatatttgttatggtgattaggtagatatcgattttgtaggtccaggtgcatgcgtaatgacatttagaacttaattgcaagaagtgacattttataagaaatggcattttagggatatatatataacggttttttataatatattaagtctataaagtaagtaaatttaatattaaattacattaagaataaaattaaaaaaaaattaacaactctggatatctggaaatggaatggaaggcacttagttgagaacgtatctattatattatttatatatatatctttatatnntaaaagtgtctatctaacggcatttcttggtttaac

SEQ ID NO: 36470 - DNA, 23679 bp, Cannabis sativa
  modified_base (8298)..(8305): a, c, t, g, unknown or other
tttgaaagtagagaaagataatttctcattgatatcaagcattgaatcaataacatagtacacttagcaacttatagactagctaatacacaaactttggtaactaactagtaactaaagcaatacaattgtaactaactttatacattacataactaacctaccaactcaattaactactccactaatcctaatactccccctaatagttctgtaagcccgtcatgtctttaaatagcttgaactgagagttgaaaacaaaaatttggttagtaaatctacaaattgttctgtagttgaaatatggattattttgatgagtctttctttcttttttatccgacaattaatctcaatatgttttgtccttttataataaaaaggattagtggtaatgtgatgagcagccttattgtcacaatatacacctggattaaagcggactagacccgtgcctaaagcccacttatctcaagaactcaaaaaaatatttctcctttaaaaaaatatacataattttcagtaattttaaaaagtagtattcttttttaattaaatggccaaatattttttattttgttaaggttcacccaatctcaagatcagccttagtaataggaccggtcctttgtgagatattcctagttcttttaggattgaaagaagccaaattacctgacctcacatattgtgttggccatagtttagtattctgcctttgcatatgacctaaatattgtgtgttgcttcttacttttcagcccaatatctaaatatgaaagcttctaggtttactttagatgtagacgatagtaaaaatgccatgtccacgagatgatttgacgtactgtaaaactctttatgttgctttcatgtgacttaatacctaaaaaatgactcaatttgttgattgaaaataaccaacttaattataggtaagtagtggagtttccaatagattctcctatacaatgcctctaactcttgctaattattaatacttgtcaaaatcacatcatttacataaacaagtagtatatgttttatgaagagagaatgatgggttgtaaaatgattgaaccctcttcaagtaatgcattgaagaattcagcaaatcacttgttgaattcgtcaaaagtagaagaaattctgacattggtatatatcgataaggcaaaacaatttgtgtatatttcttagtttgtcaagaaaagaaggatatattcatgattattttaagtccatgaaagtggcccatatgaatgagtgattagggaagtgggctagtaatgggcccacgaaagtggcccaaatgaatgattgaatgattggctcggctccttccttctttggttttgttcgttgtttgttgtgttatgttctaattccaaattcccaaatcaaaatcaaaatcaaaatctcacctttcttcatcttcttcttcttcttcttctagggctttcttcaattcaattcaattcaattcaatcgattaaaggtaagcacgtctcttcttcttcttcttcttcttcttcttatagggtttcagttaatttacatttgaagatttgggtttgaacagacactaaattgaagatgaagaaggcgcctatggcagtgctgttgctcttacttctttcagctttgattccatctggatcctcctcaactgtccctgctttcctctggtcttcacatcggtatctttccttatcaatccaatcattatttctctttctctttatatttctcccaattgtattgtatattcaactattgtcacattcttagggttcatccatcatcgtcatctgtaaattatcagactctttctccaaaggatctggcaaagtccctcctctcccaacctggatggtcacacttgctggttagttagtttattggatttaatcattgacatttccacttgttgattcaaattttaagtttttcttttcttttctttagtgctcagaagaccaagttaagcaatctctggatctggctcttatctttgttggttcacaggtacattagatctttactcctttatcatcatcatcttattattaactctctaatactctattaacccatctactaaattcagctttgaaatttgaaagccttcttttgcttactaaaactgcttatttagtttatggactaggagatacagaacaatgtattattaacaactaaaggtgtaatttctcatttacataattcaacaatttagaagatatataccccttatagcaggtccattacacatactaatccaaaattcaaaatacacccatcaccaagattgtctttgggcctcaagtttgctgaatctataaaccttataactgctgctgaaattggatacagaacaatgtatgcgtatattgttgttgttgttgttgatattattcactttcgtttctgcagctacagtcttctgatctttttgcaaacaccaatgctgacaaagattttgtggactttctcaaggtaaccaagaaaagcattattgcccacttgtttttggttattctattgccaatttttcgatatcaagggactttctttaacagctagcatgccatgttcttcactcttgtgtaggtgtcctttacaaaatctaatttctctacggcatacccctacattgctgcaacagaggattcaatggccgattctttgctacaaggagttactgagacttgtggaaacaacattaatctgggtaatattgttgtctcagagtcatgctctctaccagatggaaatttcaataaacttgcaaatgtgcagtctgttcgtgtaagtgatttgactatggtatatgaaatcgtatactgttaatgttaaggtgtaagataaatatctgatgcctttttctttgcctcaatgaatgatataggattacctgagttcaaggacagaaaagagagctaatggggaagcagatgtggtcgtgttctgccatgaagattctaactctctggataatgctcagcaatcacgttctgagggtatggtaatttgtgtttgagtagatctgtttgttgattgatcggttgattatgacattgtatcaatgtatcttactttggactatgtgatagtacagtcctgtctgaggttgtcttaccaaatattttgactaattgtgcagctgaaacttttggcgagcttgttggttccatggatcagtctgtggaaaaatacgcagttctatatgtctcaaccccttctaagtctattcagtatccattatctcgggatgtagaaagatttttggctgaaggcaccaattctacaatctgtggtgaagtttgcaagatcaaatcatcacttttggagggacttctagttgtaagttttgaattttatatgacaatcttttattagtttctgacaaataatttccactatatatgttttcaaagtaaaattcaatgctaaactgtgtagtaatcatttctctctttttttctttggcaaaggttcatattgccattgtcggtgttgtagtaaattctaatggtgtttaaactttgtgattcttgcagggtattgttttgcttataatcctagtatctggcatctgctgtatgatgggaatcgatactccaacaagattcgagacaccgcaagactcttaatttgtatttgtgcaaagatagtatacctatcgcgagtgctccaccaaggcattgttaaactggattatgcttgttatatagttccaatgggtgggagatagagatatacccttttgtaatgattagttatcttgcccagaagcttttttttgttcttattccaatggaaataatgcaatatgataattttttcatcccccggttgcattgtgattttaagtccatgatgggttcatatctgtttgtaattctatttattaactggtccaaaccaagctacctccctcttatttatgatatcaataaagggccctactgagaattatgtgtaaatagaagatgtgaagatgatctagttgagtttttttctttttttttgaaaagtagtgagttgttctgtgatatggtttttttttcactaatacatatgacatctagtgttatttctatgataaaagaaaataaatgctatatacatgctgaaattgcacacttattacacgaataaatattaattattcatatttttgaatagggactacacttttaattgtgtaattcactttataccaagtctaataattacattatattttaaaatgcaacataagtttaaatataaaatagtaattaattacatatcaatttctataaccactcaattattttattttattttttatttttttttttgaaaaaaggataattcattaaatagcaacatccgctattacaattgactgaagggcaggaggaatattgctctcagtaaaaagacgatcagactaataacaagcgccacgagcaatgcaatgtgcggctttgttagcagatcgtttaacatgcgaaatcgaaacattattaaaggaagataaaatcaattggcactcttgaacaatcaggccaaaaatagaagggagtgcaattgagctatagatagcctgaacaacaatacaatccgtctcaattaacccattggatagattctttcttttaagccagctgagtgcctctttgacgctcattacctcagccatagcaggttggcacacaccagtatgcaaagtagagaaagcttcgataatcttcccctggcagtcccgagcaatcagacccgtaccaaactgagtgatatcttcaaatatagcaccatccacattgatttttatcattccagcagtaggctttatataaaaatcactgatgcccaatgtgttagagtcaaacagtaatggttccaggcgattttgttgagtagatgtccagctgaagagtgaaattcttgctaacttaatcacttcagcagcagcagtcgcacggtccttccacagaagctcatttcgagctttccaaatactccaaccaaccattaaaagctcatccaacatgctcgatctccccctcatcaaaaactctttaaaccagtccaaaaaagttgttgcagtagaagaaaactgtcccacactagacctgttccagcaggattaagcaaattgtttcatcctcagtattgcaaaagacacaagaagattcaacaggaacatgtttgattatgagttgggatcgagtaggcaaacaacctgatatggccttccaagcgaaatgcagaaccttaaggggtacttttattttccacaagatcttccacaaatcagaatccatctaagtattccactcccctttaactttttgaaaataacggtacgaacttttatttagtgtaattgcatatcaaattatgtagttatctctaataacactgtcctgccttgaaaaaatagagtatagttgtgaattttggtattttttaagatatacgttacgtttatcaaatgtagattatgaaaaagaaaacaaaaaatactcaaattcaaaaaggaaatcacgggtacacgagtgaaaaattaagtctattacaagagttacatttgagcacgaaccataccaagttccattgagcactatctactcaagtttaagtatttttagatagaacattattaagaaaaaatgatttattttatagattttagagtttcaaatcttaaaaattcaatcataaaaagaaaaatcgattttaaagttctaagaggtgggagcagctcagaactggcagtggaggtggcggagtttaatccaaattgaacagagaggagagaggggtgagttgtgatagaatgaaaatacactaaccatccataactcaaacttcctttatttactttaccataaaatttgtatagaagaggcatgagtggacttacctcttctcttctcttctattctatctccttaaaacgctaagttttagttgttctgtttcctcgtacaaaaacagtatgttttttgcaattaaactctttcatatgaatatctgacattatttgcttagatgactaactaatactactgtaattgtaaaacaagaattataaggtaaacacaaattaacatccacattcaagttccattgacaccaaatgataggataggattatgctctttcagcaaattattaacaaacaaaaacaagtcaagaagtcaaaaaacaactccagtctcacattccaaccagctggatgtagctaaccaatttttcaaacgtaaattctcagcctcgaactccgcttcattccttctttccaatcccatgtgacatgttgtagatcccccgaccctgaaacacacacgcacacattcattccttacacttaattgtagtccacaataacaaaccatcctaattaaaaatcattattaagaacttacgataagatacagcgaggtgcctgccaaagcaagaggaattgccacagaggtgatcttatccattggtcccttaaggtgtgtgtacttgtggacgttttggaagtacttttgcttctcaatcagcttctcacgtggtctgaaaggttgttcggtgatttctgccatcctgtgacacagtatgaccatgtaattcaatcataaaacagtagctcaaagaagaaaactctgacagtaactgttaaccaagcacgtaaagactagcctcacttcaatcatggtgactctattactaggaatatcctgcccaagttcaacttcggcacaaaaacattgttctgaagctatgactggatgatatttaataacaataacattgtttactgagatccatatttattagcaccaatgaccaaattacacagcagctttacaatcaaaattctcaagcaaacacatcaagcaacactgaacctccacttagggacagcacatgaatgtatgacttcttggcttcttgcaaaaccgacgatttaagaaaaatgaattgagcatcaataagtagaaagtagaattattaatcctaactttcctaataaatttaatgatagagcattaagaatcattgtccaagctaaaacccacatagaacatgaatgaagtttcagatcaaacagactgaagaaatagcctgatttaatggtgaaagcacatatgcataaacatacttgtaatcactagatccaaacaacatcaaacaacccatcccatatctcgcaaaatagattttattacctacttatccaatgtccatatgggtaatttagttcattgacaaaatcatgagttaggggctaaggaaacaaccagaaatgaatctaataaaatgttagcaatgtagtgttagctgtgcagtgttgggaatgagaattagctggctgttaggacatgtgttagggactctagttagagaggacagcggaggggacagcggagggggcaagcttatatgatagttcttttgagtatataactagctagtgtgggctaaatataaagggattcttgaatttccccatagatatttctattcttgtatttctttggacttcatttcaatggagaaaatatagggcaaatgactattgtgatgccaaaatattgtcaataaacaaaaagaaatacaaagaagcattatgtagataaaatttattaaaaagagaaagtacaatcttcattagaacaaacatatggcgggcacatatgcatataaaattcatatgaaaatacaataaatatgcctaaaatcactacaaatcaaaatcataacaatgaataatgttttgatgacagaatataatcaaaacaatgaataaattacgtgcaatatacatgaatgaaataccatttatacaacaaccaatgatcaaacaaagaataaaaaacttaaatttcagaattcgatgccaaaaaaagccctaattttactaataaaattatagatcaatctgcttattttgaaattaaaattaaaaaaattgaaatcagaactcataagtcaaattcaaaataattggaagaatacattaaaaagatagaaataataaggaaaaataaaaagaaaaaagacatgcttgttgttgagacgagtgtaagagattgacctcatcttattcccagtccacatcacagtaacacaaatccattaataaaaagaaaaaacagaagcagagaaaggaaaggaaatctggaaattacctgaactgggcggaatacggcgtcggcggcgacctccttgagtgaaatcgcagaagagaagaatatttgagggagacaaagggagagatcgtaagagtatagagagagagagagagannnnnnnngagagagagagagagaaaattggaatatgaagaagaattgaagatgcgattgggctgggctgggctggcccaaaaaggatataagtccgtctgtgtatattaatcggttcggatccgggttcggtttagggttgacccgattgggtgagtctggtctggtttcatcttcgtcttctttctttctttgtttgtttgttttgtataagcaaagcaagaaagaaagaaagcaaggatgaaatccaaggacagaatctcttacttctatgatggttggtgtttgctttcttcttcattttcttgaaaacaaagaaaaggttttcaatttcttttcagttttgttttaatggagattgattgattgattgtttgattgttgcaggagatgtgggaagtgtttactttgggccgaaccatccgatgaaacctcatcggttgtgtatgactcatcacctggttctctcctatgatcttcacaagaagatggaaatctatgtatgcactgcaatttctttccttttttcttttcttttctttttttcttctatgtatgtatgtatgtatgtatgatgatgatgatgatgcagcggcctcacaaggcatatccagttgagcttgctcaattccatacagcggattatgttgatttccttcaccgtatcacccccgacacccagcgtctattctcaaatgaactagtcaaatgtatgtacaatcacactaccctcaactcccaactgaagtgtttttctttactgatatcatatgatatagttacaatcttagtgatatgatatcttttgatttcttgcttgttcactatatatgtatgtagatgtctctctttatgaacttattatcatattccaatctcacttttatgtgttcacaatcagaaagcaaattttgatttcatgttactcttttggataaatttgaccatgatttgagccaactctattcattttaaatgctgtgatttttctctctaactattctaattaatttattgttctcttttggtagataatcttggagaagattgtccagtctttgaaaatttatttgagttctgtcaaatttatgctggtggaacaataggtaagtagattatgctggactggtctttgttgttagtgtttgtttcagctgttttctcctttgaagttaataacatttttgcaagcagatgctgctcgcaggttgaacaaccaactctgtgacattgctataaattgggctggtggcctacaccatgccaagaagtgcgaagcatctgggttttgctatataaatgacctggtcttgggaatcttggagcttttaaaacatcatgctcgtgttttgtatattgatatcgatgtgcatcacggtgatggtgttgaagaagccttttatttcactgataggtaggtattctttgaatttaatattcatgtttagaagttggacagtaagggcgatagaagcaatggtgttgatcgtaaagaaaaaatttcaatcagctcacactcagttgaataagagtattaggcattagtatgtgcaaattttaataccagtgaaattgtaggggatcaaattttttattgtagctgttacactggcttgggactctaatcgaatcttcatagtttaacatggcagggtgatgactgttagttttcacaagtttggagacaagttttttcctggaaccggtgatgtcaaggtgaattaaagtttcttttatatttttagccttgttatgattattattgcagtagataaacacttgtaacttcattctaatatgtcatgtatttgtattgctaaggtagtctgcaatgaaggatatcatatatattctatttctaaaacaaaattgctcttatatatactacctcgacagataaaacatgcagttggctttcttggaaatctatgttgttactcatcaattagaactattatgaccaatctgctaaccagacttttcaggtcattaaaagagaattgatgcacctgtttcacctgtttcgggggttgtagctttagggatctttaaatccaaataattcagcaattttgctttttctgatttactaagagactggaatctttggatgtagttattgtagtttcactattctttttgtaaccaaagatgaactcttatcctttgtactgctgatagctggctttgtccaggttatgtctagataacttccctttccattgttattgaaatatccaagtgatgtcgtggaaacttgttctttgcttcttaaaaggattcaggagagagggaaggcaagttttatgccattaatgttccactcaaggatggaatagatgacaatagcttcactcgtcttttcaaaactgtaagtctgttcgaatcacctaagctcaagattactgttgatgtatattgttgtttgtgtgtgatgtcaactataataagcctaattgtttgcttttatatgtatatattttccgaaattccaattttgtagattatttccaaggttgttgaaacgtatcgaccaggtgtcatagtcctccagtgtggagcagattcactagctggagatcgcttaggctgcttcaatctttccattgatggtgaatatcatttcttgacaaaactttcttctccgattttattatttttaagtttctgtgcagtttgcatgttggaacgatattaagtgatgtctcttgatgcttcttacaggtcatgctgagtgtgttaagtttgtgaagaaattcaacttgcccttactggtatgtggtgcctattctttgttattgtagactgggtgggtcagtagttgtcattgccatcatttggctcacggctcacaagaatatggtatctgtgcaggttactggaggtggcggatacacaaaagagaatgttgctcggtgttggactgttgaaactggagttcttctagacacagagcttccaaacggtatgtcaagtttcttttttctctttttactttttgataggagaaaaaatgttgggttctgctctattcaatttataaaagttttttcttttctttttggtataattttatctttttgcagagatccccgacaacgattacattgaatattttgggccagaatattcattgaagattccacatgggcatataatagtatgtcacttcagaacttctatgttattgaggttgttatattttttctggtacattacatagagatactgtccttactatatttacttttcttttgcgggcaggataatgcaaacacgaaatcgtatcttagtacaatcaaagtgcaggtgttggagaatcttcgtcacattcaacatgctcctagtgtacaaatgcaagaggtaagcattgagtagcaactaagatggttcatggtcgataaattcttcacgcaagctttagtaagatggttcatcatgataaattttgcaggttcctccggacttctatatccctgattttgatgaagatgagcagaacccagacgagcgagtggatcgtaagtgaaaataaataaataaaaaattcaaaaaatcacagcaacacacacacttttgtactaacatggtgaaaatgacttgttatcagaacaaacccgggacaagcaaatccagcgggaggacgagtattatgaaggagacaatgaccatgatcagaacactgaagatgtgtaaagatttcctcttactgaattgtagtagtagtgtaggactttagggtgggattggaatggataggacatgtgtgcacaaaacaaaatgatagttgttattcatattttgtcttgccctataactgtaaaaactgaattggtagagctgaggattatcatatatgtaattttgtattcaatgtactagttatagagagagagagagagagagagagaggcaaggactatcatcttgatttttctattatgtgtatgttttgtaatgttgttaaaattgtttcgtttttcttaattttttttagtgtctcaattacttggatcatttgatgatgtccagcatatttttataaagaagaacatgtaacatgtatgtacacacacacactcaaattatatatggttggttttcatttttagtttaaaaggtgtcaattggttttggttgacaaaatatattatgcagtgatttgattttggtacatatgttttgtagtgagttgtttgaaccaacaatctcatctcatcctttttgttaatccaaattatattaatatataataatgttgaaattgattcattaattttaatgaattaaataaaatgtgaaacgacgtcgttggggtgatgtataattataaggttagaaacgtgaccaagtcaagggctacaaatagcaaagtcgtttggaaagcgagaaaaaaaaatatgatatgatatataatgaattgaattgaattgaattgaatcaataggacactgccatctaaaactgcctaattggatttctgtaatctcataattcataataataataatatggataagaataggatccttttcctttttgtactatactatttccatttccatctttatctttttccttttccatggataaaataatatgaaatgaatctcatctcatctcaggtacctacctcttaatgtttctttgcaattatatatttattgtgttgatgtttgatgtgtcttaacattcttttgtttagataactaattggaaaaaaaccaatctttggtttggacaaagcaaaggacaatggcagaaactcttctatctaaggcttatcctctctttaacaatagacccttttatgttaaatctactctcaatccaagaggattgatattccattaccatcatcatcgtcaaggccttcagactagtgattggtatagcaataatagtaatagattgagttgtaaatgtgatagaaaaataagagagaataatgttagtttgatgattgaggatgaagcttggaatttactaaaggaatccattgtctattactgtaacaatcccattggtacaattgctgctgctaatgatcccaacaccacaacaactcttctcaactatgatcacatcttcattcgtgatttcataccttctgcaatagcttttcttttgaaaggagactatgatattgtcaagaacttcatacttcacacccttcaattacaggtacaactcaactcataccaacaacattaataattgccatttctttgtttgagttttgattattgtttgtttgtgttttattagagctgggagaaaactatggattgtcacagtcctggtcaaggcctcatgcctgcaagtttcaaagtcaggactgttccactagaattggaaggtcatgattatgcaactgaagatgtgttagatcccgactttggggaagctgcaatcggtcgtgtcgccccagttgattccggtaagtaagtagttcaacttcgtcacaaataatggcagaaaatatatgatgggaatgggagacattgttgccctcaacactcttagttaacggtctttctttataatctcgggcgggaatcaagtttcctttcatgtacatcatacaaacctccaatttcaaatcatacttaaaatgtcgaacattttctgtaaggttgtgtcaatttcaaccatcaacatcatacttctttcgcttttaaaaattctaattcgacacccccaaacactataatagagtacaagcacaaacacagttgagaatgatctttcggttacaatttaggattgtggtggattatactactaagagcatatggaaaaagctctggggacctgtcagtgcaagagagagttgatgtccaaacaggaataaaaatgattttgaagctgtgtcttgctgatggtttcgatatgttcccgacattgttggtcacggacggctcttgcatgatagatcgtcgtatgggaattcacggccaccctttggagattcaggtaactaacttaactgctttatgcagtgtatggtaagatgtatgaggtttcatcttaaaattaattggcatgtctgcgctgtacaggcattgttttactcggctttgttgggtgctcgggaaatgcttacacaagaggatgcatcatcagctgacctcttagaggctcttaacaaccgtctacttgctctatcgctccatatcagagaatactattggattgatttgaggaaactgaatgaaatctacagatacaatacagaggagtattcctatgaggctgtcaacaagttcaacatctatcctgatcagattccctcctggttggtggagtttatgccgagtaaaggaggctatttcatcggaaacctgcagccggctcacatggactttcgtttcttttctcttggaaacttatggtctattgtgagtagtattgcaacacttgatcaatcaaatgccatattggatctcattgaatcaaaatggtatgaactagttgcagacatgcctctcaagatatgttatcctgctcttgaaggacaggaatggcgaatcataacaggaagcgatcccaagaacacgtacgtacgcattgtctctcttcgctacaaccgatccgcccttgtcaattcttcatgctctaacttggttttttgttgcagcccttggtcttaccacaatggaggttcttggccaacattactttggcaggtaaaaactaacttgagatgatgatgatgattgaagtacctcatatatcttttgttagatgttctctaagattttcaagtagttaagctaactgaaaaatttaaaagcggttttttgtttttaaaattgttttttttagaattgagaacagtagtttttaaaatacaagacgtgtttggctaatgtttttcaaaaactctaataaaaaatcttcaatattccacactttaacacgaacttactcccaccacaaccacaacacgaattttggacttcgacctcagaccctggccccagaccaagccccagaccaaggcacggtctgggttcgaggctgagtccaaggcaggagttcgagttcaaggccaaggcaggggttcgactcggacttcgggtctggggtctgaggctgaggccggggtccgcattccaaacctgggtatgtgagagaaaatataaaaaaaaagatatatacattaaacaaaaggataaaaattatttttgaaataaaaaactattttttgattttttattttttctaactcgattttttgaaaaatgcttttaaaaaaatttggtggaataccctattggtttttaaaaagtaattttctatttttaaaaagtgaaaacaatttttaagttgtgaagttaaacaccttttaagattcaagctcttaaccttcatctagttcttcaaacaaataaagacttttcacttttaaagcaaaagagaaatttgaataaggtttctaaccattttgatattggtttgattgtagattttctaatcataaacttaataaattctcatcaccaagttctctatttgttatcttctcatgaaactaatagatactattattttggattgactcagcttactgtggcatctataaagatgaatagatttgaaattgccagaaaagccattaaggtcgctgaaaaacgtatcgctagtgacaagtggcctgaatattatgacaccaagcaagcgcgatttgttggaaagcaggcacgcctatttcaaacttggtcgatcgctggatatcttgtggcaaagctccttcttgccgatccaagtgcagcaaacatacttgtgaatgaagaagatttggagatcgtgaatgcgttctcttacatgatcagcgctaatccgaggaaaaggcgtgcattgaacaaacatagctttgttgtatgaaagtgcatgtgtgtttaatgaggttttatagtgaagagagatgcctcaacaattttgagtaaagttgcatccaagacataagagttgaaattatagaaaattcaagattgagttcatcatgatagcccaaaatttcattggaacatatcaaaacaagggttgttggtgttggtgctaaaacaaaaactaaaaaattccaatttttgttagtattacatttgaataatgtcaagtgaggtgaagtgttgttttaacgtaaataataaaatggatatgatgaaaaacaatgaataaatcatccaatatttgtattgtaggcagagactttgattaggtcattttaattttctaattaagataaaatacaacacaacaatcccctgaatattgatgatgcaaatagataataataataaaatgagttaaaagtaatatatatgattagcaagaataggaataggaataatttgatcacaaagccaaaactgaggagtgatcaaaattgacattatgtttcgttttgtttcttttcttgcttagatgtttttgttctctgccaatatgctatcaagcaatgattcacaagcatcttcaagtatatccaaaacctgccataaataaaataaataaatttaatcctccataccttagcttagctttttctatcaattcaattacaatgaggagaagaagaaaaaaggtcaagagaatttgagggtctaaaaaatgctaagggacagtgtcaaacactacatgtgaagtggcataccattaatatcaggttccatacattttaatttagtaagtaatataataagaaactgccaatcacttacaatccaaagttttcgtatcctatttatgaggcttaatatttgaaatacaacatagaacatataccctttgttttcttctttttcttcgtgccaaataatcaagagaaatgacttttttactataaaacgaaatcttctcctcttcactcccttacatcggtatcggtatggtattagaggtgcccaataccaatgcttaataccaaaactcatctaactaactactcatcaatattatatatacatacataatagaattagacacaataatcttgttttgttcgatttcaatagtaatacaaaataaattaccttgtcaaagccttcttgtccaccataataaggatctggaacttctgtttcatcatgtctcttacaataagaacacattaacttaacctgcatccaccaaccaattttgctaaactaacaataccaaactccaaattttgctagaataacctcattcaattcaatttaagaaatttgaataaatagaggtggcaatctgggtcagacacgataactagactcgaaacttgcacaaaacaaataagtttgagttatttttgagttgacaagcgtaactcaaaaaataacacgataataacctatgcgagagtctacactcctaaatttagtagatttattacaatacaaattacattttttttagttgaataagacaaacatattcataaaaaatatgttataacaagaatgtaaacatattaagcttattataaaatatgttaatgagttgagaaattaatcaaaattatgcataatttaaacggggtttgaatttgacatttaaatactaaaaacgacacaaacacaaatttccactcctaaattcaattcaattaaaataaaaataaaaagagcaaagtttgagttaagaaaaagaagaagaccttgttatgagcatcctcaggcaaagggtctttaaacttccacctattaaaagcttcaattatatcatctacacaaaaccacaaagttcattcctttttagtccaaaacgacaataaataaccagaaacgacaatcatataaaatcaaaaggcaacctttattctggttatccatggcgagaatcaaatcaaagtcgacaaaatcagagggtcggattggtcttgacaatgaagttatgcgaatccctcggctcttagcggttcccctcattctggggtctgcttggcttccctcgtggtaattaatggtgccggctgagtcaatcttgaacttggattccaaaccccttttcttgaccaaatcggtgaagactccttcggcagctgggctacggcaaatgttgcccagacacacaaagagaacagagaagggtttggtgtctgtgtctgtttctgtagaagccgccatggacatggaagcacctgctgctgatgatgatgagaattgggatttggaatggagagatgggaaatgggtatgagtaggaagaggaagaagaaggaggaatggagatggagagagagaggggtagaatggtaattgtggagttgttgttattgttgttgttgttgggttcagtctgtattggaaatgtaatgccttcatttttgaagaattgaagagacccaaaatttggatgatttaaatttaataaataaatggatttggattggcaaagcaacaaaatatgtccacaaaaatgggccactaacataaatacttatttttattgcaagatttttctttcgccaattattattaataagcgtaatctgtcacgtattcatttaaaacgatttacaactgataatttatgcatcatcaaattaaagatgttattaaaagtgcaaacataaatacctaagttttggaggacacatcccaacaaatcttttcactttttaatttcattttgcctcccacattatatcttaaattctagtaataataataattacattattttagaagcaagaatactagtaagcgtggtaatctggttccaacatgataatccgattcgaaactcgcacgaaataaacaagtttgaatttgtaataaataaatttaaattaatttcaagttgacacggctaattcgtttattaaacagatcagattaggtataaacagttcagattttaatttttgacacgataaataaatgagtcaggtttagatttcacatttatttctaaactaaaatcttgacacgacacatgaatacgaattgctactcctaaattttagttcattgtaaatgcctaaaagccaactgtttaacttaaaccatgccaataagagatactaaaaagtttagggaatttgtgaatatgatgttatgttacaacaacaatgcacaaaaaaacatacatcaatcaacaaagttgttatagaacaaaagcagaatttggttttaccattgttgattgtgttgcacactcttaacaaaatcagactacaatacataatgactgactttgtatcaaaagtatgtttcttgtttcttgcttaagaaacataaaagtacaatgaaaactgactttgtatagaatcataaatcatataagaatataaagattgcactgacaataatgaataaaggtaagaccccaattagtgaaagaaatttaatttggcttgggtcaccttctcatgctacaaaatttattattacacaatcttcccaaaggacaatccaatagaataattataaaccaaactcaagaacaaggcatcatttccaatactagagcaccagcacatctcagagctcgttaaaaacagcgaaaagatcaccatggatgtaatcattatcaaccaagctgaccaagaaatagctattctccacctgaaagatcaaaacacaaacacaatcgagttcatgtcatgcttgaacagaacagaacataacttaacagtgtagcgggaaagaaagaaccaaccaacctcttcgagaatttttctagaagggtcggcctcattagagtacaagcgagcccatcctctagaccagatctcaaaggcctcatccttccataccacaaagctggtaggatccacaacagttggctgaataatttcctttccagggaacactccccatgttacagcattcacacaagttccatcaacatttgacaaccagtgtccttgtttgttcacagccatgtaggttagtgatgggaaacccctgctgcatttctcgacaagggcgttcaacaaatccttactgcaaaaaaactcaagatatgccttctgatacacatatcctcctggcccaccccatcctatttgaacaaacaaactcatgttatgttagccatgggagtaagtactgatatccagataacattattaactgcttgcttaccaactattggggaatcagatttttcagcgtttattgccggttggctattcacagtcagaaaaccctttccattaattttcaccagctgttcatttatgatctttgtctcaggctgaagtccatctaattctgaccaaggactgcttttcaactttccaagacataatttcttgaattgctgataagtaaacaatacagtacaagacataatatgttaccatttgttaaaattaacttgcaataaaaataagaatagctgcaattcattctgctaagggaaacaacaaacacacctcatgaatatcttctacactcttcaaagggatgttccattcttctgcaagttttttgtcacgggaacgtggtcgcataaactgttgtggaaaagaatacgtaacacagaaattaactaattaaaaagacagaaataaaaactaaagaaaccatctagacaagccccatatgtgacatgaccatcaggcttcgtgggattaaatgcacaatcagagttgcatactagacctcccttacgtaaaatagctaattttgtagcaattgatactacatataacttgaaaaaaaactataggtgcagcaagtttggacagtcagcatggctattaatgaacagaacagatatttatggtactaggaattttcagtgacatacctgataatcagttagggccccatatgaaggattgcgagaatccccccatcgtccttgtgggtactgctcccagccagaagtccttgatatgtagctcttcgggcggtttgccctataattattggagagaaagataacagtctcaatatttgacaactaagcacttagccaaaaggggaagtttgataaattgcctaccagaatatcgggcggacatcttctttgacacggaaaacattagcagggcgtctccaaggaaggggcctggatattttgcgttcctcaatcaagccaagattctgccaagatgtgatactaggatattattaataatctaaacattggaatttcaaaatcattccaatgtgcaaaaccataaggattgagaaataaccattagtatagccaatgctgatttctccatgttaagagtgtaaagatgcaatgtttttatgccactggctaaaatcttcttgcacatttcggttccaaggtgaattccatacgctctcacagcttcatcattgtccttaataggctccagggcagcagtgacctcagatggtatctataatgaatgaacatataaatccaaaacatcataagcattggcttgttagcacttatgatttcagttcaattagcaataggagcatacccttgttttgcaaaagccagtcatgcgtataaagcctttgtagttgttgatgggcataattccaggaacaatgggacaagtaattcccatttggcgacagtcattgacgaatttcaggaaaatgtcggtgtcatagaatagctgagtgactatcaaatcagctcctgcatcaatctttcttttcaaataagcaagatcgttctggtatgcttccagtgaagccacgccatcagggccaattgcatccggatgagcctctggataaccagcaacagcaacaccaaagtagtcaccatacttggcccgaatatgctcaacctggagagatgagataatgattgattgaattacatagatagagatcaatggggatagatatcatgaatcatagatgggaacatgacatacgagatcaagagcacaagcaaagccgccttggatttggacaaacttgtcctggccgtgaggagggtcaccacggagagcaaggacattctgaagaccattggacttgatggtggagagggcatggtcaatcttgtctacaggcatgttggtgcaagtgagatgcatcatgctctcaacgcagacagtgttctgcattcggttggcaatgtcaagggtaagatcggcggtggagcctccagcaccccaagtaatgtcacagaaggaagggccgtgggcaaccattctctccatcctctcgaacaggttgtccactccttcctcagtcttgggtgggaagaactcgaaggagaacaacaccttgtcattgctacgctcctggatcttgtctatcaccttcatctttccccctcaattaaaaccaatcagctatagcaagaacagtcaaataatgccaaaataagtatcaatcaagaaaagaagaaaaagaattctcatttgataccagatgaaggtaccaaccaacaatgaccagaatccaccaaaaagggtaacataaaaatccatcaaaacattagaagaaagatttcatagacggttggtatgtagtatgtactatgcagtgagatgggtttgttgaccaaactgacaacaaagaaagcatggttgtaacaaacaacaataacatggtttcaaaacttgataagagctatactatacatgattaagttaagaatgtgggatatcagataaaagcttactggagtttccctatgatgtgaggtgttaacttaacagtgaattcgttgtactactatcaaatcaaatcaaacgaaatcaaaccaaatcaaatcaaataaaatgtatgaaagactaaaacttgtattgatttggttgctcattcatccattcattgttagatctgagatggaatcttgtacaaaggagaattagctaaagttaaagttaggagttgtatatgtattatgtatatatacaatacatgaaaaggtaaagttaggattaaatgattatagaatggaaatggacatagaaaaaagaggaaccttttacgttggaattgggaggtgagtgaggagagttgcttgccgacagccgaagaagaagacgagagtatctctgatctgatctctctgttattattacagttgaagacgtagacaacgtaccaatttgggttgggcttctttatttgggcctttttcggcccaattacagttcttaatcaataataacatttttattttatttttggttaaatatacagtatatgggaatttatgaggtttgtttgctaatttattgtaaggggttgtaattagcatttttcaaataatttaggtccatttattagggtaggactgatgaattataagaaaagcaacatcatgcattattctaaaacatatatataattattattttatgttatattattttataatataataagtgtagattaaaatgtagtaatatatattattatgtgaataatatgtattaggtgtttggtaaataaattgtgtgacatataatttatttaacctaaaa

SEQ ID NO: 36471 - DNA, 5119 bp, Cannabis sativa
ctttttactgaatgaaaaaagctaggccttcatacaataaacaataaaaaattggttagaactcaaaacaattctgattctgatcaaacagccaaccttttccagatctaagaaaacactagaaacaagtagctttgggaattaatctaacaatatcaagataaacacacagagataagattcaacgagattgatacagatctaagttcaaaactgaaacaaggcagagaatgactgaccaagtgactgcataggataactttagcgccatagcccatcaaatactggatggtagggacagcagcgcggactctagtatcatcggtgatggtcaaattgtcatccaatggaacattgagatcaaccctcacaaaaaccctttttcccttcaactcactctccttaagagttccaacgctcctcttggtggccatcgcaatcaatcgcttcaaaaccagaatcagttttattaaaacaatcaatacaaacacagatcaaaaatcagatgaaataacaaagaaaaatccaaactttggaacttacaatagagaaagagagctttgaaaagtagtgtttggttaaagagtgagatagatcaaaggagtgggagagttcgagaaggatatataggctgtttcagtcacacgtgtgaaccgtgtgagtgaggtggtggtacactgtaaagtctgtggtcttaaaagtgggtgataacaatgaaaccttgggcttggttagccagcatattctctttattattctcaatttcccacattgaattttgtatatgaaaatcaactatgtttaatctttgtattattacaagaaaatgagttagttgtcaagttttgaaaccatgctttagattgtaaaatttttacctttgatccaagaaaaccagcaacacaaatctacctcataatatatcatattttagtcaaaacatgatatcattacatatatcatggttttattaactctttttgtaacttatgtactgaatttgttgtatttgaccatagacatgagtttatatgtgtgtgacgaaattagattgattttatataagtagagcaacactaatcttgcctcatatagctcaaataaaaatatatgacatgcttgattgatgatgcccttagtcttattccctaccaagagtcaaccaattaagaagtagaagagccacaaagtaaaaagggctcaagttgttgtgaatgttatgctcctttgattccaattgccacctaataaataacatttgttttttatttgatataataattcaagaaaaacatgattatatcgatcgatcggattagaaagatagtttaggcctatttctctgtcaatatagtgtcattcacttggtccaaatcctttgctttgtttgcataatatttgtgctctagactctagtcattgttgttttttttgggtgaaatggaaatgtagggtcactaaaccaacaacaatcattctatttacgagaaatactaaggagtatcttaaggtgtcaaatactataaaagatgacaaaccattattgatgcattttaatactacgtcccacaaattttgatgagaccgctaatcactatagcaatgctcttctctctaccgtccatttcacaagaaccacctgaaccgtagatattgtataacaatacaatacaaatgaaaaaggaatggttgagctttaaccatagatacccgtttatcgaaattgacaatttgtaaggttatgataccactttcaataaatgcactgacctcacaatcataggtctctcattttcattgttgtggcttacatttagatcagaaatgaactacttcaataattgtaaccacaaacaaaaatcatatcaacttgtaaccataatcatgattcaacaaacatggcaaaaagatcacttttattagatagaataactctcctcgtaactctacagtctcttgcagtagactagttatttcttcattctttttttcttaatatataatataatatagtaggggagagaggaagaagagaatgggaccttaataggcaacaatgaacatttacaacaacatcaacaaatctccctctaccacattttgtttacaaactcagataaaaacattcaagaataattaaaaggaaattaataagatggttcggttctcacacagctactggtgtggcctcatcgagagcaagcactccggggagttctttcccttccaacaactccaaactggcacccccaccggttgaaatgtggctcatcacgctggcaactcctactttctctacggccgcaactgagtctcctcctccaataattgtagttactccctttccactaagctctgctagcttctttgcaacagactgtaataaatagtaaaacctcatgtcaatacaatgagaaatgcaaaaatgcagcggtgtctagtaccctccaaggtgtcgtatcaccattggtacaattaagtattgttaggcaccactggcacccaatagcaacaatacaatacatagatttataaacatagagaaacaaaagtgagctcaaggggaaagtaattcttgcatacctcagttccagcagcaaacttgtcgaattcgaaaacacccataggtccattccaaatgatggtttgagtagtgtcaagtgcctcattgaatgtcttgatggagtctggaccaatatctaatcccatccacccgtcgggaatggcagatgaaggtacaatctgaaatttcataaaccataggttaaatcaattaatcatcaatgtcaaataaagcagtattaggatgtctttgaaattgttggagggcaaaccttgctgtttgcatcgggggcgaacttgtctgcaatcaccacatcagagggtaacaaaagagaaacgcctttggctttcgccttctgaatgagtgatgtcgccaaatctagtttgtcttcctcaaccaaagaagaacctactgcaagaccttgtgccttgtaaaatgtaaagatcattcctccaccgagaagtagaatgtcaaccttctctagtagtgactcaataacaccgatctttgatgagaccttagaaccaccaacaatggcagcgaaaggccttttcgggtttgatactgccccaacaagatagtcaagttcctaagatcacaacaacctgatcagtaaatcatctactaaatgacaaaagggaaatatatgcaagtgtagttgagtctcaccttctgtaagagaaaaccggcaacagatggcttcaagtattttgtaacaccctcagttgaggcatgagctctgtgagcagttccaaaggcatcgttgacataaatatctgccaatgatgcgagcttcttagcatgttcgggatcattcttctcttcctccttgtaaaacctcacattttcaagaagcaaaacaccaccatcaggaagtgaagccaccaacttctctacttcagggccaatggagtcatcagctttcacaacctgttcaataccaaaccaacaaaaacaaaactttgaatcaaatcaatcacaaaaatccaatccagataattgtctcagttgtgttgttttgttacctgaatgccaaggagttcagaaagacgaggaacaagaggagccaagctgaactttggtgtcacaccttttggtcgtccctgaaaattggtacatacatttgattaatatttatatatataatatgagaactcaaaaacaaccaaatcgaacagaaaaatagatacccccatcaattaaaaaaaccaacttcagaagatgaaccaaatagtgataattttgacaagtaattaaacaactcagagttgatttctgtttatgttaattttgttaagcaatgagctgatgtggtagttcataagcttgctactgcttctatattttatcatggttgtcgttttctgtatggagtctgtttcaaccgatttactaccttttttagtagttgagtttgatggttaaataagcattttttccattcaaaagaaaaatactgataattaattacagagtgaatcaaggcaaaagaaaaggcttttagttcaaaattgaagagaaaaatagataccccatcataagatcaatttttaaaaaaaccaactttagcagctacacaaaccacagaagatcaaccaaatgctgataaataattagagagtcaatcaaaagcaaaagaaaagctttttatagttcaaaatacaaagaaccctggtaattagttagagagtgaatcaaatcaaatgaatggaaaagaaaagaaaagatttttagtcaaaaattgattaccaaatggctggagagaatgactttagctccattctgagtcaaatacttgatagtgggaatggcagcacgaatcctagtatcatcagtaatgttctggttatcatccaaaggcacattcaagtcagctcttaaaaagaccttctttcctttcaagtcagcagcacccaaatccccaacgctcttcttggccatggagacaactcccctgaccggagtcccaccaccattggcggagccgaaagagcggagcgtggaggcgacggcgtgggagaaaagagggtcggctgctgtgaagccgaggcgagggagtgtggtggggcggagacggagggaagagggtgagagttgaaggagagaagaacgagtgcgggaagtggtggtggattggcggaggagggagaagccggtggtgggtgtagctgcagaagccattgatgagtgaagtgaggttgtggtgttggtgtgggtgtgtgtgtgtatatgatgatgagtggtttgattggttggatttgtttgtgtttctcttactctcttatcgttgaggagaggctcaagattttcgatgctttcaactatgtcatcaaatcaaatcaaaacaaaactctctctctctccaacttcccaatcataaacttttactcaaaaaaaatataaacttttactttagatcaaaaacttaaaaaaaatgttaattaaaaaaatttgcaccataactaactaagctttaacttgtagataaaccattaagctttaacttgtatatggccattaattgttaagttaatatccacgtgttattttcttatt

SEQ ID NO: 36472 - DNA, 3968 bp, Cannabis sativa
agggaagaagaactattgtgtagctctgtacttttgcatctgagtttaatcaccaacctgctagtgcctcttaggcctcggttttcttatttagactgaaccttaaaattgagtagcatcattcccaaattatagatgtattagttctcagcagtttggtggagcttttgtttagtactcttcggttctttggttggaagttgatacgcatcatctgatctgatgcgatatttgaagtttagacagctttgctgcttggtttcaatttcataaaccaagcttcttctgtaatgtttgccattcttgatctaatctcatttttcttagcctattgtgttgattattgctaattttctgaatgttgagcaatgacaaagcattgttgcttcaaatttgatgcattactgttgtattgtatttcatactcatcaacgccaaaactatgcaggtggccatggtaatagacattctcgtagctactcaccacgtcgatggccagacagagatccctattctagggatcaaaggagaagatcaagatctccatatgatagaaggcgcagggaacagtccccaccagctggttatcgtagataaacacatgatccaagccaggccgagccaagctgtgacttgactcttgttcatcagcactgagggctttcggttttttctctgctaagtgtacgttatcagctactaattgtcctctaattctattatgtcctgtgtttctattatatcgtgtagtatcttaacagcattgtctctgttccttgtttctgctaattcactcgtgcggtatgacatttgtatctcaacaacattgccctgtaattgcaaaattatgtagttgtatgtgtgtttctgtactttgttttccacaatatattttctgtttattttttagtgtgatgtactaagattgtctatttagtaactgaaatttgaaatctgctgctacttcgtttgacttgaaaatgaactttagggaccagtctgctaaagtcacaccaagtataaggaccatgaggctattcttactttttacctttgtttatgtacatagtacctttaaaaacacctcatcaattgtatggaccattgactaaggaataaattggcctacttttaataaaaatcaaagtttctgttaaggagggtggatgaagtggaccaatcaaatcaaagtcttattcaatgggaaaaaaatataaaagtttattcttattattctttcacaatgtgtgcatatatatgtatgagattaggactagtaatgctaagcctatgttaattacacatttcaatcaaattaggatatttatacattttattattcgtttttttttttttgaaaattatacatattattattcttaaatactaagaaaataaaatatttgagtaagtttgacatagtcatagaaagatttagttttaatttggaccatgccatgttaaaattttaaaataacataaataaatagaatttactgtaataaaaatagagtacaagattttactttttatcttttctcatgtcatgaactgaattatcatatcaagtactggcatttgattggagcaagtgggccaattttcatcggcctatttaatgctgagtggagcccaccgtcatttcatgggccaagcccaaaagtattcaaaaattaatatataaataataataataataacaatcataataaatgagtgagagagcatgtggagggtagagaagtgagaagagaaagtgggccccacactttgaatctcccaaaaatgaccaagcgggcttttgtagtgcgctccagctgcaaccaagcgcggacttcaaatccaaattcaaatttgcccaaattttcaagccccaaaaaaataagtaaaataaaattaaagtgtctttgttttatttttcattaattaaagtaaaaaagaaacaattaattattttgaacaaagtataaccttaaattggtggtggggacttatcatttatgaggtttggtattatgcactttcttaaacatcattgttattcattttttttgaaagtttatacccgaaaaaataacaattatttcaccaatgaaaatgtctatttaaggttaatcaattagacttaacctttcttccaaattcacttatacaattatagtaaaaaaaataaaattatatatttttagatttttgaaaaaaatgaaattaaaggaaataatccaaaaaatgaacagtatcgactttggtaggataagatccgacagctgtgtccctgcacgtgtacgtcatcccctcacagtctttctaaagcaaccggttttgattaggctcggctcggcttaagccgaatggtaaaacgattcaactgcccaagccaagccaagccaagccaagccaagccaagagtgtgaggagaaggacagattaaatcatgaccgtccaaagtaatcgatatttcgttgtcggacgattgagaaacatgttacacatgatccacccacctaatcctaatgttggccaaactatacaacaccccattctttggatttgtgtactaaaatacaattcacatagacctattctccaatactccattttaattctctccaaaaaaaaaataaataaataaaaaatcctctattttaattagctaatattattataacaaaacttatatttatttttttctctataataactttattacacacaattcaaaataactagattttgcttaaattatgaggaatttaatttaataataagacaaataattccttgctcttttattccttaaatattttcgcagtgtaaaatattcctcaaacaatgtttacttatgagattacttctatcaaatcatgatgggaatgtcgtacacaagtgttttttttttttttttaaatgatgtttgccctaaaataattccaaaacacatttgatttacctatcttcaccaatatatatcacgatattcttatctattcaagagattattttatcaaagtctttcagatgattgtcctttgagtttttattaatcccataaaaaatatagaaaatatacatacttagaattaagacttaagagcaccgtgctcaaaaaattcaaaatttttaattcttagtgtggtgaatttataacttgaaaaagtttatgagacaaaattataagggggtcaattatttatgtgaaaaatgttatttaccactaatgtatcttcttaatagaactcatttttcaaatattacaattattattgatagctttatataccaaacacgaaacatacatgaaaggccccatatataacattttataatgaattgtgctgtacatggtactataaatagtgtttgatgtttggtatggtaacatgttggattataagttagaagaaaaaagttgaaaaagtgaaaaataaaataaaaaatatcaagcctaattttggtttatgttgatgaaaaataaatagacatcaatattaatatcaaaattgaaagaaacatttaggaataaatataaaggaaaaaagatagaattataatgagtacttgatatcaatcaataagaaatagttggaatgactataaacaaataaaatagagaagaaaacaatgggtaaacactaaacaccatcttatgtcatgcacaatatgtattaagtcattgttaatactgtcagacattatctatttctttattggtataatattgtctgttttaggtctaagccatcacagatttatttttggactcttaccgaaaaggcctcattctaatggagatagtgtccatccttatacacccaatatctttctcatttctagccagtgtgggcctttggttgtacacccaacaatttgttgggttttgtgccctaaataaaatctgtttcaatataatcagatttactaattaatataagatcagaaattacttttacgttgcatgattcacatga

SEQ ID NO: 36473 - DNA, 9244 bp, Cannabis sativa
gtgcggactggattggatccaaaaaataaaatccgcacttagtgcagattggatgttgtttgaccaaaaatatgcggattgaatcggatgaacagcccccttcataaatcgcattgacgttatttgctttgtctctttcatctttccaaggaatttgggaaagttttttcttttcttgtgacattgggagatggagatttaaatttagaccacgttcttaaacagtgataatgtaattagcggtaagtacattccatttagttccaataaaaattgagtgtaattatattttctaattacgaaatattatcaattttaaataatcaagtacacaatattattattctgtctagttactatctctttagccaaaaaatttaagctaatagcgattgccaaaattacttaactgtacaatttataagatgcatgagtgtctataacaatttaagctagtcatgtgtatcacaaacatatagtagtaactttttaaaacactacgtattagtgcaaaaaatcatttacaattccctcaatctgatactgccatttaagaatgcaactaaatactaaaaataaggataagcttaacatacgacatcctcctatgcacttgaaaccacaagatctagtagtaacaattaatcttttgggcttttaattaaatgcctacataattatgtctctcacgaacaggattgtctttagcttttatggagtttgggaaaaaattttaaaaatgggtcttttatttgaaaaataaaataaaaattcaaataagtttttatactgttgttctagcaaaacttttttgaggccttaaggattaatatttaaaaaaaaaaaaaaaatctgaaaagaaaaagaggttggaaggccttttcggcttagggccctaggacaatggccccagccgtcccaccaaacaactttccttaagaggatgaggcaccgacttcatgattattgaatcctactagtactaagaatgacaaatagcatgaataaaataaaattaagaaaaacaaatgacatgcacctgacaagccgataggcagacatagtcattagagatgaacccagtacaagaaaagcatcacaatcctttgcagcctgaattgatctatcagctctacattttgggacattatcaccaaaaaagaccaccttcaaaatcatcaatcacaaaggaaaagttcagagatacaagccatctgctaagaaattttttgtttagattgtttatgaattgaaacaaattgaaaatgagtatgaccgaagtcaataacaatagaacatgtaacacaaatatacaatcaagttgattaacgtacaaagattcaacaattcaaacgaataacactacagaaaaagagtgtcatctatatctcttgcagttcggtctgagaaaataaaatcaaaacaatatactctattcaagcagaagatctcaagaagatgatagccttcaaaagaaagtaagaacaatataaactattttagaagaagatgaagacgttgaaaaatacaacaaacaaacatcgatactatattctttttaaagcagctcagctcgtgcttgagatggccagcatctcacttgcattcatcaaagcatgatgtgactgtgacatatacaaaatgaaaatttcattctcggttttacgagaacctcaaacttaatgggagcaaaccagaaaccaaaccacttcagctctctttttggaaacattaacaatgtatcaagtattaaaaagtcctactgatattttggacaccgacagctggtcagaaagtcagattcaggaccgttcatttcactatgattgcttcttgtgggaattcttaaaacgtttaatttttgtgtgtaacaggaatacatgatagtcatctcaaagtggtacgttactaacatacaaaggtagcatattgttagactaagttgcaagcattggtgctgagaggtggattggcaatcacataacatgaagtggcgagaaaaacatgtgatgtgtcaagttgaaggcagtttgcaacttgactgggcaaaaggtcattttccctgaaaaaatctaatcatatggcatatttttatcaagaaaacatgtggctcccgttgatttattatccttttgttgagttaatgaaaggctgggaacctgcttgcttgtgtgaactttgcttaacttgagtcatgaaggtttctattgtacattgtgtatgttctgtgcaaatttgagagggctgattagtgtaaaaggtcccaacaatacacggatgttttaagtgagtctagaccctttgacacatgtttttctttttcaaaaataaagaggccacttgtcttagactctcccccgcgtattaagaacctcacttgtggcagaggaataccttggtaaacaaattaaagtataggtaggctaaactacactcaggaacaaagcaaaacaaatcataaattctatttacatcaacacattccattccctacacaaatctaagaaggaaacactctcaaaatgctttgttttaaagacaagctttaccctctgacaataaatctatccccacccacataagacattgaatctatgttcacccacataagtgataaatgtttgaagagagcattaacataaaattgaaaaccttccacctcaaaatgagttaaacttttaagtatggatgcaaaattaattgagtatcgtattctagttgagttaagtttgaataattaaaatgtcatcgtctagagagatcaataaaatataatattaatgatgattatatctgattattggaactatcatcaactaagaacatgtaatgccacatttagcaacttctgataataaatcaataataaattagttaaaagcaaaatttgtaatttacgagacagaatgcttacatcaggtttaagcactccattgcacatttcacaagtaggtatgtgaaaatcctcctcccaaaatttttcatcaatctcgatatcaccgtcaggcctttgcttcatgccgaagctcttatctgacccagggctaccatagtccaaacattcaatagctgatgcccactgcagtgaaaaatatttacttgctcgtcaggtgactattgcaattaaacaactcagcaaaaatgagtgtttcagttgctaaaaaggaaaatattcctgagatcgtattttcctcaaaatattaaaataagtaatattgtaaatttgatttatactgctttaatagtttggttgcttgtttgctcaatattcttttctgagtcacttttctgaatggataggacatatagctgccaatatgtatgtccaatcctctgtcggcccaaccatttcaagcaaaaaaaccatacctaaacatctcataacatagagaccttaaacagattccatgaactgacactaaatcctccatgatagttgtagatgttctcatggtcatgctcacagctgcccaagtccatttctttacttgttttagaaaatgctagaaatgttatccattcttctataccttctacctaaattccagctactttaaaattacttttccactgggcaatctaacccattcttcattaaaactgccatttcactaaaagcctaaaatgaggattcttcagaaaacttgacttcactgacaagagttagtataaatacgataatcttataggtatttggcattaaataaacattggtcagacccaacctttggatttagggacttcacttgttcttgaaagagatcccggcaaacagaaaatccacaatctaaacaaacaacctcatacacagtgccatgtaattcaagggggttgctacctgcacgctgatgcagcctgaaaaacataagttagtcctaatagactttccctaggcattatgaagcctccacaatgtttgctcaaagatagaggcttttaagcaacctgtcaacattttgagtgatcataaaatttatccgtccagctttttcaagggatgctagagcgatatgagcagcaccgggttgtgctgcagtaaactgtctccagccagcataacttcttgcccagtatcgccggcgagctcggcttgagcgaataaactcctgttttggagaaccagacaaggaaacaaatggaaaagattactataaaggcttcagttcaaagttaagaaacattaaaaatcagtttactactaatttccatgggtcatatgctctagtttgtttgaaagagttgtacgtcatctcaagtatctcatatattcacatgttacatccaaaccctaatatagatagtaaatgcataggaaaaaataccattttcaagatcatccaacagctaaaatgaaggtgtgattaagtcattgaaaataaaatttctttatgcttgccaaatagtttacataaagagctcatttggtaagccgttttaggttgcattatattatattgtattatattaaattaaattatatatcatatttttatataatactttgttaaattgtaatttatactaaaatattatatttatatactcataaaagtcaataccacatataattttacataagaatatgatatgaaatacaagtcaatataatactatactatacaataatactatatgaaataatacggcataccttaaactctccaactttttagttaaaataaactcatgtcctatagaacatatcaatatatcaaactacgatcatcataattccttttagtctcatcttacaaactaataagtatctttctcatcttcacctgttcgctctaattcttccatggacccctaaatgttatatttgaatgatacatcttttcttattaaaggcgaagaaaaagataaggtagatattcctagtacatgccttcagttcacctgatgagtaattggtttgaagccagaactataagctccatttgggctgcattacagaaagatgaaaataaaattaataagtacttaaaaagaagaaaataaaagaaactttctgagaacaaattgacagcttgtaaaacagtatagagcttagttaaatgaattatgttgatgtagcctgtgcaataaaacagtaacacaccagtagagaaagccaaaaatagaaacgaataagaagatggaattggaattggataattttgttttgttttttgaaacagagacaaggttaaatgtcttagaatgaccttctaccaaatatgttgggatcctcacttgtggctgagggaaaccatggttacaggatagcgcaaatagaaaagaacaaaacataatcaaaactttcttgtacccttagagttagatcattaccaggtattcgagatattcttgaaatacctattctaaatatctgcataccttactcacactctctacacctcctacatgcttcttgcataactaactctgaaattacaaaagtgccctcaattctgaatatctgcataccttactcacactcgctacacctcgtatatgcttcttgcataactaactctaaaattacaaaagtatcctccccaccactcacagcactctaccaaaactaccttgcgccacagctggctgttttcccctactagcatatgtgaacctgatttagggtctaacatatctatgtgtactagtatttgaataacttgtcactggaactcagctaagatgactcaacaaattttcaggcatgatcagatagaatgcctgcaaagatcatagaatcttgatcttaataaatatcactttcaaaaattaaggtaacacaagacttggggtttttctttttataattgaatcacaagagtatcaataaaggttatcagatattctaaaacaaagaaatcatttaagaaatattttcatcaaggttatcaggttttgtaaaagggtaatcattctacaacaataaaatgaaaatacttcaaattaaaagtgactgactacctcacctgagtaatcaaacaaaaatcaaaaggtatatcaataaaagtccattatttggaatcatgaccttaagaatgaatacattacacatatatttcacaagagtacgtctattgcttctctgtatcagaatgggtttccacaagaaaatttaaacaaaaacaaagcaaggtaacagtaaatggttacaatcagacgggacttggaaactacacctgtttacccttcttgatgctggcaaacattgagaaagaacataaagaaagagtgaagaatacaataagtgagagaaaagtgaaccaagaaaggggatcagtgacgtgtttgtttcactgagcaaatgtctacaaaatcttataataaccaaaaaaaatctactagaaaaacttaagaaacccaactatatatgacgagataatcttcaaataataacttataacaatcatcaagtatctcatactgcatactgcagcatcagaaaaaataatatctaaactagttttgcagactgtggaactaaacagaagagaacaatttcattgtgatcgaaagtataaaatcaatgcagcaaactcttgatgtgctactgcaaaaaatgtaagaataaaaacaaataggcagtgctgattctgagttataagcaatatgaaatttgagattatgaataatgtcagttgcagcaacatgacatatcatggggcggttacaaagcccctaagatagcaagaacaatgttctaacctctcacaagtcaaaacttaacagaagtgaaagtgagaataaccttctataatctggaataccacattctgtacttattcctgctccggtcaacaccatgagtttcttactgcaaaacaaacaagctgattagatagagaaatcatattgtaaaaaaatatgaattaattaggagacatcttctcttttattcaaaaggaaactttctaggaatagattgttcagttatttccttccttgtttagttcagattctcctagctgagtaaactgtctaactttaaatacctatgtatattctcagttcaatgtcaatgaagaaaatattttcctccaaacttatatgatatctgatcctaggtttaagattactgagctcttatcaccatgtccaaaattccaccagtccaaactccatctcctaccacagccacacctcctgccattcaaaatacccaaaattctgctgatttcagtacaatgcttccattcaaatcactcctgttgggtttattcgtaagaacatcttaaaattggcccaatttgtgaaattagctattgatgatggtaggggaaaattagattatttgacaagggagatgacggaatttttctcaggttagaaactttctatctttgatttagaacacaaagaattgaatctcacagagaattgctctattgatgatagtggtaaaggttacaactagcttccgagaagctaatttctccaaatttaaccattcaagagggctggactcttccttagatttaatctcttctatttccaagctaccttacaaatgaatcccttcccactgcttatacatactggataacataaaattgtgcccgctaggatctactaaaaataagataaaacagccctttaaaataaaagccaaatgaaagccacctatccttgcaggttccagaatggaagaagctgtccatgaaggagatgcgagcttcggaaaaacaaccaaacgttccctgatcgagttaccaaagcaaaagaagatggtggattgcaaatggggtcttcaccctcaaattgattcatgatggatctctggaaaggtacaaaacaagactattactaaggggttcactcgaacatacggtaatgactactcagagacatttgctcgggcaaaattcaataatttccgagtgttactctccattactgtaaacttggagtggcaactgcagcagttggatgttaaaatgctttctaaaatggaaatcttgaagaagagatacacatgatggctgtataggaccgtattctctatgattttatacacattcaataacctataactactatactctttcttcaagcttaataaaaactgatactataaatctacattgagaagatgggagattcacctttcatcgaaaaattgatacaattgttggacttcctgaatgctaggaggttcggcatcaggaaccaacttcttctgcctcaaaaagttagaagccacgatttcttctttctgtgatgagattccggagactgaaattcgacatgatgtttgcacagattttaaagaaccctgaaaaggtatgactcttcttccccaactaaatggttgccaatttctacaacttgaatgaataatgcctgtacaggaatctaatgccaataaaatatcacatacttagattaaagaaaatcggaatgaatcaaacgaatcagtattcagaaattacgataccagcacatttgccttttaagatgcttcccatcactcgttctgcatttgtcccactctgtataatgcaaaaaaaaaaaaaaaaaagtttgtataaaaggtaaaccaagacattttatcaaataagaaaaagataaaccaacacatgataaattactttctggacaattctagttatggaatttgtagatgaattctagcacacacatatatatataaatgttgatgtattaaaatactaactttcccatggtaataaaactttagtcagggagaccatgagctgttataactaataactacctctcgtttggcttagaatcttaagtagcattttgagtttgccaaacaattctaaacaatacgcgattttctttccgcctaagaaactgaaaatcattatttacctacaacaaaagctaatttcaattactagagggaaaacaacattaactgaactgaatggcaaaatgttgaacgttcatacgcaaaaagcaagctaataagctacatcaatcgtcaaaggaaccaaattttatgcagaatttacatgaacatctttttttagagagagagagagagagagaacgtacagagagaagagattgacgcataaacatggagatggagatgtgagttaggggatttgtgaaatagaagggagattttggagaaacgttgtaagaaatgaaaatctgggttggggtattattatgagtctgtgacgagctgtctttcttgttccacgctcccacttttcccaccgcgatttggctaacgtggctctctccgtaggcatatatattcccatttatt

SEQ ID NO: 36474 - DNA, 8766 bp, Cannabis sativa
agctcagggtcctatttttattattttagaaaatgcagggttcattttgtcatttaacaaaacacagggtccaaaatggtatttacccttaattaattaacaattaaaaattttcatacataataaaattcaacattcttatacgaatcctctaaaacgatttagaaactaactaaaaaattatcaaataagatttatagatattttgttttagccactaaattttattttctaaatattaattaattaattaacaactaaaaatcatcatacattattattgaatccgatcttcatattcggtttagaatttttaacttatgttccaattaatttttctctctgttttcttataattaaagttaaatcaacattcaattttattgattaatttgttctttatttattttatatttttcttaaaatatttattatggtgacgttgggtaacatttttgtttaaaaaattttaattacaaaaataaaaataaaatttttattttttttaaaaatatgtgttctatagatttttaaaaaaaatattgaaaatatatatattttttttaatttagatttttaattaaaaaattaaaaaataaaaataatttgatagaacatgaaaatattttaactttttataattttaaaaataaaaaattgattaaaatagtgttatccctaacatatatgtattgaaattcttttttaatgttgtttgaccaccgcacgcgcgggtcgttttgtagtatttatataaaaagaaagaataaaagtgtcaaatttcacaaatctgtttggctaattcatttttttctctcaaattttccaattgaattgaaaaagaaaaaacgttgcgcgctttttttttctccttccgggtgtggggtttttgttgccttggttcttctccaatggcgaaccattctcattcccttcaatttccccagaatcaggacaatgacgaactcagcgagccaccactgattttggtcgaagaagaagaagacgacgacgacgaaacggaagaggacaatgaagaagcagaagaagacgacgaaactgaagaagatggcgactatgtcgcttatgttgcagaattgctgaaagaagagggtaataatgaagcagaggaagccgcttcgttgggcgagggctctcaagagaaagagtggaatcgtagtgaaattgatggtctattttgccctatttgcatggaagcttggtgtaatgatggtgatcatcacatctggtatgtaatttttctttttctctttctttttctgcattctattgttatttgagtactcttcaggaaaagggaaaatatcttgtataatcttcgagatattcaatggaagaattggtactgttaatctcacagtgatagctatgtcgttaaacatttattggagagacagacttagcaatttgttagagttgacagccttcgaaatagggttctttttggggtcaaggaaaagttgaaatttgtttattttaatttttttttcaaaagaataagcacaacagcgaatgtaggtagtttgagcagtgtttaatgtttgcaaaccataacatgatgtgacattgtcattgatttgttgggaaatcatttcactaattagtcatctctccattttttttttctgtttggtgactacagttgtcttccttgtgggcacatatatggtatgtcttgcattaagaaatggttgcaaatgcggaaaaatcaagggaaggtactgattatgtaaccatatcgtgtttcctggaagatctggaaaacttattcattcttgtggaacttattgctcaaattttttcttttttcttttctctttagtgtccccaatgcaacaagaaatgcaccctgaaagatgttagaaagctgtttgcatctcagcttgttactgttgatgattcacaaaaggttatcttacttcactaaacttgctgctttcagatatgtttaattaatatgatttcatacatacatagtaaatgattgagtttacccctttgtagagaatccgactactagagactaaatgctcttctttagagaaggaggtaagaattatttccacgagtgccagttcagatttcttataatttgagtttgtcttaatttttgatcttctaagatttgttaaaatcgttcatcttctcattatataattttataacggagtgatttatacgtagtatacttatgagacaagtctgttatattggaaggagttaattttcattagttgctgctagcttcattcgtaaatatatattttttattttacttttaatgcacagagagttgattggaggaaaaaagaagagaaatggaaaaagaaggagtctgtgatgcgtttgaaagttcaacagcttacagaggtatgctggttgtgaacaattctgaagtttatctgtacactacaacaatttaatgagtttatgttctctaaaatatgtccatgctgtcttgattcatttttgcaattcagacattgtctgtttttttccaagctttcaaacttccccttggtttcaaattttaaccttttaatcaattttaagttatagtttctgccccttttttggctccacgaaagaattgaagcattgtgaaaatttatgtgttgggtaatactgacctttcaagtagcttacatataaatcactgtcttgggtaattcctacaaaaatacattcttctttgatggtcatgacgagcaatatgttgctattagatgaaaagaactacaaaatctacaaatttatcacaatcaaataaaaataacttgaaagctgtatgatgaagtattcatatgccacttttaatgtacttgggatgtcttgtagatgacattagtaagcaaggcattccttctctctctctctctgtctctctctctctctccaacccccatgaaatctaatttttggctatctagaggacaactcaattggagcagtttataggagatttatcaaagggaccatctaattcagtcaattctggtggagacttactacaaagatctgtgattggtaatagttttgttaatggttacataagcagcattatcttcataaatatgttggctagaaaatcaatgcgtttttacgatcaatgatcttttttgtgttattatttagatggaagttaatatcttgcattgttcttttaatatttcttgtagggcgtaattctaattcaatattatgcagacaaggatctcctcattttattttacaggtttgatgctaggttctccttgatattctgtattctgctttattgaaatggattatagttaatggcctatagcatggctttatgagctgttattcatttaggaattatagggactaggacctttgtggtattcttgatgggaatattaatatcattattttatttttacagaaggagctgcaggtggatggcgctcaattatttgattttgatgcttctaatcaaatcttgttaattgctcgaaatctatctggaatgggcgcaaaacatatacttaccaaagtaatatttttgttggtcaactaagatctaggatttgagtatcctttgtatcattgaatttggaaataattagcaggcttgtgtaaaaatatgattttgcagattagcttgatacctcctcatgaaagagaagatattttgcttcctccatctataaatttcatcaaggacttacacatttgccctacggatagccgtcttgcactcctagcttcactagggaagaaagtatcacttttcaggtgacatttgcttcctaaaactgttctcatttttcttattcatgcttgcctatataaatatttgtttgtgtacaatgtatgtatctttgtactgactacagtcagcgctttgttacagtacggagagcaacaatgtcatccttacctatgatttaccggtaaaattttatttatgaataatattcaacttttgatgtatttttctgtacttgcgcatgttcatgcctagacacaagagtcctgaacttctaccttcttaccatcatacatctcttccattgctattttgcattttaagaaattcaaatagtttgaaaaggaatcatttattgatcctaaatactgctgttgaaggttttcttgtccagtgtgctctattccatattgacatttgtacttccaggctgctgcttggacttgttcatgggatctcaacagcccatgttatatgtatgctggactacaggtatgagttgtctgctgtattttttgcgataaccagtgtttatgaattcttatattttctgtttttctttcttttataaatgcagaatggctcggttttaatgtttgacatgcgccaaactatgggccctgtgaaatttctcaagggactgaccagcaatccagttcatactgtacattctctcttacacaagtcaactcttccttctggtgctagatctgtcttgtctgcttcttccgctggcttgtgtcaatggaactttgaaggtgctgatgaaatgtgggtatcttctctacttgctctatttatttctattttaagctggtattatgtataattttttttatgtataacattcatttattttatatgtttcttgactaaatttttgttgtgggttatacatatatattctgtctttttcttcacatcgattagccacattttcttattgataatcataaatcaaaattcttgaaaacgtgtatacaaaatatatttcctggtaaattatgttcaaatatcatatgcattagaattttagttacttaaacagctgtatctaacttcattttctttctataagttcattatgttatggcatgttctaactagtcaattaatttctatgaaggccaacttttattccagacacagagagacaaggagtctgtatatcacttgcttattgtcctagcagcgatgacattgtcgcttcatatcgtcctaaagttgaaatgcataatgacatggctacgtctcaactttcacaaactccttccaatgttaccggacaaggaataatgggttcccatgttcaatataggagaggaggttttaactcctgctttcaaaagttggcttccacctatgctagtatgaatcagatccggcttccgaaatgtgcgattatagactttagcgaagataagaaattatttgcatccagggaagaaggagcttgtgaaacaaccttgcaagaattgccttccttttctgtttctcagcgtcttaactctgacaggtatccactccgagacatcaagtatacaaatgctgtaggtcatggtttacttggtggtttgagtggtgatttactgcaaattttcagtacttagttgtcatcaagaaaggtaatcttttatatttactttcatcaaatctttgctttaagctgtagatttagtaaatgtgctgtttacatttaacatgggtaattttgatttttcaaaatcagagtccattcactgtagaataagtgctattcgtcctcataactattattttacatatgtagatatatttctttttcatgaggctactagtctgctactgcctactgccagtgtctgggcctgaaaattttattagttaacgatttatagctctcttttcattagtcactcactatgttattatttattaatggtttgattggactcattcttttgtgcaactcttgtccttttttggttggttaaagtaagtagatctttcaattctcaaattaaataatttgacacttaatgacaaggtgtttggttcacaactttattgacaagtttaagtttatcatattgtattccacaaattatatttagttaatcacaaaaatacaaatacagataacagtcatgtgataaatcactacctcataattatagataaatatatgttttttatgggaaaagaaaagttgaagctggttatgaggtccatttttgtgactgcatgtttgtaaaaggagaaaagtaaattttgtccctgtgaaactttggattgcaaaataaacttttggtgagtgtattgtgtagagccgtgttgtaactacatatattcaccttaaattatgtgtgcaataactctccatttaaaaataaaataaaattagtcattttaaaatggaaataaaattcgttattgccttattggttataacactgacccaagtggggaggcttgttctaaatgcatccaagaaggatgctcctgtacagtacaagtgagtgaggccctactttggagaaggattattttggtactattcattttcttttataagaaattttccttgtttattctgagaaaaataaatttaattgtaataattactaaaaacgagcagggagaattaaaaaatagcaccatataaagaaataaaaaattaaaatccgacctaccggattcgaaccagtgacctaaggatatctatttggttatagccaactacagtcctccgctctgccaactgagctaaggtcggttttgcttatattgcaaacaaattatatatatatattctataaagacaaggcaaatcgtgagaatataaataaataaaaagtcttaaaagacctttttgtcgtttaaaattctacttgcccataaattatataaaaaaaaaaaacctacttgacaacaaatttcaatctattaactgaaaattagttcaattttttctcccatataaaccttacaataaatattaaagtaagagatattaagggcaaaatcatttatattttatatttttttaacaagtaacactatctaaattaatattttagtgacaaaactacccaaattctatttttgttagttatttacccttttcgtctgaaaaaattatgttaagtgccacattagatatgtcataatatatacaagtgtacacaaggatggagccaaaactaaatagttgggggactaatatcgaacaacacaatacacaaaaaatttaaattttagtgactaaaatattttttaagaatgtatgtcaattgtggaaaatattattattttttaattttataagaatgtatgtcaattgtggaaaatattattatttttcaattttataaatattatatactatattttaaaaataatcaaatagttaaattaaaaataaaatacgaatagtgctttaaaatttaacgggttcaatttaatattaccaaaattaataatgataggtagtttcttaagggaaagaaacacatattaattttaagtggttaattttatattaattaaacaatatactaaatgtatttttaaattaaaataagtcaaattaagtatagaaaaatgacgcgtaaaaataaagtatagaaaaatgaaatatatttatcattttattatatatataattgtggaacctacattcatatataataaaattatatatatattttatcaaaaatagtgtatttatatctttttatatacttttatatatgattatagggcaagactacggtaggacttagtataagttccctatcggtagagaagcttttttgactattgattttaaatcatgtggtcattatgatataaggtgtatactcttacgatagaactgcttgtatacaattaaaattttattgatattataataatatttaaaaatatatttattttaaaaaataaataatattaataaattaaaatttttatttatttttaatataaattatcattatttttttaaaagttaatttgatcgttgttcaatctctcccagaaatataatttttcttttcatattttttaagtctcaattcctttgatcctccataaatctctattgatgctctgtttctgtactcatgaaatatttttgcttcaccagtataggacttttgctatacatgatgaaatctatttatttatttttatttttatataccataaaattgatagaatagatgaatttattttatgaaataactgtgagttttgtccaaaacgattcttatttattattcagtgatggtgatgaagatagaaaataaaaatccaaattttgatatatatatatatatatatatatgtctcataattaatctatgatatggctcttatgtcttgagtaagtgaggccaacaaagagctagcaaaaaccagtttaactagttaaatccatttgtttattccaatcaaagcattcagtgtacatgtgtttaattatatgggtttgagtgttccaaggaggagataatttcatctatttccgccaatagagatgaacggtggaattaaacatcaattaaataaagcaaataaagtaaaatatcaattaatgaaaaaatctcctacacttgtttcacaaaaaattcagtatactctattttctataatgtttgattggttcaatttgcttccctatagcataaggtaaaaacaaacagccctaccttatcatttccctatgattatatataggggaaatctagtgtaggtccccataattttacctcatgacatagggaagttaaatgggccaataagaattaagaaaaaaaattgtacacatgatattagtgtattcctctacagccaattttttctttaaaaaaaaaaataaaaatgaaaattgctttatcaaagacagcacggttggctgactctatttttacaagtcttttaattttttttaatatttcaataaaagtaattaaaatttttaatactataaaataaattttcaaaaattcatataatatttcaataat

SEQ ID NO: 36475 - DNA, 7057 bp, Cannabis sativa
tgatgatgagttacgtacgataaccttgatttgggattatctaagtgatcacaaacaaactgatgagtctcaggcagcaaacaaatacaatacaacatcaacatttaccttaatttaatttataagaaaatatcatttaaaattacaataatgtatttttatttatttatttatttatttgaaggaaaatatgtattaagttttgattaattaggagaaaattgaatgagtcagtgaagttggttccaccaaatatggatagcatgataaagcgacacgtgtcactattacaaatcaaaatgatcaaatgaatcaacaaaaaccaaaaccaaaccataatcacttccctaaccaaatttccaaccttttttcttcttcaattcatcaaatttcgctatgcaaagaggtaaatcttaattctttctcttcattcattcgttgattatgtatgttactagattcatcatcttctttaatttgattttgtttgttgtttgttgtttcagacaattatggaaacaagccaacttttacacagatcgtggcggtttcttccatcggattaatgatagctgcggcggttcattaccgtctccgaaagctcaaggctgagaagatggttcctcgtcgtaaagcttctcaaaatggtcgacctgataagcttgagaggttttctcattatgtaggtaattaatcaattaattccctcattaattaaatgtttgattattaacatgatgatgatgatgatgatgatgaatgtgtttgactaattaatggcagctaggcaaatgggttttaaagatagaagagaatgtccgcgtttatgcaagttagcttctgaatacgttaggaaatcagagggttttgaagatgatatttacactttctttgccaatgaaccagatgctgattcactttttgttaagcttgttgaagagtttgagagatgtattcttagttatttttcttttcattggaatcaagctgatcttatgattagtcaggtcactccctcatttcactctcaatcatctcaattacaattgtttgctttgtgtttttgagttgattaaacagaaagaaatgattctgaattttcaggccttgagtcttgatgcagagcctaaaaagaagtttaaggacattgttttacaggccacaaggtatgaaaattaagaaatgagtagcaaatgtttgatgatatcaccgacagataagaactcatttgtaattagttaataactataccgaagtgagtttattatagctttaatctcttgactatacgagtgaataggcaacagaggtttgaaagagtgacaaagaatttgaaggtggctagagttttcacaaccttattggaggagttgaaagcaatgggactttcatccaatgatgattctcggtgtactgaagtgatggccccggtggctcatgctgatcgaagtccggtgctccttttcatgggaggtgggatgggagcagggaagagcactgttctaaaagacattctcaaagagtatggaattgacatcgaaaaaaaaaaaacaaaaatatgttttgttatattatatcttctcatggaaaatagctaatagtattcatttgaattgaaatgttgaacagaccattctgggcaggagctgcaggcaatgcagtgatcattgaggcagatgctttcaaagaatcagatgttatctacaaagcccttagctctagaggccatcatgatatgcttcaaacagctgagctggtgatacattgattctcttccaaaaaaacaaaaaagaaccatttttctcaaaatgattgaaatttgattctgaagtttaggatgtaaacattgaaacaggtacaccagtcatcaacagatgcagcctcatcactgctggtgacagcactgaacgaaggtcgagatgtgatcatggacggcaccctctcttgggaaccatttgttgtgcagaccataacaatggctagaaacgtacaccgacgccgatacaggatgggacccggttacacagtatgtgaagatgggaatgttaaggagatttattgggaaaggattgaaggtgaggagcctgagaatattgaaggcaagaaaagaaagccatacaggatagaacttgttggagttgtgtgtgatgcttacttagctgttgttagaggcataaggtgattcctttttattctttttctaattgaaatgatcagatttaagaaaacacttactaacaattgggaataataatattaggagagccatcatgtgtagaagagcagttcgagttatgtcacaattgaaatcccacaagagatttgcaaatgcattcttaacatattgcaaccttgtggacaatgcaagactatattgcactaatgctttggaaggtccacccaaggtaatagaacaacaacattattgactttgtgtttccttaaattagaaactaataaaatgtgttattgttgttgtggtaaaagatgataggatggaaagacagagacaagacactactggttgatccagatgagatcgattgtttaaagagagtaggaagattaaactctgaagccacctcaatctaccaactctacaaatcacccaacccagcctgcgaagccggttcagtgtggaaagacattgtattatctccttcaagattaaatgttcaacaggagctcaagtacgccatccagaaagttgaaagatccaaatgaaaactacttacatatatacacacataagaaagcaacaacatttttactcatttcttttattatttattgtgtcctatgtaaaattttcatgttatgacaaattaattactcggcaattgttgcaacttagacattaaaaccccataatccaaccttttaaatcgatctaccatataatatttcacactcgattattccatatgatttaaaaaacaaacaaaagaaaaatcacaagccagaaatggcttcaaaaccaagctaagcaatctatatttttgcaccaaattatatccataaatataataagaacaatttaaacccgaaaaactgtacattgcttttcttatttgaacccaaaaatctaaactttaataataaaaaatatcagaaaaaagcacaagcaagaaaaggcttgaatcctaagcaacaaaaactttgatccagaaaatattaagagggatgtaaaatagatcgaaaaatcgtccaagaacataataataatacagtacattcaaactctaatccctaaattaacaaaaaaaaaaaaggataaacattttatatcaaagaaaagaaaatcggttaatactttcttcctcatatgaagcaaattatacgggtacgaattttaccccaatttacaactacagaaccaaactaaaaaaagctaatcactttctcactctcttctcttccaaatttcacttctttcccctagctggggcctttcttgttggtgttttggctttggctggagccgccttcttggcagccggggctttcttcgttgtggcttttggagcaggagctttctttccaggtgaagttcttgatgatgttcttgaaactttagcagcagtcgatctatcctttggctttggtcttgacttagcagctggcttcggtttagcagcaaccttcggcttcacagtagcaacagccttggtctttggcgcagcagcagcggctttaggcttagcgggagcagctttgggtttagcagcaggcttcgatttaggcttagctgctgcctttggcttagctggagatttgggagttgttttcttggttgacttagcagctttctttgcagctggcttagccttaggttttgacttagtagcagccttggacttcggctttgccttaggcttagcagctccggcagtcttcttcttcgctgcagctggcttcgctgttgctgacctagcagctggaatcttatacgaacctttaacctttgaaatcttgctagaagaaacaagcttcttcaaatgaaaaagcaacagtttcttgaagttcgatggaagctgtttatgtttctcttcaagaaatttagtaatcgcatactgactcgaaccgcttttctctttcaatgaaacgatcgcatctttaaccatctagtacataatcaatacgatcataatcagaaacagatccagaattcacacaattcaactattgaattttcaaaaaattaaatacctcttcgtaaggaggatgagttttgggagcacgaggcttcgatggtttcttggcctttggttcctttgtagccttcttagtcttggttgctgctaccggagtagcttcctcggccgctgctggctcgtcagaaggagcgacgatctcagtcgtcggctcttccactacgattgcggtaggctcttcggtggtcgccattgatgagttaaagagaaagagaagatgagatttgtttactggtaattttcggttgtgaagacgaagacggaaatgaaatactttatatagtcaagtgactgaatgaagatatccgaatgctgagctctgattggttcaaaggcttaccacatggatcgctcttattattaagtttaaatttccaccctacgattgaatttaaatccacggttaggattactcgctgtgaaattaatagatggggaggtttggggggtattggggtgttgaaggttctacctagttgtgcttctatgtctatttgatttgattagattttaggttatagttcatggatttgaatgaggtttttttcattttctttatttttttctaagctttttaatgagtggttttttgtggtttggggtattttagattgggagatatttgggtttgaagctgtgatggtcaaaattagggtttgttgtgatgttattgaggttttaagtgattttagagaaatgcttgggtttaaattggggttttttgaggtgggatgataggaacttagttgaggaatgtattgattcaagaattttgaaaattggattagatttgattaggaaattattggttacaataccactaaagttgaacatattttggtatagatatatgttctatgttgtgtaacatataatatgtgttataggtttcttagttgtgtaagatcaaatttaatttttcatttctactaatctaagagtgattcattaatcatttaacatgatttaatcaaaattgttaatgagacatatgatgtaatcatcatctaattaaaccaagtcatagtacatgtgacatagctagtttttgtacacatactttatatatgtcacctatgttgttacatattacatcaatttatatcttcaccatattaaaatcatatcatacacaaatcatttagctatacatattctctttgattatacacatacatatatatatatatatatatatatatatctatacttcacatactctaattacaactataactattcaatttcttcttcacatgttgagtacccattagtaactcctactcacatagctcattagttcacacaaaattaaagaagagattagtatataacatgttttacaaactatatttacacttttcatttgatttgagtactatatatacacttgaagttatatgatatggtgaccaaaagccattatattaattaattaaaatgtttaaagaattacttgcctttgtgattagatatatcatataccatttcttgttctttttctttctataacttgaaaaatttcatacctttattacctttcattttcagttattgaattgaatatcacataggaacaaaaactacttagtcttatctacttgtatagaactctcttatacgtacctatatatattcagttctcgactataacccaattatatcttcttaattataatgataacccaacattaattatataatgaaatttttgctaatgatatccagttctcattaattgatcacatgaacaattacaagagagaagttgtttaattaatattcttactattgttgagattagaatggatgatagatagaatcaaaattcagaaagttttgaagtgtttaagtatttgttgaatcttaataactggagttagtttctattgatcaattagagtggaattaaaagtttcgatcatctcaattgattatatatgaatcagaaatttgagactggaattaataatagttagcatgaatgataagacagtttgtgagcatagagcacttcaatgttggggaaattaaaagaataggaatattttgagcataactagctaagctttatatatgttagtaattggctgagataactacttaaacttcttaaaattgtaattctatttctgtgaatggttaacttttggtaatgactagaatgacacatgttactatttgattgggctatgtcatatatatagatgaaatgacttaattaagtggtgacatgtgttatcatcatagtgattatctaagttaacggactcaaactaacaaaattacagttatagcttatatttttttatggattgacacgacatgttttattattttgcagtatttttaaaatgtaaatgtgggttcatcatcaagaataaatttggtctatggtaaacacaatcacatgtgcaaatcaatagaaaagaaaagcaaagatcatagaagaagagggaacaaatacaatgtttttgtcgaggttcacccaattcttaggctacaccctcatggagcttgctttctttccactgaagaaatagatatgagtataacaatggaggtgattccatgtcacagctttgactagtaatccctaaactctcacttttcaaattcttttacaatctttctctctctctctctctctttaatcctgcgaggtgcttatctctctaactttgagctgaaatgtcttgctctattttgagtggactttatctaaggtatttataggttcttcttgtttatggtagttaataggagagatcccagctaacacctcgacttagttagatccaactcagattcttggtacctagaacattttatataccaaatat

SEQ ID NO: 36476 - DNA, 3705 bp, Cannabis sativa
  modified_base (26)..(56): a, c, t, g, unknown or other
aagttcttatttaggatgttaataannnnnnnnnnnnnnnnnnnnnnnnnnnnnnnaaaataatttccaacagaaaggccctttgcttacctggaataataatgtgccctccccaagaaacatccaggaacgtatcgattagggcattgctaaccatgcttggaccgatctgttttcgaatgttgttctcactcacctgggtttttgtggctcagaccaccgagctcttaagattgttactatcagtaccacatctccctctcctgatcgcattcataagcactttattttcgaaaatgtctggctttctgaaccaagctggaatttaaatttggaatcagcttggatcaattcccctggtccctcgggggaaattcctcgtctcgttgccactcaagccacctgtgccactcaccttaacgcatagaaccacaaaaaacatttccaattcaagaaacgcataaacaagcttgagagagaccttgaatgtgcaaggaataccaccacatgggatgatagtgtcattggacatatcaagaatacgcaatctaagctcgatccccttctctataaggaagagacgtattggaagcaaagggtccgaactcaatggcttgcgcagggtgacaaggacatgaaattcttccatcgcttcgcctcccaaaggaagaaagttaacaaaatcctcaaactctacacgtccaattggggcctcgccactacggaggaagacataactcaggaaatcgaatcctatttccacacacttttctcttccaccaatccgtcaccagaggacatccataatgtttaggaaggaattgattgttctttgtctaacactgacagatcccttttagatgaaccttattcaatagaggaagttgaaaagcctttcacatagctacctctggataaagccctcggcattgatggttttaactcaaacttctacaaagccaactgatcgtttgttaagaaagatgttctcccggcggtgcttagctttctcaatggaaacgggaacatttcccctattaataccaccctcattactctcattcccaaaacccagcaacctactacggttaaggattttaggcccataagcttgtgcaacataacttacaaaatcatctaaaaacgattgctaacaggcttaaattggtgcttaatagtttgatctctcccaatcaaagcgccttccttcctggtagactcatatcggataatacattattgcccaggaggttgctcactctattaagcttaaatcaaaagggaagaaaggttggatggcgatgaaattggatatggccaaagcgtttgatagagttgaatggtcttttatcttggccatccttagaaagtttgatttctcgccacaaataatacaccttatttcggcttgcacctctttggccaccatccaatttaatgttaatggcaaagtctccggccatgtttccccttctaggggtatccgtcaagttgaccccctttctccctatcttttccttctttgtgcggagggcctttcctcgttgctcaggcagcaggaaagaaacagaacgctcattggcttcaaggtggcccgcactgcgcccattatctcccatcttctgttcgctaaagatagctttctcttttgtcaggcctccattcattcctgcaatatcatcgaagatgttcttgctcttttgaaaaatatttgggacttccacaacatatagggcatacaaaaagaacaagtctttcactacctggatgataaagtttggggtcacctaaacagctggaaacataaagttttttcgaaaagtggtagagaaacgctcctaaagtcggtcatccaagcaatccccacgtacaccatggcttgttttcgcctcctagtcgccacttgccactctctcgagtctattatggctaatttttggtggggctttaatgataacaaccgtcccaagactcattggtagagttggcaaaagctttgtaggtccaaaaagtatggtgggtaaggctttcgatctctagtccattttaacaaggctttgctggctaaacaagccttgcgccttcttaaacatccaaactcaactgttgcaagggttttagctgctaggtactacccaaactcctatttcattaattgctcgataagacactcctcttcttttgtttggcgaagcattttttgggggtaaagagttgttgcagaaaggtctcatctcaaaaatcggtaatgggcaaaacacattcacctcctggaattactggattctgggatatcgacatgttaccctgtccaattcgatttcggagaaggtgtgttcctttatcaggaatgacatgacctgggatctaagccttatcagaaactatttcccgcctcacattgtccaggaaatcacctcaattccccttccccttcaacctgtagtgatactttaatatgggagcccactaaatctggtgtttactctgtcaattctggctaccatattagtctctcttctacctcccctcatgatatcgcttcctcttcctccccttaaacttggtggaaacacctatggcatcttaatatctcgcctaagataaaacactttgcttttcgtgcctcaaactcaaccctcccaacacttaaaaatctagcttttaggaaaataattcagtcctcaacctgtgatcgatgcagaacccacgttgaatatgtttctcatgccattttcttctgcaaaagtgttcgaagagtctggaaaggtacaattttctatgactatatttcctcttctccccctactaccacttttcatgacatagtttatagtatttatgctgcactaaccaaggaagatgtagaatttttcctatgtgtcgcctggtttatttggcataacaggaacagggctgtcagaggacaatcactggatcagacccatgtagtagtgaacctagcgcagagcttcctggcggagtacaaatcatcagtatcagctcaaaaatcccttgaacttgtgaatcggcctcccccaatctcatcttggagacctcctgataccggtcgtgtaaagttgaatgtggacgccgcagtcactaaagattctttagaagcaggtttcggtggagtcattcgaaacagcgatggtttggtggctgcagtggtcgcgttcccttacgcgggaggaggggatgtgaccactatggaagtcaaatccctccttctctcattgcattggtgtattgaagaatgttttcattttacttgtgtggaaacatattgtaaagctatcttggatgctcttcatcatcccaaagaagatctttcttgcttttgtgatataattaatcaaattcggccagctttgtctatcctccccggcgcctatgtctcgcacatcaaccggacagcaaatatgttcgcgcataagttggattcttgggccaaggggttagatgaagtagcaatttggattggtgatgacccatgtcatctcaaggagtttctttctatctgatgggcaccactcccctaaaaaaaactctttttttttcaacttgacataagataaaaaatagtactgacaagaagcgcatgtaatagtaaatagtgtagtaaagtaggggtgttccttctccagtcggcaacttacactcaactcaacatacatgatatatattatgggatatgattttgtc

SEQ ID NO: 36477 - DNA, 3329 bp, Cannabis sativa
ttgagatgctatcagagaactatcatttttaaagtgaccacaaatgttttcatgttattcaactcatgaattgttttcaaacaaaattattttgatatatatatatatatattaaaattgatttaacccaagtgaaaatccttcgaaagttgtcattggtgaggatgtttttgggtgtgtggtggtgatgtctaatagaactccactttttttaaattattttagttgttgtggttatacaaaaatggtaatttattgcgaattgtggcagttttgcaattcacatcttctctcatacacttattcaacagaatacttcaatgatctcattatttacattttttgggctcaagaaacaaccaacaaaatcccatttgcatcattgcaagagcctattttctcaaaaaaaaaaaaaaatagtttaacccacctttaggatgcctgaaatagaggatagatgcaaaattgtattcctgattcaaatagtcagttttgtaacaattgtgaaaactctactagagaaattgtggctaatatccatcattgctcaaggctatttcaactacaagaaattaatgctttcattatctttttatttctaaaatggttgttcgatagatgtgcaacaatttcagattgcattgatgtaaagttttttaaggttgttgaagtcttttgagtttcttcccttttgaaatcttgtatccaatttccttaaggcattggactaatgtgcaaatattttaatggtggatgatgattgattttcgttggaatatttttccttcgcccattctgtaatgaataatgtatcaatattatataacaatttgtttctacaaaaaaaataatgaaaaataattttttaaaaaaatcaaattttccctcccaaaaattcaagttccaaattttcaaaaaaaaaaaaaaaaattggggctgaaaacagttaacaaaaataaatcaagcgcataataatcaacaggaacatggcaaaaaaaaatgtgtgagattaataattaaattcttaatacacataaaaagtttgaggtaaaaagtctaaaattaaaaagtctagcagaaagataatgagaacgtaaagcaaattcctatggtttccagtttgtgaggtggttcaattttagcctctggaattcaccaaatgacatctcagtctctttatgtcagattgctttaggggctttaacatgaacatttgagctccttcctctaagcacctgtttgttttgttcaagttattatttaattaaactaaccaaccaaattgattaacaccattattctaatattgtaagaatatactactaaacaaaattatctacttacttgttaatacgagttgggacattttcagatgacattataaccacaggcacctccttcatcactgacgattcctgtaattctccaaaataatatagccacatattgagctcaaaataaaaaaataaataactttccacatagtaattattcctggaaaatatgatatataataccttgattttcttaagtaagtcgtatccggtcattcctggcatacaataatctgtaattatcaagttcacctttgagatctgcaaacagaaattaccaattaattactaattttatgttttgttgatgtaataattagcattttctttttttttttttctataccataataataatattatctttcacttttactcacattgccttccagggagtttagtctatcatgatctcctaggcccaagaactccaaagccctaggcccattttctgcagttgttactgcatcatccataaacagatccaactttttatttatttaatcttttttttttttgttctccaccaaaaaaataaataaataaaaataaactccacaaaaacaaactcaagataggaatggggaaaaacctttgcaagaggatttctggagaagcttttcaatgagtttgcggtcaataatattgtcatctacggccaacacgtgaggcacgtggtctccattttccattaaagacgccattgaagaagaaccagaagaaaaaccaccactacccatatatatataatatatatatatgtacaccccctttaagaaaagccctaccaagaaattaaatttgtatatatagtaatgataagaagaagaagaagaagaataaactcaacaacacttgacccaccactactctaacgaactctcctctaattattaacaattaataagaaagcaagctaaacacgtaagaggagaaccagaacagaaaaaaagctttatacatatattcataaacgctatataactgttctatatatatatttatataaaaaaagagagtggactacagccaaatcgaatttattactaatattactacacaaagctactatatactaaagcacagtaaaacaatagatagaagaaacccaacagaccaaaaaaccttttcctttttcttttaatttttttttttggtctgacaacaaaatttaagcacaccctaaaaatgaaaagctcacatgatatgtatgaaccttataatgtggtctgctctgctctgtctttcgtttttatacattaagactagtaagtaagtaaatgcatattaaagaaaaagaaagagagagagagagagaaaattgagtaagataataaatatccaattcacagacatttcgtgatcatttttgggtttccctttggatttgattcagtccaattattattatttttattattattattgttatgaatattaatattattatttcagccgtatcaaatctctgtctctttgtggaatcaaatatcaaaacaatcaaatatatttgtaagtatcagtatctgttatttctctttttagacatctcgtgacgcactaaacaacacttgtattgtatgtctataccaaaacccttttttgttttatatatctcaataaaaatcaaattttttctttcaaaaaaacaaaaaattaagagatccttttatatttttgaaaatgggaaacaattcatacctttgttttttgaaaatatcgatatccgataatatttatttgtagagatagggtttgaccttttattattatttatatttaaaagaagtataggcatcaaaatcaaatatcaaatcggaatataagacggcgattaaaatatattacatacatgggcaactgaataagtagaagaatatatgtaattattaatggattttttccattgataaatataatgtatattcatttgaagaatgaagaatttatatgccataatgaaaaaattaaaattataaccatccatgcaagtat

SEQ ID NO: 36478 - DNA, 7211 bp, Cannabis sativa
  modified_base (6314)..(6316): a, c, t, g, unknown or other
tcatcatatataaataacactcatgtgaggtttagcagtatcagctaactcacttttcactatctcatctttccaacttggtatcggagcctctggttcaattttttttcctttcttcttctcctctttcttctatcgaagctttcatccatggcgtccacatcaaactctgctccaagagctgctgcttctacatctgctactggcatcaccgaccttcctgctgcttctcaggtcataccaaatcagattgttcccctgaaccttcggcttgatcgatcgaactacttctactggagatcacaggttctctcaacagtccgtgctcatcaactcgaaggatttatcactggtgctcgagcgcgccctccagcaactgttccagatccctcagatgcttcaagattcatccccaattcagatcttgccgactggatgcgtctggatcagttcttgatgagttggctcttcaactccatatccgaagcaatgttaagacatgttgcaagatgtgcttcttcctctgaactatggaatgttctgattcagcttttttctaatcaatctcgcgccaaagttctacaactccgtggaatgcttcagtcgacgaagaaaggttctacactcgtggatgaatacatcttcaagatgagatgcttggctgatgctctacatgctgctggtcatgaaatcagcgatgatgaactcatattatacattattggaggtcttggtagtgaatatgattccgccatagttgctctcactaccaaagatgttatcactctctccgaggttcaattcctcctccaaacacaagaaatgcgaattgaacaacaacattctgttgctaccctggatcttcaaaatcccacagcaaactacgcctcaaagaaagccagtagctcccctgcttctcctaataacacaaatcgtggtcgaggatcctctaatggtgcacgaggcagaggcggacgatctcatcccaataatcgtggtggtaatcgtcctatatgccaagtttgtggcagagctggccacattgctctcaagtgctttcaccgctttgatctcagctatcaaggtgaacaaagcaccactactcaagaactagtacagatgactcgcaggctttgcttgcttcagcctccacagttgctgaccctcactggtatcttgacagtggcgcatcgcaccatgtcatctctgatggttctaagctaagtgacaagattgattacaaaggaaaaggcaaagtaacagttggtaatggcaattctctacctattcttgctattggttcttgtgtcattccttcttttcgttctttaattctaaagaaagtcttgtatgttcctggtattcataaaaacctaatcagcatttcacagtttactcttgataataatattcatgttgatttccatgataatctgtgttttgttcttgacaaggtcacgaggagggtccttctgcacgacactcttagccagggtctctacaagctgtcacaaccccatttcaccccatctattgtgccttctttagccaatcttgttacacattcatccattgtaaatctcagtacaactgagccacctaataatcaagattgtaataagtcctttccctgtaattcccaaaggtctttctcctgtaacattcccaatcgaattgctgcactttggcacaatcgattaggacacccttctcatgtaatcttgaataaagtgttacaaacaattaatgcttcctgtagtaaatctgatattacattctgtgatgcatgccaatatggcaaaaaccatctcatgcatttctcctccacaccaattaaaaccacacaacctcttcaacttgtgcattcggatgtttggggtccatccccacattccacacccgaaggatatagatactatatcctatttgttgatgactacacaaaatacagttggatttatccaatgaaaaccaaagctgatgcctacaacatcttccttacctacaaaacacttgtcgaaaattaacttgacaccaagctgaaatgtctccaaacagactggggggtgagtatcgaaagttacagcctcttttacaaagcttacggatccattttagacatccttgccctcaccatcaccaacaacagggtagggtagaaagaaagcatcggcatgtcactgaaatgggacttaccatgcttgctcaagcctcaatgcccctgaaattctggtgggaagcctttgtctctgctgtttttcttattaatcgacttcctaccattgtcaacaactacaagtcaccatttgagagtctctttcacacaactcttgactatacctttctcaaatcctttggttgtgcgtgttttccctttctaagaccatacaatagtcacaagtttcaattcaagactgccaagtgtatctttcttggatacagcccatttcacaaaggttataggtgtttacaccctacaggccgcatatacatttcaagaagtgtcaacttcaatgaaaatgagtttccctatactactatttttccctcccaatcatcagtcacctccaccattcacaacaacctcttagcacctgcctttgtcatcccagtatccactcaaaccatccctgccacacctgtccagtttggctctatagacagctctgcagcctcctctcatatgtcgttacccacttctcaaccatcttctagtcccaccagttcccaaactcttcccctaccaaacacattgtccaccactactggtgatccaaccaaagtcaccacaccagctgttgaaatgccacatgccctccacccattccccaaggtcaccacatgcaaacaaggtcaaaatcagggatatataaaccaaaagtctaccttgttactgcctcccaaaacccagactttgccattccgaaaactgttaaacaggccttacaatctcctaagtggagaccagctatggatcacgagttttatgccttaaaacggaagaaaacttggacccttgttcttcctacacctgacatgaatattctcactaataaatgggtttatcgggtaaaatttaacaaagatggcagtgtgcagaaactcaaggcacagcttgtcgctcggggttttcaacaaaatcctggtttggattttaaagacaccttcagtccagtcatcaagccgtgcacaataagagtgatgtttgctttagctgttacctttggttgggaaatacaacaaattgatgtaaacaacacctttctcaatggcgatttgcaggaggatgtctatatgatgcaaccggttggctatgaggatgagacaaagccaaattatgtttgcaaacttcacaaatcactttatggactaaggcaggcaccccgtgcatggtttgaaaaactaaagcttgctttagttaattggggttttcaacagtctctctcagacacttctctgttttatactcagaaaaatggctctgctctcttggttttggtctatgttgatgatctcctaataactggaggaagcaccactgccatcacagatctcatcaaagacttacatacaaatttctccctcaaatctcttggaccagtcagttatttccttagatttgaggcataaatgcatctggcttatatctcacacagtccaagtatgccttggatttacttgataaaattggttttgatgatgccaaaccatgtgacactcccatgatattatccaacaaacttgcaacacttgatagttttccttttgaccaacccgaactatatcgcagcaccataggtgccctccagtacctaacatttaccagaccagacctggcttactgtgttaataaactcagtcagtatttacaagcccccacagtgaatcaatggaatgcttgtaagagagttctcaagtacatcaaaggcaccccacatcttggcctgcactttaaaccagttgctgttcttgatcttcaagctttttctgatgccgattgggcatccagtttagatgacagaaaatctacgagtgggttctgcatgtttttaggcaacaatctggtcaattggagttcacgaaaacagagggcagtagctcgatcaagcaccgaatctgagtatagggctcttgcttcagctgcaactgaattagtttggatcagctccttgctcaaggaactcaacatcaaattacacaagaatccaccagtgctgtggtgcgacaatcaaagtgcccaagctcttgctcaaaatcctgtgtttcactcccgtaccaagcacatagaactggatgttcattatatccgagatcaaatagcagctgccaaactcgaagtgtgctacattcctactgcagaccaaactgctgacattttcaccaaacctttatcttccccacggttccagtttccttgtaacaagctacacttagaacacactaagtatagcttgaggggggatgttagtgaatagttacaactgtattgggtagttataagttagttaattgctcaacttctttatcttcttgtaacaactttctgttgtaaccttattgtattcatcatatataaataacactcatatgaggtttagcagtatcagctaactcacttttcacatctcatctttccaacttaaaaaatagaaattgagtaatctgcattaagaagtaaaagagagattagttgatgatcataaatgtcctaattaaattctcattgctatttcttaaatctttattgttattttattattttctttgctaaaaattctaaaaaaattatttaatcaaatagaaataaaagattggttcactgataattgataatcagtcattgtgggacgatatttttactatgatttattataaattgtgattgtgagcacttgaatagctattaaattttgcaacaacaactctttcgactatcattttgatctttgtgaggagttttgggaaaggttttcgaagttgaagagaagcttcgaaagatggtaggagatggattgggaagttggtgggagtcttggtgggtgagttgagagaaagtgtggagttgggaaatcatgaaaatggattctagctaagtttttgaagggcttacctatttgtttgtatattataattttaggctacaactatagtagggtcactatttttaattttacagtaggacactcatgttttcgacatttgaataagttactaaaatcaatttattatttaaaatattttgcgatataaaaaagagtttaacattaagttgtactatactaaattgattttaaatattttcaaaaatgagtggagtgtttgctataattacacattattttaaaaaaagttgagttataacctcaaatgcaaacgtcctcacatatttaattttatcattttctaaacttaatgaaagcttaagtaaaatacttaattatttgactatttttttaaaaaaacaaaatttaaattttgattaacaaccatcacaaattgtattttttattggattaattattatttaagattgaattgtaaataaataaaccatagcatgtttcatatttatgatatatatatatagacatgtgtgaaaatgtactctctccctattttccacttaagcttaagtagaacctcaattgcctcctcttggagtatacatccacactggccttccattcaattgctgagttggccttgcatttacttcaaaaccctagaataaaagaaaatcaacaaaaacccattttaattatttgacttgtgcttaaaaaataaaatcacaatagtctaacaaatttaaatgttttttaatacaaaaaaacttaagtccaagaaaaatagagttttcaatccacatggcactacgtgaatagcaattttgcaagtttcatcacgtaccatgtggattgaaagtctcattttagtcagaagacctaacattatttttttaataagattttgtcagatcaataattagattatttcgttaaaattcaaagtacattcaaccgaatttagactataaggatgtattctcaatttcacaaaagcttacatcatggactgcattccttagtgcacaaacttgctcccttgaaactgttctaacctgtaaaataacactatgttcgtatttaaaagcgataagcaatgtaatttgtttcgttatttaaaatgtgaataatttattgtaaaattagtttaatgcactttgagttctaatgattaataacagttcgatcaactgaactattaatctaacatatagttataaaagtaaaacattacaaaaaatcttacttttnnncacaataaaacttgtgactaaaaaaagtaaaaaaattagactaattataaataataatttatatgttgtgactaaaaagtatatggctaaaggtattagtcacaaaaatcacaatttattttgactaaatatatttttagtcacaatacttattgaaactaaaattaaattagtgacaacttgtatctaaatactttttgttatgattaaatattatatttaatcacaaaaaaattatgtaataactaaaaggttgtcgctaaaaataatattttttgtagtgccaaacgaaacaaaatctactcgtaaaaaagattgtttaaaatttaaggaaagacctttctgaatatagtccaaatgactccctctgtgcatggagggattgtaagtgaaccaatgtatctgtaatactctttgcttccaaatttaatgatttctggattaataattcccaaatccttctcttcaagatctgtatccactgatttaatgtgctcaaacagctgccataaaagggtaccaaacattaataaattcatacattatatatatgtttatatatatatgagtttatgaccatttaaacctctaaactcattgccatcttttggtgttgctaaagctacatttcttgcaatgaaatcattcaaatattggtgagacttggctaagaagtaacgtttaattaaaggtggcaaaatgtatcatctgtcgtgtttgtgttataattatttaactcgtttctgtattatatcaggcgtgtcaacccattttcaatccacatctaatttttttaaccttaatcctacccgtaaaaaattatatcgtatttgtgttgactcactttaactgccaattttaatattattgaagttgtagttgtagaaagaaagat

SEQ ID NO: 36479 - DNA, 4086 bp, Cannabis sativa
agttcctggtaaaataacttccaacaaaacttatctctaacttttggtggggattaataggtagtaaggctaagactcattgtaaaaattagaattctctctgtgtgtctaagtttcatgggggtttagggtttcgatctttcgtttgtcataatcaagcccttcttgctaaataagcttggcgaattttcactaatcctaactctcctgtgtctagaattttaaaagcaaaatattttaagaataatgactttcttttggcctcaaaaggacatagcccatcgtactcttagagtagtattctttggggtcgtgatcttcttaaacaggggctcattcggaaaattggtaatggtaaatcagtctcaatccttcaaagctactggattcctggtttgaaaaccataagtttcagagataatatgcatccccctgaaagtatagtgtctttttttattaatgagtttggatgcttggatattagtaagcttaatacttactttttcaatgatattgttagggttattcttaccatttcaattgattttactctagaggactcactcatttggggcaatcattcttcgagaaatttaactgtcaactctgcctaccacctagccacaaactgaacttctcacacagcttcccttccttcaacttccaattcgctttatttttaaagatggtggaaaacagtttggaatcttcacatccctcccaaaattaagcactttatttggagggctttttaccatgttcttcctacttcttaaaacctgttcaataggaaagtccttaatagtccaaactgctctatttgttcgaattaaattgactcagttactcatgctcttctaggttgttccagagctatcaatatatggagatgaactagtttaggcaaattttatgatgataataaaattcttgatattaaaggctttcttttagcaggttttgaaaaattatctaaggaaaaacttggtttatgtttcaccattctttgggccatttggaatggaagaaatcaatctttgttttcaacaaaggtttatcctatttgcagatgtggaaaaatgtgtgcttgattatttgtaggagtacttaagaggacaagagatttctaacattgcaggtcctatttctcatcatttagtccagcagcctactcctcatcctgcaagtggaatgtatgttctcagtacagatgcagcgatcaataaagagggttcaatgatggggtttggggctgttgtccaagattgtagtggcaaggcagttgcgggtttttgttcaacaatgcctagtgttttttctccaattctggctgaggctcatgcacttcttgcagctcttcaatgatgtcaaatggtcaaatttcctttggattctattagatcagactgttcgcttttagttaataaaataaataacaaatgtaaggatagatcttctttttctgatgtgattacaatagtaatgatatctctatccttttttcctactgccaaggtttatcatgtaccaagagatagtaatgaattggctcatcatcttgctaagaaggctttaggaacaggtaaagattgagtctggaattgtaatgtttccagtttgaatgtctgctgagtttgtaactgaacttcttcatttattctattgttacaaatcaatttcttcaaaaaaggaaaaaaaaaacatttcctaaaaaaataataataatagagaatagtaaataaaaaatcaatccaacaaataatcctgatgtgtaaatcctataagctctaatttcaattacacctcttcgtagcaaaacacattacaagtgtgcctaaaggatctttacaacaaactctaacaatttttagcaacaataaatactcacagaataagaaagaaattacagctcaacattctttcacagccttacgaagaactgtttggagtaggatatctaatttaatttaatttttttctactcatttgaaaatcatcatccgatctgatccaattatacctcaaaatctaatctaatccaatcaaatcacggattgaatctgttttttaattggatatctaattacacacataatttttaatattaacttaaaagtatgaaaaaaaatacgtacaaatcaaatatcattatttatttaagtttaatactctataaaaatatcaatgttacaagtgtaatgcaactagaaatttaaaataagtaaaataacaacattaccaagtaataaaaatagaacaaaatatcatgacaaacaaatatacaaaacaactaaatgttacaaattcaaccacaacaaaaaaaaaatactaaaaatataattaaaatatatgtttttttattatacataaataaatataaataattgtttttaatgtataaatataattagatttgatcaatttttaattaaattttgagaatgacattcaataattgatccaatccaattagaattcaacttttaacatctaaaccaatccaattataattggatatctattttttttcttttttttttttgtaattggattggaatagattggttcgattcaattgaattagattggatgttacccaatcctaacctgaaagcattttttcatcttctacgagctgagagagaaagagagaaaagcttcttggagctcaatcataaacatgcacaaagaaagaaaaagaaaagaaatatattaagaaatcaagaaaaaaaaacagagagaaaacaaagagattatcaaccaaagttctgtggttgaaatctaatatcacacttgtaattacctgttgaatctagtggagaatcaagctactctaaggcgagcttgatgaagacgtagcccttgttttagattgaactcagagaccaaatctttgtatccaaatctattttgtttgttttctttaatcctgaatctcatcgatatgtgttgttgtgtgtgtatgatgatgttcttgagtttgtatgcaatttgatttctagattgtgagtgtgtgcaatctatgttgaaacccatgggttttctctcagagaagaagaagaagcttcgagagtgaatctcgaggagtctaaggtgttttactcaaactttagtattatatagatatatagatggatatttcaagaaacattagcaaaattattcaaggcttgtaattaattagctacgaagattaggagaggaattgtttgggatagtctatagtttttatttacaaaaatacacttgtaaagttttaaaattacaaaatataattttttcgaaaaaaaagtaggaaaataacgagaaattaattcacgagtcacgacaaatataaataaattataaaacaacaaaaaataatcagaaaaataattttatgacagctgtaattaggggtgttaataaaatactccatcaaatccaatccacacgaccaatatctgcacttgtgcggattaaatatgttgattgatatataaaagtaaccgatccaatccaattcacacatatttatatatatttaaaaaattatatatgtaattaatatttcaatgcaaaaaatagtaatttgagaatttaatacatatgatataaatatatttcaaaaattaatagattaaatttatgtttcattattatacatggggaaaatataatttaaaaccaaattaatcatttctttttacataattttttttttcttcctttgaatttgttattttatttgttttaatttgttgttggagacataaaaaaataataattggttttattttgttgttagttatgtgaaaaaaatattttttaataaatattaaataacttaatattaaaagtaacaaatttaaagtaatcgatcaaatccccacttttaaggattgaactattggacttgaactattgtgcggattggattgtatccaaaatatcaaatccgcacttagtgcgagcaaaatagtacagattagacccctaactacaatacaactataaataaattagggattatatcacaaattattagagttactcctacattgctagtgcgtgaaaataaattaccatgtataagatgaatgagct

SEQ ID NO: 36480 - DNA, 2122 bp, Cannabis sativa
gataacttgaactcaagcattccaaagatatcattgtcacaaaacaaaaaaaaatgatcaaatgttatattttatatacaccatggattgatacttgtaataactatgactgatgaataagttcacaaagcatattgtaaattggtaaagtgcaaagatatatttcacgattcttagaaagatggatatacagaaactacaaaagttttggccccagattaggaaagcaactaaacagtaagtcatatttgaacacgaacagacatcaggatcatctttttattataatgattgattgaacaatatatgtacatatataatgtacataatagttcatcagtaacaattgattgtatcactataaacatagttgatgttcatcatatagtaatagtgagaaaagaattgtcataccatatcaccaagacccagcatcatgaagtctgtggcatttcctccaggaattactccacccaacaagtttcttggaaagacaatcttcacaggcagctccagcttcttggtaatcatttgtagcccagggagacttaggctattagcaacagtgtgcacagggtttgatgcttgttgtgttgcaacagataccataacattcgctccgaaaaatctctcagagaagaatacccagaatatgtcgtatacaaacaaacaaacaaggagcatagcacaaattttgatgtttgggagacgaacgtggctcacaaaggcaatgcatatagatatgcccaacaaattgtttagtatccaatatccggagacaagccaagatgcaactgtaccacaacacagcaacaatagcagcccttgggtccttgtaaatgacttcgagcagcaccgtgacacataagggtcggccaaaccaaactttgactttaaaaaggctacataaggagagaaccagaaaaacagggatgaaatagaggcaatggctgtgaatgcagtgaggatttgtgagactgaagagaacaggtaaaacatcaataacaaactaatagagctcattactgggatcatgagtgcttgagaccgatctaatgtaattgatgcttctgaaaaatcacgattacgctccatttcttttccatagttaagagcgcgaaatgcagctccgaaagtcacagctactgcagtcacaattagtgtaattggagcgggctccagcaaatacaaaagcttccataaagactccatgatcaaatgaaaagataaaaaataatccctacacaaccttcttttttatatcctttctatctaaaagtcgtcttcatatgtttaatttagcaaggcatgatcaactaccacaaagtttgcaccaaagttgcactgtttcttcaacgagcagttgactagagaaactgcaacctacaaaagccacaggaacttgtgagagttaattagaattgtataggaacgtatagcgccaagtcagctgtaaagataaataaactacatggggtacaaaatgctacacacacaaacatgcatacatacacatttccataactgaaacagaaatgtaatgttttatgtaagcgtcaactccatcaaacaatctaaagaagaaaagccaacacagtgattgattagaataatctgtgctatatatggaaaatacaaaatgaaaaatgaaaccttttgaaactgtaattagctaatttgagattacattagataggttcagagcagcgaaagttttcgatttccatgataccctttaaagtaaaacactaaaactcactcttggatacttcaaagaagaaatgtttattccacaattcaaagaaacctattgaatgaagcaatcttccaaaagcagaaaaagttatacctcaataataaaaagacataaaaaaaaacttcactttctaaaggaaataatacataatatacaatttcgcaacaccaaaatgtgagatattaattttgttcattgaagagaaacgtaaaagaaatatatgaccattaaattatggaagagaaagatataggaatacaattgaatttctagttttcaaagcttcttttctatattcctctaacaaattagagagttcaaccgatctcaccaccgacgcattacccaattgagtttgctaaattc

SEQ ID NO: 36481 - DNA, 4295 bp, Cannabis sativa
agttggctcatttattgctattcacgaaaatctcacaatatgattctgctattttttactggccaactcaaaacaatgagaaatggatattcaaacacaaattatagtgctaaattgttttgttttgcgtcagaaaattatagtggtgtgtatggtcttttgctaactcgtgtaacatagcatagagtttacttgcactttaccgtcttgtacattacaattttcctattatgtgtatatacacaataatagaaaagtatacagatataatcaggaatttttgtgtgtacacttaaaattctctccaaaataagagcttgtactatagtatttcatagaagttgagagggaaggaaagtggataattattggcgtattagcgaaaaaaagaatagtgcaccataataactcatttatgaacatgtcaacgattggtaatggtaagtgatatgaaacctaatacttaattgaaccaatagataccactgccttttagcatttctcaaataaaaaagagtaaacacacaatgctcccattttacactgccttttagcatttctgtacaccaattttggttgctaacctctccacaaaaatagaatttcatacacaactaaaacaacaaactaaaaagaatattacacctaaactggagaaaaaaaatcaggatcaagggcaagtttcttctattcatgagatgttaacaagctttgcacggcctgagcttggatccacctccactttgagaccgagactcgaaatttcaggcgtatcaacagaaccttgaagctctagttcagccactgccctctggttttctgcattcccttctaacaagttccttacagaccaaatgccccattccctcaaaaatggattgtcttcatcagtaacacactgctgtaagagcaaaagaatcccattcttctgtctaatctcatcttgtacattccttcttttatatgaacaattgccaatcaccgcaacaacatctctacggaatcctttgtaaggacagggccttaatgagcgagaactggttcgtccctcttggttctctccctggttcatggccttcttgatcattgctggaggctcaagatttcggagcaggcttaaaagtaattcaacaagtccatacgatagtagtgtctcaacagcatccatcaggccttcctcggagtctctcggaccctctcgagcacatatatctctcagaattgttaatgagtacccaagaacatctatagagatggagcctgttggaagtcccgatttggttgttgagccagaactgataaccacaatagatgacttaaatatttcaagaacgcgcaaagcaaaatcatttgggacagtaatctcctctagtcgctcatttaatatctcagatataattctcaaaagaaatgcttgttctggtgagaaaatatctccaaccacattatcttcaactttggtattattgggaccaacaagagatgatacagaaaaaagtggaggggtatgaagttgctctaaatagattcttgagagaagcaacttcagccaatcttctccaaatccaactgagaaacaccagataaatagataaataaataccccaaaacaaaacaaaacaaagggatatccaagcacagcatgcataatatgaacaaaataaatgcattgaagtaaaaatgatagaatgtaacctgcagcagtagtccttataatttcccttacaatgggaaggccacatccactgcagagctctgtcagcagttcacgatttccatcgcagcaaacatagatgaccatgcacaatggatcacagacctccctgcctcgaatttttgcaagtgcaagaaactcgtctgggaataattggttccatatcaaccgctgatgctcttccccagccaaggaaacattagcaagaacttgcaaaccaattcggaagaacccataatcttcctcagaagacagcctcgctgacctaaagacattcaaaatagctccaacaccatttctctgaagaaatgaattttgatttgaaatctctccagcacaaagatttcttaaaagccttaaagacaataccagaaactgacgaccagaaggataaggaatggactgaatcagctgaatgaccatcgaaagaatatgcttggaacctagatctactcgaccatctgcagttctggaaatttctattagcaactctaaagatttctccatggaagaagagtttgaggcactgcataacgcctgaataacatcttctgctacacacagctctagcaatgaggtatcctccatttctgattaagcaattgaaagtggtaacaaacttgttcctttaaatgctaccgcgaggagtgtatgtttatctgcataagtggaaaagtagcaacaataaaattcagtgccaaaagaatggtgaagctaatagtaaaaaaacaaaatggttttaatcaattcctaaaacaataaatctgtaaatccagaagaaataacaaataataaaaaaaaaatacacatctattcacccaaaaaaaataaataaataaatatataccggggccgacggggcagaaagaggcgttagaaaagtggcgaacgaagtagcggtagttggatttgaaaggcggtaatgagaagtgctatgtaaaaaagaggaggatattagatgttttcagggttttggatacaaaaatttaaagaaaacaaaaagtatgggtttttcaattttggatttggatctaatttgttatatattatgcccaatatgcttttagttttgggctttgtaatttttgaaagagtgtttttagtaagctcgtcggatcaatgaaagcataaacggaaaagaagtgaactttccaggttctgggtttatggaaatatatcaatggaattagcaaacacctgagactgttttggacttttcactctatgcccgtgacaaggtaattgaactgacacctgtcttttatttctaatataatagtcgtattggtgatctgagagtggaatgtcctcttctatattggtttttttcttgtagcttttacataaaataaataatgttgaaaataaaaagaaccatttctacaccaaaatagaaactacattcttaccatcaaaaaactttaactatgtgaattccaatgaacaacccatgaatatgtatctctaaacagaacaatttaaacagtaaccagtacaagccacgttcatgttcaaattaatgtaacatcaaataaaattaactatgaaaaagtccaaatgatcttaactaaaattatattattagtatgtataaaacaattacaagaagtgatattttatctatcttgtattgcagcataacgactaactttatggaatctagcaatatcatttatccctatcttttatacattaacctgcacaaactaaaatcaatttctgtctagaaaacttggcaaagcagtaaataagaaaacttcacgaaacattatttgaacaaaattatatatagagatatatttaaacaatagatctccataacaaaataatgactaacttattaacaaaatttaagattaaacatgtggaagcaaacgattatagcttctaagagctgaatatatcatagaatgatcaaattgcgaaggtatataattaaattttgtaacgacatacggtatacatgctggtcttgcaataactgtggagcagcacagcaacttgatgaaagccttggaggttctcggcggcggtggcggcaaaagccaacggagaagtgggagaaaaagagtgacggagagagagagggagaagggagaggggctgagactgagagttctggagagagagagagagagagaatgaggggaaaacgaggcgagtggtaaaggtattcctcgcttagtgggctgggcttctatgggctgctagtctgctacaatagaagtaaagagatttttgtggaaactgcactctatactctttgttaatccattttatttttacccaattttttctatatatttaatttatattatatcccaattataccattatataatgaaaaaaaatcttcctcacctccctaaacagtactgtaagggtatagttggtgatagacttataaaaaaggatacatttcaattgaatttaaaataagactattttttattaactgatgaaaaaaaatggtatatttcaacttacctcgagatttttacacaaattggtacatttttagggtaagttgaaaaatatcacttttattaattaattaattaaatttacctctaattttata

SEQ ID NO: 36482 - DNA, 5258 bp, Cannabis sativa
taaattattccgaatttttcaaaattttgtaagacatcttaaataactataacgtacataaaaatgaaaaaaaaaattatactattttttttctaaatactgaaacaatgcaccaatacatcccttttaagagatgcattacggatcacccaatcatatatatatatatatttttgttgtatgagaagaggggggaaagccaatttgagcgcacgcctcttgtcctctatctatccatcccacgtgttcaaaacgagatacccgattcacgcgccaggagcgtgcagaaacgaagcaaaacacatttttcgtttgtaattaggctcccaaaagctcctaatctttattatatagtaagacctaattgccccattctcaccctcactcactcactcgcttttctctctcaccgtacccttctctcgtttccttcactctcctgtgatggactttgttgcagtgcttggcaccggggctcttgtggccttcggtctctactggttcgtatgggttctaggccccgccgaacaacaaggcaagcgcggtgtcaatctctccggcggatcgatctccgccgagaaggttcaagataactataagcagtactggtccttcttccgccgccctaaggagatcgaaactgccgagaaggttccagactttgtagatactttctacaatttagtaaccgacatttacgagtggggatggggccagtccttccatttctccccttccatacccggtaagtctcaccgtgatgccacgcgcattcacgaggagatggccgtcgatctcatcaacgtcaaaccaggggatcgaattctggacgttggatgcggggttgggggccccatgcgagccatcgccgcccactctcgtgccaatgtcgtaggcatcacgatcaacgaataccaggttaaacgcgcccgccagcacaacaagaaggctgggctcgattcgctctgtgaggtcgtttgcggcaacttcctccagatgccgttcccggacaacagcttcgaaggcgcctactcgatcgaagccacctgtcacgcgccgaagctggaggaggtatacgcagagatttttagggttttgaagcctggatctctctatgtgtcgtacgaatgggtaacgacagacaaatatgtaggagagaacgctgaacatgttgatatcattcaagggatcgagagaggtgacgccttgcctggtctgcggagctactccgatatagccgaaacggctcggaaagtgggggtcgagggggtgaaggagcaagatctggctaaaccacctgctcttccatggtggacacgtttgaagatgggtagattcgcttactggagaaaccacgttctcgtgactgtgcttgccgccgtgggaatcgctccaaagggtaccgtcgatgtccacgagatgcttttcaagaccgccgattatctgaccaggggtggagataccggaatattctctccgatgcatatgattctctgcagaaagccagttaccgaatcataaagctcacaagtattcttgaggtaatacctcattcacttattttccatgttctaccctctatcactttagtctcttcctagttttttttttcttaatttattattttgttagtgctaatttattttccattttgtaattttgttttcgaattatttgaatctcatggttggataacttttgtgatgattaattaagcttaagagccataatatgttgttgtcttttcactttaatctcgaatgtcttgcgtttaaagatcaaatcacggatcatcaatcaaaatactaacggttgtgattgattgtaagggagttgattgatatagattagtagacataagggtgtgggggcacgtgactggaaggaatgaaatgaactgtgtttggtttggtttggtccttttggagtaacggtcccgccaaacatgtggttgtttgttttaagcctttgtttggtttctttctttagtcatttaatgtgtggactttgaggctgtgctgaacagtcaggccgacaaatgggccccagatcgtgttactaaaataaaatctttcaacctttctcatgcctttattcgtacctagaccattattatgccgtagcagttttgcattatcatagacctttattataatttatttattatgcgaatttaatgtctacagatatctacttaattcgattttcaacattctatttggcgtgagttcaaattttgagaatgggggaattcgtatttattagtcaccccattcatttattacttggttttcttattttttcgttctcttatttgatttccaactctatttttttttggtggggatgctcatgagttatgagtacttaatatggacgtaattacatacgtcaaggtgtcagattcagttatatatacagtaaaaaccttttaagataaatatttgtaatagacagttatgtagtttaattttcttaatggctgaattgaatcctaccgaacaacagtaaggtaataagttaccctttttgaattagtttaaactctaaaaatggagatgtgttttaccaataagtcaaacagttgtgtttttttttttttttataattattattatctggcttgtcattcaaccaaaaaaagcagatgggatctacagtacagggggttgtctcccatagtgttgcacctacgaagtgctcattagttcttgcacatctggcatgatcttctgtgaaaatattatctctagactcaataccattacaagtacttatgaattaaataatgacagtaagtaaacttggatttaagatctaaaatatatttcccgattgcagcaaggcctgccaggttttgttttttcttttttaaattaaaagcatccaccataataaacttttcaaattgtcgtactatctttagtcttcttgctcatgtcttattcgggaaatgatctttggtatcataaagccttgaacttacctttgacactctgagcacagacgtttacaatgcttccccagggtgtcaagaaagccagcaacatatgttaaaaacctcattcgttgccctctctcatcaccatcttttccataccatatttgctttggacaatctagaaacacatgagaaactgtatctactacccttgcaaatactgtttatatctagcccaaggctggcaaatggcaaggctcctgagattgatctccaatctccaaagcatcattgctcaatctaggatgaaattccttgctctagacaaccttccacaaaactgctactctgttcaactctgtagcacctttaactcaaaatttaattaacattggtttgttccactaataatcattattgataccatgtacatccttttccaaattgggggctctatcatggattgcctcaggaggatacttcaactatggaatcccttgttgagaccaaatatcaacccatttcttggttccttgttgatgggaaaatctattgcaatctaatattttttatctatttgtatgtcaaaaatgagatttttgtgaaacaccactcttaacaatattaaataaaaaatttacactggaaactcattgctcgaaaacaccatgggattgtgtcttcttaattcatccactatttaaaatttcaaaaaatgagattataaagttctcaaattaattttggatcaacaatacaatattcatcatctataaaaacggatacatcatctatacaatacaatatgtttatgcaagttattaacactgtgttcctctaattttgggatcccacattgataaagtatgtgatttgttagtagaatataatatttgggcacccgtttgtgttattttttcatgtttgtgttgatatggcgaacataattacttaattggtcatacaatatgatatcacatttaaaaagaaaaatttatataatagattatttttttaaaataattacataataaatcaacacggaaatttatttatttttatgctttgaatttttttatttacaaaaatatttttttagtaacaataataaattgtttttttctttgttattttatagtttatttatggttttcttgtggttgttttcttgattgttttttattgttttatgttacagtttatttatagttgtcgtgaagttgatttctcattattttttagttgttttcttattttttgctcagtaaagtgtatttttataattttaaaattttataagcgtattttttaaataaaatttttaggccgtagaattgtaaataaaacattaaaaatagatatttttaaatattttcctttaattaacgtatcatgacacaaattcgaaattaatacgtttaacacacgattaaacatgacacgaatttgacacgattaatataattatgtatttgaacataaatattacttataaaatttttaattttaatttattattatatttttgataaaaaaaaaatagaagaaaaggtttttatgaggtttttttttctgagttttttattttattttatataatataaaaatttaaaattacttatataaacttatacgtattataattgtgctatttttgaattaagcgtgttgacccaaaatgacatgtttaataaccgtgttaaatatgttgacccaattttgatacgaaacttagatgtgtgacacaaatttatttattttttatcatttttgagttatgtcgtcgtgtcatgttaagaattgccagtcctaattctacttaagtggttgtatcaagtggtattaaaatcacacaccttcacgatcaacatcgtgagaggggcgaccgatgatgtacagttttttctcagtaaaataccttacttgagaataatctggtttaacaaaaaaatggaaaaaagaaaaagaaaggaaaaaaaataaaataaaataaaaacagaattttttttttggatatattagttttgctggctacatgctacccaacattttgtaaacgatgtgaatattttgtttataaattgtatgtaccgcactacttctgctagctccttcatatatgatcatgggaaataaagtgtgtgaagttggattatatgggcttctcaaactcttactagtatacgcattttgggcccagtcatgtggcccatgttgagaaatgaaaaatgggtctggacataaagctgaggataagttaaggaatgggctgacatgcataatgactttaaatttaaaaattaagttaataaatgtc

SEQ ID NO: 36483 - DNA, 5674 bp, Cannabis sativa
agtgatactccctaaaagctattatattaaattatatgggactcaatacttagttagacaaatagcgatattgatgcataggaggatgctatgcactgataccttttaatatttttcttttttaaaatataaaagtatttttagaagaaaaaatattaaaaatcatatttttaattgagttgtatattaaaagagcaagtttatgggaaatatagtacatagtaacggtgtcgttttgataattttggtcaatgaaagaaaatgcaaattgttagtcccaccctttatagttgagacttgagactagagagagaaagaacccaacgagggtagagagagagagagagatgagcgcactgtggagtagcggcggatacgtagctcggagagcagctcagaaggagagggttcggatcctctaccggagagccctcaaagatactctcaactgggctgttcatcgccaccttttttaccaagatgtaaccccactcctctccttttctatttttttaaaaaatctttacttcgatcctttcaatttctcgtttgatttttgtttcttttaatattatgtgctttcaggcttcagagctccgtgaaaggttcgaggccaacaagaatgtggttagttttcccttttccctcgtttaatttctgattttgggttgcattgtttatatatatatatatctatatatatatttgtgaaatgaatccaaattggatttttgaaatctgggtaatgaggcatttgaatttgggggaaattttattgccgtgttgcagcttatcaaaatttaaatcatcagacgaaactgaaaggcatacctaaacctattttccttttcagtctgtttgattttggtttgaaaatctcaagaaaactttctattttataaattgctgccaaaagtttttgcattttttatagggaaattttatgctattcacagtttaacatgttattcaaaccttcctacactaaattttctatatgtggacaaagattgttgatgcggtgattttgattggttgctagacattaatatttttctcatccaactttagttgggataggcaaaacatctgaaaatatcggttctatgatttagattattaagaataagatgctgctacttgttctcctgtattcaaaatatagattaaagaacatgttgtctttcattctttattcattgagttaacaaattcatgtatgatggtggtgacaatgagagaaatacttgagtgatggtaataatggtatgcatctgtaattagtcaattgagatatgtgctaatgattgtattcttttattgtttctttgttagtctgtttgctgaatgaatctgtgtcactttatttacaggaagatcctgacacaattgatagacttatagctgatggggaggcatcttataataagtggagacaccctgatccttatattggtaagacttgtaatagaatttaagcaattttaggcctttattttgcacagatttggatttgaattgtcactgagatttgggttataatttataaagttgtctcatgattggaagtcggcagcattttcttttgactatcacagttattattttagttcataatgaccctttgtgtattaccttccatttcccacccgcatatgtatacagtatacccaacacaaagagtcctatttaaaattagaccaactctgcctgcaatacaaacaagtacttgatatgcttgggttctttataagttatgaaaagaaaaactagttggaaattttattattattcttatttgaaggacaagagaatcttaaaacagttgttcatttctttgagctcatacaagattagaacctcggtggttgtagttggtagtactatttctatgaatgtcatggtgcaacaaaattaacttcagaacgcgttacttcattaaacttcttcacatttgtagtgcttgacttgtgtttttctcatatatatatcctacactgttacattttcactttattaatatttatttatgaacctccttcagccattttctttcatacggaaaggtagggttcctccggaagtgaaaatatttaattagttgctttccctggggatttggaatacatgttgggatgcaaaacataaatggccaaagtgttttagcttcgagttggtgtgttaaccaattccaattgtatttacactgcgcatttgcgagaagactttggtgcaaattgttaaatgaattaaatatctgttttctgtttcttaaatgctgtgttgttatgatccagagggactcactgcactaatactaatggtagaagctccaagtagagcttgtttagcagtctactggtctttgtggttggaaagaaatagaataattttttaggaaaagcaagaagatgttgagttttgtggaatagcattatatattttatggctttaaggcagttgatatcaacgagttttacaatgtactgctgtcaaattttttgacggacttgagccatttcttgtgaagtattctgagttcaggccagggaactcttgtccctaaatgttgttcttcattgaattcttctttctgtttctcattacatgtgtgtgtatatatttatacatgtacgcctagaacatcgctatactagcgagttttcaatgctttgtaataatatcaatgtgttcctttgcccgctcctattcatgttcgtgcttttgttccatactcatgatgtcaattatttactactctttgcagtaccttgggctcctggtggcagtaagtttactcgaaacccaactccaccttcaggggtaagatattttttataattcattatttgtcattttcattcacaacatatgcttttcaaaatttactatctttgcatgtcaacatttgatgctgggttaacctcaagaggtgatcttgtggtaaggagtgtaggaaaattctggtaggcatctgtccaagtttgaatcccatagtctcaaaaaaccttggggccactgggaggtctcccagttgaactactacggccaaaacttataaaaaacaataaaaataacgttattttcttcacaaaaaggcatagttagatgaaaatgtttaaaaagcttggcatctctctctctctctctctcacgtggatagacttgttcagtatagagaaatcttctggaaaagagaatggtgttttcaatttttaaaagacttttagtaataattgaatacacaataattttattggcctatcttctatttcccatgatggatttacaatgttatgctatttattttggttcctggatttgaattagcattttggtttgtttatttcaataattcaaacttgttctggtacacattttgtcgatgcagattgagatagtatacaactatgggaaagaagacaatgactaaattttgctagtggtccatcaaaaataaataaaggtgagccacttatggatatctggttggttatctgaaccacttttccataacacttttaatgggcattcaaatggctgttaattaagagtagaatgaatatgtaaaataaataagagcttcaaaagaagcttagcttatgacttgtcttttgatgtttatcctaaaattgttttgtgatgtagattatgatgaccagtggcaactgattttgaagataatgttggagccagcatttttgatgtgtttgtgaacaaattgttgctttgaaaagactctcaaaagtgctgagatacttagttgttgttattatttatttcggtacatctgttgaatggttttgttacagaaacaaatttgactgtgctgcaaagttggttgaattaaccattgatgctttttaagctcttactttgtttgtttccatataaataaattgctttccttttctttcctttttgggctaaaaattttcacatttgccttaattcattggaaaaagccccatataccataaagatggactcacaacagcctcaattttaaaatagcagatgaaggttgaagttatttatggatgtaacttacaagtaaaaatatcactattgtgcatttatcgatgagaatgtttacatttaatatccgtcttatacattttaatttaatgtattgttgttggcatgaatagtgagcaaatccaacacaattgaaatctctttttgagataaataagcttgcaaagcaaatgtgcaagaaggatagagtgatcagaaaaattgcagttttgtgaaggttcatttcaaatatgtatgattgcatcaagaggagctcgaataaactttggggagcagagcaagttgaagctctggattaaattaagagctatctgagattgccgtcagttctatatgctcgcaggtcgcatgaagagttgttcatgtacttagcagttagtgacatagtggttagtgttgtgcttttcagagaagaagaacaaaaatagatatcggtattttacgttagtaagatgttgttagaaccagaggctcgatataccacaatggagaagttggcacttgccctgatcaccgccaaaaagaagctcaaactatatactgaaacccatccaataacagttctgataaactatcccttaaggaaaattttgaacaagccagatttatttggaagaatggccaaattggcaatagaacttgaagtgtatgatatatcatatctcccgaaaaaaattcctcaataaagactactcattgcgtaagtttttcgtcaccttggatttgtgtagcttcaaaatttgatacgggcatcgtactaaagattttgagtccaataattcataacctgaaataccaagggtcggttgtatgaagacatcctatgaaaagtgtagcaagtaatcaagtagtatgtctcacactgatcaagctcttgtgaaaaggacaaattcaagtcgtggtaggagtaagtcaagaggaaaatctaatgatagaagagacaatcgtgctcactcatgttcatggaaggaattcgagtgctactcttataaaaaaagaacatttaaggggaattgtgaggaactggccaagtaccttgaagtaatgaggaattaagaatacaaatgcacatcagattctactagtgttgttggtaaaagttttgaaagtgacattgatgttttgtttgtcatagcggatgaaaatgtttctaactcttggatttggcttttggttgttcgttccacatgtgtccatataaggagtgttttgatccttatacggaatatgatggttgtactgttttgatgggcagtgattttagctctaaagttaatagaataggaactattaatgtgaagatgtttaatgtattatgagaacactgactgatgtaagacatgttccaactttaaggaggagcttgatttcattgggagctttggatacttgtggctacgactgttttgcaaaagatagtgaaataattatataaaaaaaaaggtggcttagtagtcgtgaagggtaataaagagtgaaatttgtataacttagtcagtaagactattttaggtggagctgagaacgtgaagtcaagtcacaaaaaatatttagtaagagtgaaggaatgcaacaaggggagaagactcaaattccagttagagattgtttgaagaaaaaagacattggtgaaaga

SEQ ID NO: 36484 - DNA, 4505 bp, Cannabis sativa
agtgaaaagaacagtccacgtcaatttctttcatctgtttttttaattaattgataattatgagcatgagctctacgtgtatctttctattatgtttagcccaacaaaacctttcttcttttctatttttgtattctagtaaatgtagaagagtgaaattctatatattatactaaaaatttaagcgaaagttgagcaggtttgtttgtgtgtgtttttctttaatgtatgttattactattatgtaaatgagatttcttaactttgtggttgtgttgtgtcatcaactctctttccttcaatctttaacaagcagacagaagaccccattgtttctttctctgcaaaatatattttcttcccagacaaacacaaaacattttaaacattcacatattattatatcaaaattctgtattattcctcccacacacccattagggggccctccctccatttttcaactttctatcagcttaaattattccatttctaatcgtaatacaatacatatagctgttcagccccatttcccatactctctctctcgaaagattctctcctaccattcacgcaaagcagctttcactttcttttttgctttctttttctctctctctctctctctttctttttgggtttctgtgttctcgttttttttcattcattgagatctgcttcaaaatgggcttcactgactccatgggagagcctcccaatgcttcaatcgatcccggttcttcttcttctacctcttcctctttctttgaatcaaaagaccattactgtgactacaatgagctgaaaatcaagtccattttgaagaagatggcgtgggaactcgctggtttggcttgctttcttccatctcgccgccggcgaatctccggcaacaacgatgagactgaagagaagaagaaagacaagaatttggaacacaataaggcttggctgctagcggagtccggtggttgtgttggtgcagagcttacgaatgctgacccacattcggttcactcgtctttcaggttcagcttctgctctcaggtcgagctcgattccatgaacatgagttcgtctattgctgcaactgttctaatggtgaatttggataatgggctttgtgaatctcgagcgaaagagctcaaatggcggagaattgagtctcttgagaggagtatatctccggtggccaataccttgatcagattcagctacggggaaatcctcacggctactcgatgtttctccaaaggtatttttatgggtttgttttagtttttcatatcgatttagtctctctgatgaattcttaatggggattcggtgttgtgtttgtttaggtagagttttgggtagaggggctttgagctatgtgtttagaggaagagttgggctattgaggacttctgtggcaattaagagattggacaaggaagataaagaatcttcaaaggcattttgtcgagaattgatgattgctagctctctacatcacccaaacgttgttccccttgttgggttttgtatagatccagaggaaggtttgtttttggtatataagtatgtctccggtggaagcttggagtgccacttgcacggtaagctcttttgagtcctttttaatggagtttcattcgaattttatgtcgtttttcaagtgacttatggtgtgaaaatatgcagaaaagaaaaggggaatcaagggctctacaacactttcttggtctgtaagatataaggttgccactgggattgctcagtcagtagcttacttacataatggaactgaaagatgtgttgtccatagagatattaaaccctcaaatattctactttcttccagaaaaacacctaaggtaaaaaggtctttgttttccctctggtttcaattgctccttcacctgactcaatctgtatagtactcttattgatgaattacatctttgtaatggcagttgtgtgattttggactagcaacatggacttctgctccttcagtcccttttctctgcaaaactgtcaaaggaacatttgggtatgatttcattacatttttttttaaactctgttttgttggtttttttcttttttacaaagttcatgttctcttttgtttgtgcaattaacttgaaaataaaatgtgcaggtacttggctcccgagtatttccaacatgggaaggtatcagacagaaccgatgtttatgctcttggtgtagtcttgctggagttgataactggccgaaagcctattgaagcaagaaggccaccaggggaggagaacttggtcctatgggtaggttattctacttttcattaattgttttctttaagcttcttgtgtttgaacaataatcacttatctagctgctgaattagaaatattcatttttttttctaatggagtagttgcttttttttttttttttgggtataatttttccactcaaaacgttattttattagttaagtctggtcacccactcatttgataaacaattcttagcaagaccatacttttcgtgtctagtgagaagtaatgtgtaaatgactatgttgctgcatctttcatcttggcatattaggttataggtggtaagtaattagtcccacgagtccatgactgcattgtgtggttgttggtgtctaatgaaatgctagttggtgttccatcctggtctcgatatagtatgtttaagtagacaagttcaaataactgtcttatcaagtggagaaaatcaattttgtgtgattcaagctatttttttttattattttttagtttgtgatgggttttcttataagattgtattaacgttgagagagagttgtactgttgttgagataaggataagtctacctaattcccaaacttacaactaacttatgcttaactatactgatcctaaaacttgagtttgtctagaactgaaagatatgagggtgtgtcgcctcaattttcataattattctttcatacactatttctctgttggctctaatactagagattagggagtcacaacagaggtgggagggaaccaataatttcattagaaccccttatgtttcaccctagttcatttgtttatcctcacttgctatttgaacttctgaatatgatatgccatctttatgctgctagcaatgatttggtcagcaaagaaagaaaaaaaaaaagagcaatgatttggtaaacaagtccattgtattgctgctttagccattaatgacttttctgcatttagagttcgaaggtggtggcagcatttttttttagaaaatattttcattccccaaatgtagttttgcaacatctatgacgaggactagtgttggtaaaactaaatgtctgattgttcatattctaggcaaaaccactcttgtgtaaaggaaaaggagccattggagagttgttggatccaagggtcaaatgcacgttgaaaaattcgaatcaagtagcccgaatgattgaggccgccgctgcctgtgtaactagtgaagaatcgcgcaggccagccattggtgagattattgcaattttgaaaggcgaggaacaaccctttatatctaagaggaagaagtctggatttctgggtaatggatgcgttattgattgttactctcaatcacaacaaacaaatagcgagatgaggagtcatttagctttggccatgttaggtgtttccgagtttgaggaagacgatcacctttgctgtcgttgaaacaagaaacaaactgtcaaaacaacctgattttccccctcttggtttgctcattgtttggtgctgaaggagtgttagaaattagaagctttaaaattgtaaatagaacaataggtttgtgcttgtatatactcatttttacctgctcctgttgtcattgggaagtagtgtaatagaattttcatgggagtggagagttcatagttcctgttttattatggtaggaactcatcattttctgtaatctttaattctctttgtactgtaactttctagtgtgataatttccaaagataaaaaataatcctatcccattgaagtgtgaacttttcctgtgatcccaaacttttctcagtatcatagacatataatcatattatatttgaggtatttttttatttttaactagaaatcagtatttaaaaattgtttgaaaaagaatctaatatgactccaagagacaaaattcaactggattttatcagaggaaaatcatttcaatatttgtagctgtgacttctagcctgtcaccaccacgaaaagcacaactcaatatgacagcatcgtaactcagagcaactatcagggtcgattattatttatttattttaaattaatggtgggtttggtgggaaagtcaaggggaaagaaggacattattggatgtattatccacaattcagtcactcttttgtcctgctactttataacacagatatagtggaatcaaatataaacttggtattgtttcaaaaaaaaaatataaacttggtattgtt

SEQ ID NO: 36485 - DNA, 4050 bp, Cannabis sativa
aaagaaaagaaaagaaaaatcttatcataagcaagactgtaaactggataaaaaaattagtgatactttactcatgtaacaaattgctaattgttatcagaactttggtgtattatgggagggatttcaaaaacatgcatgaatgcaacatacttcaaatttaaaatatgagaaacaaatcagcatctcagtcaagcatgctatcaaattttcttcccctttaaacgagaaacataaatcttttataacaagagaatgaaaaatacaattgaagacttttatttggtagttttgtcaagaacttgcaagggtgtgttgcctcacctcactaactcgcaagtgtgcatttcaaattacatggatgagactttcttagagagactaaaacttaaacttgattgcttttatattaattgacattatatgagaaacaaaattaggaaccttttgtatacggtctagtgcaccaccagtaacaaaagtctcattcccattgtcatcaactgtcacagctaagagtttctccaatgtcacacctgctgcaaatgggtgtccaggattgctagagaatagaaaagttagattcaggcagaaaataaaaaggcagagattccaatgtaaaaattaacttgcttgtacacacctttcactgtcttcgtatctgatatgaatatttgaaattgagagtttcaaattcccaactatagtgctgattagggaacccaaccatgattgattcttcaaataaaaatatatacaaatacagttataatcataattgacaatcaaatatatatataagcgtatgtatggttcaaaaagatcaaaaaggtaaatccttgaaaagagtaacatcacagtatttgaacaaaaattgataacactagatttactagcacataagtacataagaaccaaatattacacttcatatgaacgcacagacacatatgaatatagcatcacataatatttccttacccataaaaaaactactattgcctagcaattatttttttcactcgtttctttgtaaagagtcaagtaaagatatcagatgtatggatgctgagctatgccattgtctgtatcagcactcagtaagaacatttgctatgaaccatctagtcaaagatacactctattatagtagaagttacactgataaaagaattgtgtaatcttaccacttcagactttaactgctgagccttctctaccagcttgatctccatttcctatttccaagcataacaaatatttaaagaatcattcaaagttatatcagtaggcacatcaattattgtcttacccgcactcggcttttcttggcttcttgaatggcatcctcagtggacccttcaacttgcgttgctggttcaactaacaaaaaaatacgatccagatgaactacaactgggtcttgaccaagcctactccaaggtaccttaatttgggaatatcataaacagtatcattagttaaatgtaaatagtacccagtatcacaaaaaatgtcattcaaacagctaacagcaagaaaattatatcaactttttaaaacttaatagtacttttataaatcactgcaaagaaactaattttgtcttatttttattatttctttttattagaaatgaaacaaatatatgcaatacgaggaaaaaaaaaacaaaagggggaggaaaacaaaactctcgcctcttgaatcctagaaaaactaggagatccccgcctaacaataaaatctcttataaaaatcagagaaagaagaaaggctggatatttttattatttatatgaaacaaaaacctttattgaaagggagggaaagaaaagctacatacaagaggataaggtatcatcatacataaacgcataattgtagctacaaattgaagttctcatagcatgaagtaagcttccatgaactaagataagtagcccgaacggccacaccagtgtcctaaccaaattattgtctgaaactcccaaatttacacttaatgatgttgtgacagtgctacaaagaatatggttcattcaagaatatccacaagcattttcaaaacatgagacttatttgaaaaaaaatatatatatatatatatagattttgcgaattatttgacttaaaaagaaaaagaaagaaaggaactgggtgtggcttctctagggggaaaagttcaaattatagtatttctttggccttcagtggcaaagtaattcatggatttccttctttgcttgatcattcttgaaaggaaaattgcatgatttagctagagtttcttcttggttttgctcttaatgtttgattttttatttatgtgtactttatgatgataacttatcatctttttgtaaaacctttattaacctttttccaatcaataaatataatatacttagctacatttctctttaaatacaaatattaatataatatacatatatacatatatcattaaccttacattaatcctaagacaatacaaacttacatttataaaaacaacatataggacttgtagcatacactatacagaagattgtcagaaatgtcacttaagatagtacacaaaatgaagtcaaatttctaaatcattaatccccaaagccagttcaaaaaaaatccacaagcatctttactaaaccaacataccttaagtttcacagagccaagaaatccagccttaaccttcacaggcaatttcaatgcattaagtgcctccggtttcaactgcatatttgttagttccacatctcctgtattacaaatttagcagtaagtcatttacatttaactctcaattctaagttacctacaaacaatgcaataataaaactagaaaaagaaactgataagtgtagacttcgaagtattaagacaaaactaaaaacaaaatcaatcaacttatcaaattctccaaaatgccaatatcaataaactcattcacagaaaattcctcagacatttccaaatgattaaagaaaaaaaaaactcgaattgacctcaatacacaaccaaaacgaaaaacatttcatttctaagtctacaaacccaggaaatgaataagaaaacgaaccttgccaaacactgatcttaagggcctccttgttgagtcccctgacgtagttgccaaggtacctctgcaagaggtaagccacctgatcctccaacatccttacttcttcacaggatcaacaactcattactcctccattcatccccaaaattcccaatttcaatttgagatagaaaaaagaagaagaagaaaaaaaaaaacggatattctattccagaagacgctactagtcccactcttttttctttcttcttcttcttttttttagcggcagaaagggtgggaatgcgagaccaccgtttaattatcgtggggacaatttctggaccaattaaatatcgccacatgtggatctaaatcacactaaattaaaaagtcaatgaaaagtaaagactgtagagtttagacagactgtttggtttgtcttataagtaatccccgtggagtattacgtagtagatatttttacgttagacgatgacgtggcgtattgagtattagatccctgtctgagtaatgtgtgaaattacgaaattgccattgtaatcttaacattaacactatggcggtggtttggtttgggtgggacttaactgaacttgaattgaaccacatcatagagtgaataaatttatttcattgtaaattgtaataagcttttcttttaaacaaaattaatcccaatttttaaatcctcacaagacaaaataataattttaatttctgaaatattctttaattaaaaagtagataatgattaaagaattaataataaattcgatgaaaattagacaaccttaaaccatgtaacgacaaaaaatatatatttatttcatttgaaagtattttggacattaatatttgaattggactaaaaaaaatttctgtatttggcaaaaaaatttaaagtatttaagataaataaatataaccccgattaattttaaatctagttttgtagc

SEQ ID NO: 36486 - DNA, 10535 bp, Cannabis sativa
cagccgcttcgaggtcgattccgacaccgcacgcggcggcgatcaagtcgaggagaagtttagggattgggggtttccagaaggctcttgacggtgttgaattgggttccactaatggtactggtgttgctgcggattctgagactgttgtttctgatgagttgggttccaattcgactggtgacttaaatgtgactggttcggaaattagtagtttagattcaaagttagtggaagttaataacattgatgatgatgagaagactgatgaaacttcaaaaagaggtgaagtttcggagatttcttttgtgggtgaagttcttcattgtgaagaaacagtgagcgatgatacaagggctggcggtgctggagaaggattgttgggttcaattatggaaaccgaggttaattctacttcagttaatgttgggaaggatattgagaattctgctgttgaccgtgttgaaagtagaaacttcggaactaattcttgtgatgaaaatgagcctggagtggatgagagttcaaaatttgtcggtgttagtgataatgatgaaaagggtagttcttgctgggatgttgctgataatagtggagaactcgcaatggagtcgacgactgaggaattagaaaagggagattcaataaacaatgtgccttatatgaaagataacagtgatgaggatcttgatggtgatgatgctagctcaacaagtgagattaaagaacttgtggaggagagaattggggaattggagagcaggggaatcagtcaaaaagcagaaaagaaatcacagccttgtaagaagccacttgaaatagccgaagagctcgagaagaaacacgcttctacaagtatgcattgggtagaaggtgctgctgcccaaccaatgaggcttgagggtattcggagaggatccacaacattgggatactttgatgtgaatgccagcaataacattacacgggccatttcagctcaggcattaaggcgcgattatggttcaccgcaggtcttggctgttcatactaattacattgcagtaggaatgggaagaggggttattctagttgttcccagtaaatactctgcacataatgctgacgatatggaaaaaaaggttgcatttgcttatctctttgatgctctgtatttacttttttttgctttggttaactcttgaatttttttctttttttttgagatgtagtgttgggtgttttgaaacaaaactatggaagaatggacttttaaatacgttatacgtgataatttgttgccaacttctattttcaatatgcctcgtgtgtctattaaaaacaggcagtactgaaattttaacagtcactccaagatatatttggcttgaaatatgctttggcatataatcgttgcaatgccataaagttgttttctttcgaatttggtttgctctatgctctttatttctagtaaatcacaaagaacagtagtacttgacctttaacaattggtacacctgataagttaatttttcttcttcacggtgttgaacagcagcaatcgagttataatgttactatcctgctgtgttactcaaaaagctttttgtatttttaaaagattttacataaatgtctgatgttaaagttaatttgttgttctctcaagcagtaatttgttgtttcatttgtgaggttgcttataacattttatgtgccagatgttaatactagggttacaaggggaaagatcttattctgctgtaacttctttatgcttcaatcagcaaggggacattctcttagctggttactttgatggtcatattactttttgggatgtcctgaaggtatccgctgcgaaggtcatctctggtgaacatacagcaccagttgtacatgcattatttcttgggctggattctcaggctacacgtcaatttaaggcagtgactggtgatagtaagggtttggttttattacatgcctcgtcagcaatatctttgtttagtaggttcaatgtcaaaacacaggtaagttttttatacttaacctagaaattaatctgtgcacttagatttctttttatatgctagttgatgtacatattcacatataaatcctcagagtttgatctttgctatattgattgagctagtgtcttcttgatggacaaacaacgggaacagtgctatcagcttcaccactcttctttgatgaatcttttggaggcgcttcactgtcctctcagggaaatgcagtgggtcctgctagcagcatcggcagcatgatgggtggtgtagttggtggggatgcaggttggaaactctttaatgaaggctcttctatggtagaagaaggtgttgtcgtctttgtcacctatcaaactgctctggtggtatgaagctttcagatgattggatatattacgtgcatcttttcttcggtgaattcctgtatgcttctttgtgaatattcacagtataataatgctgaatctttgttgcaggtgagacttagtccaactttggaggtctattcacaactttctaggccagatggagctcgggaaggttccatgccttacactgcctggaaatgcacaaaacaaccatacagttcgtctactggtatgttctgactgaatgtgtttaattttagttgacagccttttaatatatatgtttgctgcagagaattcacctactgaagtttcagaaaaagtttcactgcttgcgattgcttgggatcgaaaggttctggtagcaaagctggttaagtcagagctaaaggtatatggcacgtggtctcttgaaagtgcagctataggcgtggcttggttggatgatcaggtacttgtaaattaagctcattctatcttttgtcatgtcgggattccgtctaattctatatgtgtttgaactctcttcatgtcttaagttctattcagtacaagtataactgagggttttgtgtctgtccagatgctagtggttctgactgtgactggacaactatgtttgtttgcaaacgatggaactgtaattcatcaaactagttttgctgtagatggttctctcgggaatgactttgtttgttaccatactcacttcatgaatatctttggaaatcctgaaaaatcttatcacaattgcttagccataaggggagcttctatctacatactcggcccatcacatctaattgtgtgccgccttctgccttggaaggaacgaattcaggttttacggaaagcaggtgattggatgggtgctttgaacatggcaatgacaatttatgatggtgaagcacatggtgttgttgaccttcctaggaccttggatgctgtacagaaggccattatgccttttctggtagagttgcttctttcatatgtagaagaagtattttcctatatttcagtggcattctgcaaccaaattgaaaagatggatctactggatgatcccagtagcataagtagttctgttcacaatgaaataaaagagcaatatacacgtgttggtggagttgcagttgaattctgtgtacatatcaagagaacagagatcctatttgatgaaattttctccaagtttgttgctgttcaacaaaaaggtattttagtacgctcttgcattaagttctttcataacaatggcgtagattaagttgaattctacatgtctgaattagtgattatgtcattagccgcaaaaatgcagtcattctgtgttagaatatgtagaggtaactctgctgtcacaaaaagttattagaaggtaggctcaatgtcaaataaaatgttctggcatatttctaattaaattgggatactctttatatgattctcattgaatcttaaatccagtactgcaacgacacatactccttcatttactggcctgtatagtctggaacatattcttcttcagtgcatgattcatatcattggagttttgttactagtaagcagtgtaactgagtcagtattccacgtgtttggtttaggaaaagaaaatgtcatttgttcgagtggtttttccttttagtataccaacctgctaattcattttttattaaaggagatgcagttcataacatgctactatatgcactgcattgttttatttgactgccaatgaatgtttcttatttgtctgatttcttttccaatatcactgtagacacatttttggagctgctggagccatatatattaagggacatgcttggttctctacctccagaggtatattatttcaagtattttggctattttacgacaagctatttgtttgtactatatttttattttttttttgatctttttccaagattatgcaagcactggtagaacattatagcagcaaagggtggttacagagagttgaacagtgcgtccttcacatggatatttcttcattggattttaaccaggtcaatacctttgagatctttgctgaaagttttcttatattgaatggagttgttctgttatatttaacaccttgacccaggaacttgtactttactttttttttataggttgtacggttatgtcgggagcatggactttatggtgcactgttttatctcttcaataaaggattgaaagatttcagggcacctttagaggagctttttgcggttttacaaaatactcacagggaagccaattctgcccttgggtatgttcttaacatcttcagtccttaaattgcttgtatgttttagattaaatttaccaataaaaaatgtgcttctgttccatcttttttattgatgtagttggatattatgataattttactggagccatttaatctgaagtgactagcaattatatatgatgtttttggcctcattttcttcttcttcttttttttttccattttttgtttcgatttttgtcaacaggtatcgaatgctagtttatctgaagtactgtttttcaggccttgcttttccgccaggtaggaccttgatgtattcctattagtggaagcataaagcatatttctatttgtatcttcttggagttaaagattctacaatgctgtggtgaaagattaatctcattattctctattgataattacattaaaaaaattctatgcaggacatggtaaccttcctccttcaggcttgcaatctgttagagaagaactgctgcaatttttgttggagtcatctgatactcgaaattcaagagttggtacaagattaacatctggagtgccatatctgaacctttatttcctcttagaaatggatatcgaagctaccctagatgtgctgagatgtgctttcgaagaagataaaattccacaacctgagctttctcctcataatatggctgatactggcatgaacacgaaggaagataacattttaacggaaagtcaaaatttattaatacagcgtacaatagatgttctcattccatttcttgaaaaaggcatttcacaggcagatagaacttctggtgatgatgaaggatcagcagaagagtggccgtcagcaaaagaaatatgtcatttgtttgagtttatagcacattatgttgcgtgtggaagagctaaagtctcaaaaagagtcctcgatcagattttggagtatttaacactagagaatctgcaatcaagtgcttcttcacatagcagaatctcaaaacaaagagagaggcaggtacttgcgcttctgaaggtagttccagagactgattgggatgcctctagtgtgctgcaactatgtgaaaaagcatgttttcaccaggtacgtttactcttttgaagtttgctagttggactgtagacttgcagtattggacaaaatcaactcacactatcaggcactattgccatcttaggtttgtggtctaattcataccatcaggcatcagtatctttctgctttggatagctacacgaaagatgtagatgagcccattcatgcattctcttttatcaacaaaatcttattagagctcgacggaaacgaccgtgacgctttccgatcaggcctcatttgtcgtattcctgagctaattaacttaaacaggtataatgcttaactcttaatcttaggtctatgttaccatttaaaatttttgtgctctctttctatcctgaacttacctctagcatttctgataatttcagggagggtactatcttcttggttattgaccatttgaatgatgaaggttcacatatattatctgaacttcgtgctcattcaaaaagcctttttctttatttgaaaacagtcatcgaaattcagttatctggcaccctgaactttgattatttgagaaatgatgacataacgagtatgaaggataaatctgaagaactgacagcttacttggaaagaatctctgattttcccaagattctgcgcagtaatcctgtacacgtgacagatgatatgattgaactatatcttgaggtgaacacacacattactatggttaaaaaaagcatggatttttttttatctatgtgtctactgtttccttattttttattaatagaatatgtttctatcatatggttgctttaataaggtacatggttgataactctaggactcatttcatcagcttcacagacaagaatttagtcaaacaatcatatttccattactatgggcatgtccctacacctcctgtattgttcaaatgattaacacatgtctgtttctttttcaaaaagaaaaaatgtttgggtagccaatttggttcttctatatatgcctatcattttgggaccacatattatggtgacaagttgatctaggatttacagattttttcgtggtgttatttttcttccactattttttttttttggcttgtaacttacagttggtgctacctttggttttaaagtttttatttatttatttgtttttttaattttttttttttttttttttttgcagttattgtgtcagtatgaacctgattcagttctcaagttcctagagacttttgatagctaccgcgtggatcattgtttacacctatgccaggaacatggaattatagatgctgcatcattcttattagaaagggttggtgatgctggcagtgctctattacttacactttccagccttgacaacaagtttgccaagcttgcagatgctatgggaagtggggctgctcgtaaacagcatttcagtactgtcaaaaaattgggagaggtctgttgatatgatattcagtgagagtatgtcattaagtttctctactggcaataacaattttatgtatgcttacattggtgttttgttttatatgtgatctctcacaggtgaaagaaatagaaaatatattgcgtgcctgtattggattgtgccaaaggaacacccctcgtttgaatcctgaagaagcagagatactatggttcagattactagactcgtaagttcactaccagtgtggaatcttctgttttgcttgtcaaattgaatatctttttctatatatctctcgtggcattctacaatttccacaagtacaggacgtttctatggtgaagaataaccataaatttcaatacagattttgtgagcctttgatgggttcatttggtgatggtggacttcttgaaggaggaaatcaaaatagaatattagctcagacatccgacgcagataattttgaagaggcgtccatcatcaattggagaattccaagatcccacaaaggtgctcatctcttgaaaaaattgttctctcagttcgttaaggagattgttgagggcatgataggatatgttcgacttccaaacatcatgtccaaacttctctctgataatggtagccaggaatttggtgactttaaactcacaatactgggaatgcttggaacatatggcttcgaaagaagaattctggtattttcacttctttttctttttccttatgtatattatgttctactgtgtctatttacctggattctgtgacatgcaacatgacttcttgtaattatcacatatttaagtcaatttgtcctttttttttaccctctgtttttatacacttctctcttataatttttcagtttgttttcttaatattatatactttgatgctatgcaggataccgccaaatccctgatagaagatgacacattctataccatgagcttactcaagaaaggagcatctcatgggtatgcccctcgtagtccaatttgctgtatatgcagtggtgttcttgccaagaacccttctagctcaagcattcgggttttcatttgcggtcatgctactcatgctcagtgtgagcttttggagaacggagcatctggtgctggttcctcatccggatgccctgtctgcatgcctaacaagaaatcactgaaatcaagaaataaatcagtccttgtagagaaaggtctagtaaagaagtcttcaacgagaccccaacaaacacacggaacaactgtttacccacacgaccatgatttgtcagactatgctaacgggcttcagcaagtctcacgggtatgaagtaatgtttagcttgttattgttactagtattgacatttctgttttatattcaaatttcgtgttactattcttgaatgaaatttcgtgttgggtgctgcagtttgagatgttgaacatgttacaaaaagagcaaagatttgttcaggtagagaatgtacctcagttgaggcttgccccaccagctgtatatcatgaaaaggtaaagaaaggaactgatattctaacaggagaaagtagcagtggtctgtcgagaacagaaaaacagaacagcagaagtaagccactaaaagatctaaaacttaaaggctcgtctcttagatttcccttgaaatcgaatatatttggtgagtttttgttcatagtgtgatctttttaactatgtgcttcatttattatgtcaataatcccttaaaagtaagtaaagtaacatttgtgatgttgatataggcaaggagaaaatcagcaagaggtgatgcattgtatagatatatactaacaagtaacgatacaattctgggttcggtctgggccttgggccgtccatgatgtcaaatagttgaggatcaattttcagtaaagcccatgttggcttgagggagatttttttttacacttaatttctgtatatatttatgtagaaatcttgcttgcatttttttccctgatttagagttgcctacagcctactgtatatgatcaagtaggaaattttgttaaaattatgaataaaaacaaataatttgacgtggaaaaaaagtgtgatttgttgtttcacttttcacctgtattttccgagccacttgttatattgtagattgtagttacaaaacgtaattaaagcatttaaatcttgttacgaaaaaaatcttattaccagtttgattgcgtcctcaaaatttggaggtgttcaataaatttctttcttaattgttatattttttgcaaaaaaaaaaatgtgaaaattaataatattaaaaattgcagttattaggaggggggtcaattcatatactatttattttattttatttttttaattttaacgatttgtgttgttcctagttattgtacaagttgccatatagatttaggttgttctgttggttactttgtatttcgtataaatgcaaaatatatatatattttgaaatataaaaataaaaaaaatccttttgaacatttttaacttatcttccattaagattagaaaaacagaaagaagttagttctagcttcgtcattttgattgggttaaacaaaaaggcttagtaaaaagaatgtcttatgtttttgtcttaggttttctctataatttttttccttgttgctaaatacgttgacttctgttattttgaggtcatatctaatattcagagtttgctacgatttggtactactctcacagctcgtactgaaacagtgctttaccctaagatgtccagtcaacttgtgtcagttttgggtacaggtacctttttattgaaggtcgttcgagctttccctgggagtatggcatgagttacttcagtgtcgtagcgccttggtactcgaatattggatcaaggcattttctctaccccttcttaccctgaaaaaaataggagcaccttgcgtcattcaaccaataaccatattttagctaacctagcgtgcttgcttactcgaacattggctcgaggcaaaagtaaaaagtagatattattcaaaaaggaaaaaaaaaaagtaaaactagatgtttaggagggaaaaaacagagtttcctttacaaagctcaagaaaaaagaaaaggaagcctaccatattgataagatacagacccactaacaaaaagaatattaacgctacatcttaagaataatagcctaaaaatctgtcaaaactaaataataaagacaaaaacaccaagtagctcaaaaaaagatcataattcaatttaaagttacaatagaagttatctcaaaccagatcaggaaaggtcgaagctcaaccaaaatcgatataaattctaactcgggtcgtact

SEQ ID NO: 36487 - DNA, 3766 bp, Cannabis sativa
tgtggtatacttggtaatttacttttttttttcgcaagcaccttacataagtaagatgttagagaactttttaatggctaactctaaaggaggatatttgacttccagacatagagtttatttatcttaggaacaatttcacttttccagaagataaatgccatgaaaagaattctttaagcatcaacagtaaaaggtcttatgtacattttagtgtgcactagaccagacaactactgttgagtgagagttatgagtaggaatcagtcttatccagtacaagaatactggaagacaattaaataaatcttaaaattaaaaaggacctatatgttagtctataagggtggttttttaaattcgtttaggctgcaccgacttagacttacatcaatgctagaaagactacatttaggatggtaattactctagaggtggagcaattattttggagaagtttaaaaactttatctggaatctctaactctactagttagaatgaatattaaagttgcctcaaatgttactagacaattatgaaagttctatacatactgacgttattctagacctggattaactactagtcttatttcatgataatacaaatgcaattgccaaacagtaaataatctagaaccctaagatgagtaaaaatatagataggaatttcacaaaagtatggattttgtgactaatgagaatgtaatagaggaaaattttgatattgaatacaacctattagatcctcttacaaagatcatactatatactacatttaatcaagacatcaagaagatgagattaattaaaatgcacttttagttttatattagtgcaagtgggagtctattggggttttatgctctaaataaaatttatttcaatataatcttatttactaatcataaaaggtcaaaaattatttgatgttgcttggttcacaatttactttcatgattatatatttaatatataaatccaattaaataccaaacatattgttactcatgattatagtactttctacataataaaaaataatcatgatcatattcttcaaactatttagtcccaaaaatttattagtatactgaattaatactgaagtaatgatcaacgatgtggtttgcttacacttggataagtgcaatgtcttttccagtgcattagcaaagtaaacttgtatcatatgtatcgtctatacattggactggaccgatatttattgtgaaaaagatatcataaacttactgttatatattttctaagtcaatgtcactaaggtgatcttagaccaattaatctcaatcctgagatgattaagctttagcttaattgtactctatgggttttttgacttgttcattaccagcttacctgtaggagtagcccatacttacatcttgagaactcggtagtgcaattgagtgagagcgttaatcatagatataaaatttatagttctatgactatctataagtgaaacgatagttttcttagagcttggctaaacgatataaatagaagagctcttattttagtatttatattactttactgaaatatcatttataaagagctaagtattttaaggataaaatacatcgaacgataataaggtaagtttgtccctactcaatgtaacttgtctatagaggatcattgattatttagattgacacaatagataattcatagtgtatctatattggatatatagagcgtattatgtaatcaatagtacaattctaaatctatagtggagacaggaggaattaataaactaggaaatttatttggtaaattttttatctgcttattgggagctttgttatagaggcccatggtccccatattatctgagacaatattgtcgtgtagactcaattaattgattttataagtcaattagaattcaaaaatagattgtgtcttatttgagaattttttactaagtttggataaatttgagaacaaaagaaaaataaaggtttatttattaattaagatattttgtgggtctaattaataaatatattttaaattttatttttgtttgataattattaaatgaaaattagtatttaaataattagattagataaatggtaaaattaaaaaagacaatttatttcatttgagcttaattgaaataaaaatgagaaaagtcaaagtccatgggtcatagtgtaattttgtcctgggcttttagtttaggtctattgtctttttcctagcacatttaatctaactcttatcttatgaagtgcctatataaggaatatatgattgctttgccaaataatctaagtcaagtgacttaaccctaagtccaactagaaaacctctctagatttttttccttaagaaatgtgaatttccatagtctttgtagaactaccgcgtgtagaagactgtgtagaactatcgtgtgtcgagtttaagaaagcaatacaggttcatcacttgacaataccttgctatagaaaaagaattgagggttagagtgattgaacggaaggagtcaataatttctgctacaaccaatgtgaagattctattcctttacgtgtttatttatcattttatgaattttatattttaggatgttaggttatagtgtatgttgcggataaaaaacctgatcaagatcatcataacaacatttcaaggacaacaatttcaatggcagcaaacatgtaatcaaaactagaaccaaagcttaagaaaattgaattttattaaagatgaatgaaactaaaaaaatgtcataacattgcattaaaatctgagagagaaataatacaacttgaaatcaccaatcatgagtacaagaattacaagcaaatctcacactgagagaagtcacttcaagagtgaacaatctccttttacagccctcaatccactcaagaactagctgaaaagatcagcaatgatcatggtgatttccctctatttctggtgtctctcctcactacagaatctctctcttaatcttggacactactaacttagactagtgcaggctgttgttctcttgctgtatcgatcgagttggggagaggaggtatttatatagttatgacagttggacaagtcattaaccataggttaagctgtcaaaaaagcaattaattcagttggctcttcaaagtggttaaaacaccaacagtgtatataatcaaacatacttgttaataaattaagattttggtaaaataagttacaacaccttcctcattacactgactgtgtttaagatatttctaaaagaacccactgcttcattacctatttttaaaaagatgataagtattataaaattaaatgtattgtggttaaattaaaattataattatattagaattatactctcagagtctcatgatatgtaaggttttatatttacattatatattatatacgatgtagaagataaatagtgtgggcttttaatttaccaatttaaattttgtgttgtaatttaatccaaatctcaagagtttgcatgtgaatattctctttgtcttggtctacacatctgtttttaaggtcagatgaatcaattaatactactaaacattgttttcttactattatggagtatactttcagacaatatttaaattactaatgaaacgatcgtattatgttcggagatgtggcaaaagagaagctctcctgttttgcagtcttttttttttttggaagaacaattagttcattaagaagaacgaaagatgggaaccacagggggaat

SEQ ID NO: 36488 - DNA, 5421 bp, Cannabis sativa
ttcttttcacatttgtattaattttcattattaatttaattttattttcatattttttttaatgatgtataatttttatttaataaattttattttaattttttttatcttaatgttaaaaaattaaagtatatcacttgacacaatgacacttatggatgaaaaaaaagtataaattaaaaatgattggggtcgtttgtttattgttgggtttttgtttcttttatagattgtgattttaaagttgtgatttctgtctattattgtgctgtgagtgtttccaagtaaaactattgttagatcttttaggtttctattatttattttttcatttcttcaataaccaatgtattatttcactctccacaataaaattaattattatattaaaaaaaattattgggatcgttttctgtatttgttgtcgtttcctgggtgtaaaggcttgatagtatatgggcctatgaggcccattatatgagtttaggcccatatataattcctggagacgacaatgtgtccatgccgtatattcttaaggaatttgctttcgaaattgaacaggtgcagtgcaggctccgttctcccaggaggacaaaactcaaacatcagaactacgcttacggcgaagtgagaagcaactcttttggatttaaggtatgttttattcaatatttcttactctttaatctcaacctctgttattaatttccttaacttttcctcacgttttaatttgattattgatgatcgagtcacactctacgagcgtaattatcatctgggtatttgttgttttagtttgtttgtatgtaaattatcgagtttaaggccaataaatagctgaataagatgttagatagggcctttgagactggggtgaagaacaatttgatgtaccaaatattttctttggcctgaactaaacactttcgagattatattgcaatatacttaaacggatgtacatgttgcttgaaccaagtcatgcagaggaattttatgctttttaatggtatgaaagtgtgttcattcttgtggaatgaccgtctatttttaacattattatttgttagaatccaaaaagggaaaaaaaaaaagttggaaacttgctggccttacgaaaaaaaaaaaacccttgcatcttagtcctttaacaatcggccaaccaagttcgagagtctctttatggctgagttcgataaatccggttaagttggttgaagttggaacatgatatgagaattctagttcaaattttcacctgtgtgtgcatacctaagtagtactaggaatgtaaatatttttgatcttatgctttgctgttttctgtttagactttgattcttttttctaagtacttttaaattttttgagtgaaaatcttgggatgaggtgttttcaccttatctattcttgtattttgacattgttatttccatattgtttgttgtggaaggttttctcttcaagtccagggcataagatatggaagtaaaaccaacagttgccttgagggctatgcttgtaggaggaattgcagcgtttgcgaaggtaggtgctgcaatgaaagctgctggcagtgcaaaggttggtgctgcagctgttgcaatgacggcggccgcaaccgcagctgtgtcaggatctaaacaagaacaggatgcttctaagcagaaaccaagttaatttttatgtacttgggaattgtagtgtataattggcagctccatgttgtcttggagctcatgagttataatgtttttctcctttttttttaagaaaccagttaaaataagagaaattacattgttcttttgtattgaagcttcgtttcttggtaagctacataagcaattgatcttctcaggaaaataagatttaatgttcagcaagacttcattttcctgcgttttatttcaaccattgtccaacctttacatggtgatagagcataataagctcacgtggaaatatcaggtattatttaataggagtgcatacattttttttcccttcaccatgtctattattccacctttctttctttcctttgagtacttctccagggcattataaatagaaattgcaaatgcaaatctctttctgaactccagcttgccttgtatttagcagtgtatagaacatctcatagaaagtgttggtactaaagctgatggcggaaatgttgtttgcttgaaccgcatgtgaagtctggttgatcaacaaagcttaccacgagttctgggtttggatcttccaactcaaatatcatctgcagaataacaaacacttaagaaatcaagcaaaagcaagcacttttagattagaaaggataaacaaattggacatgcagtcctctattagccactctctatctacatatttctataattggaacttggcatgcataccacaacattttccccaggcttaaggagtggagcagggacatagaggttgcactggggtcccattgactgtaaaaacaaaagataagaaatagcaatatggcattgtactgttcgatcaatgaagtaaagagatgcacaattttaccggccaaaaccttccaacattgaaatcgttaactattgcaattcctttaccccaaccgttgaatgatatgaatgtatcttttatttggtcttcattgtcaatatggaactgaccagcataaaatgctggttcttttgaaacaatcactgcaaaagacaagccagttagttcattattgatcttaaccctgagttttatcacagcatgaactctggatcgtaccgtgcttttcttttaactttttgcgagctgaaatatcaaaaactctagaatatgaagcctgcttgatgggattattttctggaatctcattaaggttgggaataggaattttgtacattttccatttgctgagaatactcccatctaggtaaacagaggataagattccctgcaatagaaaacaactttgatcgtaggcaaataaatgacactagttaacaaccttacgtctgaaacaacattatgatttctcctctcttacctttctatcaaatatatattgcccataatttagacgacccatattttctacctgtgagagattgaaagtaaataaataatcagttttttgaaatcatgcagtattattattgttatggaaattgaagcaaacaaaaatattaagtaccaatataaataagttgatgctggacacacaattagtactaggaaggtttagtcttccagttgaccatctttcaattgtaccaacaaatgttggtcttccagctttaagtccagaagagcaagatataagcacctgagctctgtcatgcacctgcaacatttcatagtgaaattcatagtttgaactctctaagcttgttgcatttttcgatatatcgtacagttaatagacaagttacaagtacaggtgatggacttcatcaccaagaatgtatttttctttgttggtaaaaagagataaaaatgtgagcagagaaactagaatgcaactttacacagctacttaacatcagcttaaatttaaagataacagaaaagtccacctttggtatagacagaattctgtcattgatgttgtcctttgcagcatattcagttacatatagcaagaagccaaacatctgctcataaaaagcattcgacttaaaatatttctaaaaatcattggatcatttaataaaaaaaaatccaagccaaaactgcagaatcctaggtacctggccgacagaatccattggcattggattttcagattcaacaacatctaaatgaggaagcatatcaagcaaattgcctgtctttgttaagtggatggatccatatcctatcttttcattatcaggtggaactggcggaagagattgtccagcatatttctctataactcttcgcaaagctgaaaaagtacataaatggggaactatgctgtttaagaaacataacttgattaaattcagtagatattttgtttatatcagacatataagtagtgagttactagtatcttcggaagaactagaaagtgcatgaggaagtgagagaaaggtcctgaaatacctttgaattttgcattgtttatgtcccccgtctccctaatgggtgcatcctgaagaaaatgaaatttcattaatttccaaattattatcagatatatacaggtagagataaatgctgagttaacaagttacaaaagataaaccaaaaagatcatacatagtcataggaagtaagatcagccttgtaatcagactcatctgatccagtgtttgctccattataaaatccaaagtttgttccaccgtgagccatctaagagtcaagaaaccgtataaaaggaaaacaaatagagtttttaattttttttaaaagaaacaaaaaggaaaatatagtaggatatgacgtacataaagaactgcagaaccattcctccccaaaatcgtttccaaggcagatgctgtaaaatcagcatcagtctgtgcaatcttctcaccccagtgtgtaagccaacctgtgtagaactccctgaaacaagcattcatgagcacatctaccatttcccagtaaagactgatacaccaattaacaaaactcttacgcagaaagtggtggtgatttcccaggtgcattgaacttcttttgtaagccaaatatgggccaagggttatcaccagtggtgaagtcaacagctacaaattttacagaacatattagaccaaaaaaaaaaaattaaaataatatggtaacatatgcaagtctttgcgtttcttttaaagaagtgtaaataggaaaaacacgaaagcttctcatgagtcacgagccaagcttgattaccaacaaattttattcttagttagatttctggttcagttattgccattctaaataaaacactaaagacatcagaaataagaaatggatcaatcataaactttacctgaaaagacagcatctccacgaattgttcccttctcaagtgtttctctagttcccccatctgtagtatacctgacaacaccccaattaggaaaaagttttaataatcaaggtgttaatctcaagccaaaactttgttggatcaagtatgattaacataatatttatcaaatagtggagaatgtaagtggagaattctcttacaaaattacatcatctccaaggtgatattttgccaatctgattaggtgatgaagataagccttgtcatttcgatatgaaccatattcattttcaatctgtcaacataaattacttttggtaaaatttaccacccttgggctcaattcagtttattgaaaatccaaaagctctttactattatttgcttactttctttatatgtcaaagacacagaggatagaacaaataagattcgcaaatccacttacctggaccatt

SEQ ID NO: 36489 - DNA, 1872 bp, Cannabis sativa
aaaagcaccccactccgatacaaatgtaaaatcccacaattatcttaaacaataacaatttgaatgtagataaatgaattattcatgctcattgtagtatacacgttcaattcatcatatcgtagcattaaaatacaaatgataattaaacatataattcattttactaccattcttcattaaaacgacaataataaaaagcaaaaaggaaaggagacattttggtgtactgaagagaattaaaggcttactttacttccaagtgacaattactttgatctaatgacctctatgattccgttttatatcatataataatgataataaaacaatctcacaaattaaactactttttgattagttagtactttggtagagagcattccttgggaagatcattttggaaccgttgattatcttggcaataatcataaatcatgtgatacttcctaacccatttgaaaagctttctttgtgtggatgttagtgagctgaacttgtctttgtgccaccaattagtagaactttctgctctacaaaaccttgcattcccattccatacacacgcatctatcttatgattcctaaacgaagccaagaatggaccttttgaccaatcaattttctccttcccacctcgagtggcccagctgtcaccattccataggctgactttgatccccattggctgccaccttggaaaccctacacccttctctgcatggtttctgtacactcttatggggacccaatccaccatgaacctatcaaaattatcatatcattctaatcatatagatgggacggttatgtttgaaattaaaaacgagaaagaaacaaagacttacacaatttggtgaaggttccataaaatagaataggtatggaaatctttggtgggatcaaaccagagattaatcctttcttcgcggttgtcatagccatctgcaaaaatatttgtctgaagaatatatggtttaccatccacatttccaaggaactcatagtctatctcatcacgatttggttgatcagatgtcaactgcattgcgttgcacatttatttattagtacatcattaataagtcttaggatatatatatatatatatatatatatatatatacatatgaatgagtaattgatcaaataattattagagttatgcttggaaataaattatcattcgatatgaatgagctacttttttattgtgaattggtttgagagcccaaagtattgcgggtctaaaaagacgagccaaacttaaaaactttctcggtcttgtgccagtttctagtggtagggcctttgacctgttttaaaattcacaaatttcccgacgtgtacacttacaaatttttcaatttgaccttgcccaaacgtactagtgtatggaaataatactatgtaagatcaatggactattcctttcaatgccaattggaacaataattttgttttcttattaatgcctttttgaaaaaataattttttttatatatgtagctttattttgtaaaatagttctctagacagaatatgaaaaaaagaattcttgtgtaaagtaagtggtaaaaagtgaaggaaataaaaggagtttaattcttacataataggccacaactgtgccagctgaatggcctggtacgagctttatttgcatgtcaacttgtccaaacaaaaacatttgatttgaggcaaaaccagctcctatttatttatatgcacaaaaaaaaaaaatgagaatgttttaagacagaaaatcaatttcttcaggtttttttttttcataccggattcttggtcaagtttcaagcttctttggtggccatcagctgaggtatttacatggttaggagaccatgttac

SEQ ID NO: 36490 - DNA, 4856 bp, Cannabis sativa
  modified_base (1178)..(1179): a, c, t, g, unknown or other
  modified_base (2137)..(2155): a, c, t, g, unknown or other
aaaaaactaaacacaattttatactcaaataaactaaaattattatatatacacaaataaaaaaataaattaaataaaactaaaataaagaaaatatatgttaccggagcggaggtgcggcggtggtgcggcggaggtgtggcggcccatctcgtcagaatcccattacaaatgtttttttggaaaaaatggaaaaaaaaaaaagaggaaaaagagagaaacaagtttggaggttgaaaataattttttgggaggttgaaaatggattttggaggggaacaaatggggctgccgacggtgggtttggtttttgcagagagagagaaggagaagaaagagaaagagaagaggaaaaatagggaagaagggttcgctcgagcttttatttactttcaacttttgccggcgcaagtttcccacttaattttcacgcaagttttcctttgcgcgggatgttgaccgccaaaatttttaagggtttttgctggcgctaaaccttgatgcaacttgtccagtggccaaacagttcccacttttgctggcgcatataagtgcgccggcaaaagtccccacctacttttgcgcgcacgttttttcactgcgagggaaaattgacagcctttttttcccgacttttgccggcgcaatttagcgccggcaaaagtaaacaaaattaaataaattattttgccggcgcaggtaattgcgttggtaaaagtggaaaccgtacaactaataattcccaccttttggcggttttgtgccaacgtttgccggcgcaattggtgtatttcgtcggcaatattggctattggcgacaaaaatagtcgccggtaaaaagtttgggattcttgctcatagagaaggcgcaataaaacttcaaaacaaataatgttagctgctttgatatatcaggaggttatgggccagtttggcacagcttttagaaaagctaaaagatgcttctcaaaaaaactatgacaaaaaggtgtttggtaagtagttaaaaaacaacttattaaagaatttatggaaaagatacaattaaaagctaaagctggtacaacctctagtggccaaaaattacaccaagcccaaatgcctcttacggtccaaatcgaaattacaacccttcaaaccaagtgagtgaatataacccactcatccaaaacacattnngctttggctaaaatacaaggcccaaacgagctcagcaactataagaccaatctgatacaagggataggaaggagtctataactaaagtagaagaatcgatcctttctcctggaaaaggggaagaccacttcacatattcgttcttcagaataggggaattcaaccatcaggggctctataaaaggagaacccaggagtcctaaaggatcatctcatcttcactcactcaagcactcactcaatacattactattattattaccagtccttctccatcgctctacagtggaaatatatgttttctatcttctttatttacattcagatattctttatttaaattgtttactgacttgatcgtcggagtcccttcggctggcaccatcctggtgtcccaaggtctcaacggtccttttttcgtttgttctacaggttgtcggtcctcgcgatccttccattctgatcattgtagattatgccctctacaatttggcgcccacagtggggtactaaattaccacatatcatctattttgattaatatatcaaaggtctacaatttttgaaaaaagctattttgattaaaaataaattattttttactaaaaatttattatatattacaaaaaacaaaatattttttttgaaggaaaaaatatttaaaataaataatatttaattttttaattttttatttggttttaaaaaatattttatatttatatttatatttttattattcacaaataatatcaatctaaattttttataaactacaatattttttagaattgaaaaaagtataatttaataatattaaaaattatttttatcaaatacatataaatttatactatagaaaaaataattaaaaatacataaaaaataaaaattttatataacatattttatatttgtaattttaatgaagtagattaaattattattattattattnnnnnnnnnnnnnnnnnnnttattattattattattatcttaacaactcgtagcactttaaaatttatagtttaccaaacactcaactcagctttttcctacagcactgctacaactgtttttccgacatcacaactacatatgcttttccccactgctaaactggcccatatatgcaactaatttttgttatatattattatcattatatgtatatattgaatttatagaaaatcagcgccacccaaccttacatatgcatacgtccaagcccgaccctaggcataggcggggtctgtgtctagggctcactttgtccaggggttcaaaaaatattttccccttttaaaattatatatattttactcattttgaaaaataccacattttttttaattaagggctcaaaaatatattttttttctcatggcccactaaatttcagggccaatataaaaaattttgttgtcaatattataaattattaataatttttttttatttttaacaagaaaattttaaaaattttgatattataaccataacaaatattgctataaaaaaattatttgacatgtatttttagatacaaaactaaaatatgagagtgatggtggtagcactcctcaacaagaacaataaaaattattgtaattaccattttttttttgacaaaatatataattatcactttatatctaagcatattttaaagtatgtaatagcttcttttttttttcttttttgacatcaagtatgtaaaaaaaaatgtggctgagctgtctttactcaacggctccccagtctccaccatttaattaatattaataattaaataaagcgaaaatccaacagaatattcggaacaagttcgactagggttagggttttgctttcctctaactccgcatatataacaatttttacatatatatatatacttgcgtatcctttcttctctcacgctcactctcacccaaaattcacttcagctgctccgtttagagaccttcgaagacaaagatggagcaaactttcattatgatcaagcccgatggtgtccaaagaggactggtatgttttctatttttattgtttttgctttacctatttgattctcatatgagtttcttgagatttctcatatttctgggatatcttgatgattataatggatctggtgtttggttggtaggaaatttttctttttggtgggtcctagtaaaaaaatcattactcaatgtatctggattggggtttttcggagtctagcaaaaaataaagcttttgataaataaattaataatttattagtgagatgttgaaattagattcaccaagattcgattactgtttggaaaattaaaggtctaattattgttactcaggttggtgaaatcattagcagatttgagaagaagggattcactttgagaggtaagctttctatatcattaaaaggactttttctttttaagtttgtaatcatatatataattgagaattgtaattgtagttttctaagttaagggcttgattgatttgttttgttttgttttaggtttgaagttcatcactgttgatagtgcttttgcggagaagcactatgctgatctctctgccaagccctttttcagtggtttggttgagtacattgtctctggccctgttgttgccatggtttgggagggtaagaatgtggtaaccacaggaaggaagatcattggagcaaccaaccctgcagagtctgcccccggaaccattcgtggcgactttgctattgatattggcaggtaatgaaaatgtttagattgttatatagttgtatgatcatacaatgtttattgttagaaggggttttctatactgtgttgtttttgttggattttacaaccttattaactgcatgaacattcattggacgcaggaatgtcattcatggaagtgattcagctgagaatggaaggaaggagattgccctgtggttccccgaaggcgttgctgaatggcagagcagccttcactcatggatctatgaatagacttggatctttcttgagctctcagatactgggattatctttctcttagttgttatgatgatgaagatgacatcttattatgaagttttagagagttttgttctcctgataaaactatgagtctttgtatgttttgctttgattattaattcatctggatgttgagtgtactaagaaccttcataaacaagttatcacattgtggaaatcttgtgtcttgcttcagtttaactctgtttctcattatttatttggttggggtgattataaaacatctagacatatttcaatccatatttttttttctttatgttttatttatttattttttttttgacaaagtgattagaatcgctcatgaatttacgacgtctatatccgccactggcattggaacttcttcgaaccaggatagctcatcgtctaaccgtagagcatgctttgccaagtcatgggccgctaaattctcagagcgaaccacatgggacaaaactgcccccggaaatttagataataaagctataacatcttcaaacaacactcctaacttgttgcaatacatctcgtcgttgttgatagccgtcaccaaagctaaaagctattatcgtttaaacttaatcctctttaaaccttatttcacttgaaaatattttaaaaatatctcaaaaaaaaaaaaaa

SEQ ID NO: 36491 - DNA, 5773 bp, Cannabis sativa
tctctctctctctctcttatttttggcattttgggtgggctggctggctgcagcctctttaaactgtctttaattaaatcaatgaataaagttaaataatagccaacagagtcgtgatgattgccatgatctaaccctaatcctcttctagcttttgaacttttctttagcttttcttaataccaatcgactaaatggcattgcccaactggcaattgagccatcaatacagttttatttttaacatttgcctacaatcatagctaactctaataataatgaaaataattgacactagttagttgtatttagtactacacgtaggtaataggtcttattattaataaataaataataataatttcacatgttagacgtacaattttttttttttttttttgtgagaagtgtgcctcacacattgagtcaattaaattcatctttcattgttggacaagtttagaaagagatacgcacaaaattcatgtcatttaagaaagaaaagaaaaagaaaactggtttattatgtttagttattactttggttacttttaagcctcgagaagtgttctgatcggtacttggctgcatgcatacataggcttctttagatcttctgccgttctggtatttacttctgagtctttttagatttactttttgtagagtaattaacaacatagggagggaatagggaacaatttccaattgagccttttttttttcctttctaattttctatttttttgtttctctgagtactacttagtttgttttccttatatagtcatgatttatatgccaggtacagcagtattattctaagacttactcaaactaacctctcttccttcttgtgtattatactactactacagattgtgttcacatgaagaagcttttagtaacaattcaaagcgttcttcttcttctatttcttctctactttagcagtagcatagtgtttgttgtgtgtgaagatgaaataggaaaagactcaacttcttcatccctggcaccaatggagaaaacagagcaggaagctctttattctgctattcaaagctttgtgggcaaatggtggaacggttcagatctctatccagacccttgtggatggactccaatacaggtattattgtttgtaacttcctatatctaaaaaaaatattatttaaatgaacacaaaagaagaaaaaagacaaatattgctctatttatgtattgtttctttttggctttaacttaattgaccattaccttatgcaatatgttgatgctgttctttttttggtcaattcatatatattttgttagatttgaaaacttttgttctgaagctatatttgttgtatgacatacagggagtttactgtgatctttatgatgggttgtggtacatttctgatttaaacattgggccaatttatgacaactctctaaaatgttcagtcaatgcaaaaatttcaaaccacttattcaacctcaagcacctaaaggccctctcaatctttagttgcttcgtctcacaaaatctaaacccagtcacaatctcaactttaagatgggagaagttcactcacagcttagagtccttagaattcagattaaatccaggtctcattggaacggtcccaaccaccataggaaaactcaccaaactccaatctctagtgctgcttgaaaatgggttaactggtgagttaccaatggaaattggaaacttggctaacttgaggaaacttgtcctttcaggtaaccattttttgggacagattccttcaagttttggacagttgtctgagctcttaatacttgatacaagtaggaatgacctttctggttcattgccttcgagtcttggatttctgagatcacttttaaagcttgatttgagcaataatatgttaaatggtatcttgcctagagagattggtaagctcaagaatctcacactgttggaccttggaagtaacaagttttcaggtgggttacctgagtcacttggagaaatggtgtccttgaaagagatggtgatatccaataacccagttgggggtgaccttaagagaaatattgaatggagaaagttactgaacttggaaattttggatctttccaacacaagtttgacaggggacattccagaatcattggcagaaatgaagaggcttagatttttggggcttaactacaacaatctctcaggaaatgtcccaccaaggttggcatctctgccttgtattagtacactttaccttggaggaaacaatttgacaggtgaacttggattttcagaagggttttatagaaaaatgggaaggcgttttggagcttggaacaacccaaatctttgttacaggttgacttccagtacatgtagctatgctccttatggagttagaccatgtaaccaagaatcaaacacttacaaaagagtttcaaatgaaaaggtaagcagaagtgttgacagggacaggaacactactgatgatttcttttcagtgagatcttccggaattttaagatgtagtgttggtgggttttggcatttattttgtgttcaaggaatgcttgttatgtttctatggagtgcaatggtatattgattctgaaagcttaaggtaaataaaagttttcatttgtcttgatagagaagtacaatatcatttcccgctcaagttaaagggtcctcaaatcaatgtagtagatctatgtgttgtatagtgtacgatgcaataatgtacaagcattatgaaattttggttcctaaatgtgcatacattggttgctatgttatcttaaatgtgtacttttttttttaacaaagtgcttccgtatatttgaaaatttaaatattttttacttttaaattggtttctatgttatcttaaatgtttgaatttcgttcattgcagctaaaaaaataataattaaatagatttttttacatttatatgaagagagcagagcgatcatctaaccttcaattggcatttttttttatttatttcattacatatatttttttaattatttaccaagtcaaagataagctttcgaacggttaccctcaacaacaaagcccactacctccaatttttactcttaatatcctctcccaagattttagcaacaaagattcaaaaaaattccctcctttcattaagttaaaaacttccaagtttcttcaaattcttcattttcgcaattgagcattgagtgtgtaaattaaaggagctccctataacaaagtccaaaaacaaaatcttccttaaaaaatatggcttcctccaaactactcctattctttgtagtcctctccacattcaagttcatctccataacctgtactgattttgctgttggcgatgaatatggttggaaaactccaaaatccaaaaatgactctcaaatcttcaacaattgggcatcaaagaataggttcattgttggtgacactctacgtaagtaatctcaattaatacagtacaaagtatgtgtcactttagtgttacaagttccaagtcttacgttattcattttatttttatttttattaatgtgtttatagattttgagtacgataaagactcggtgttggctgtgactgaagaggagtatgaaaagtgttattcttctcatcctgtttacttctccaacaatggagacagtgtcttccatttcgacaggccgggattgttctacttcattagtggggtttctgggcactgtgagagaggccagaagatgatcatcaaagttttagaaactgcacatccacctcagtcaggcgcagaacagaatacaacaattgggacatcacaagggaatgctgctcctggattctatgccttatctagcccaacttttgtgctcttccttgtgtcctttgttggaccagttcttgtcgtttagattgaaattctactatgatcgcttcctagatttgtttttctagctaggtttatgttggagagtgtatggaaatgaatatgttattatgttttcgaagatgacttcagtggtatgagtattgttttatgttttcataagaatatatatttatattttgtgtacctgtttgctttggcaaaaggtattcttttttctttttccatcgacaagtttttgtctagcagcatgattattgatataaaagtgaagtgagcttaaattctaaagtttcaatttaaccagaaataggaatatacggctttaaaagaagatggagcagcagatataaattttaaaagaagcgtaaaaatatatttattaatataattataaatatgtatttaaactatttttacttaaaaaaagtttccgaaaagtatataattaggaaaaataatttatttaaataattaataaattattatgtcttttttatataattatgtctttttttttcttgtaaaaaaagactacagaaaaaataaaaagcaaaaaaacggtgatattcataatttttttctaattaaacataaatattatagtaaaagataattattttaaaatatatatatagtatccacaatttttttttttttttttagtttttaataaatcaaaacaagtatataagtatcatcaaaacagataaattaaataactaaataaaaaaaaatatatttttatgaggtgtcttacaaatatttagagatatttcataatcatttgaaagggttattttgttagacccacaatctaacaaaaataaaatattttattccatgtacaattgttcgagtacatgtaaattttagaaaatttcaagtagtttatattgtcaaaaataaaatttaaatattttattgcatgcacaactgtttgttcttacacacatattaagaactttttgaaccttattttcggcattgtaaaatattcataatttttttaaatttataggtaattctatataactataacatacactatcatgaaaaaaaaaaaaaattgaactaaaaatcttttttggatgccaaaacagatataggatctactagaacacccttttaggggtgtactacataagatttcagtaaaattcatcataaaaaattaatgtagaaaaagaaaaatattttggaaataattgtacccccttaaagggctatttcgatagacctccttctctgttttaaattattattttttttgatcctgtacattgtagttacttagaaataccggtaaattttcataaaattttaaatagtttacagtgccgtaaataaaattcaaacagttgattactacgtctataagaaaaaacagtcattcgtgcaataaaatattttaaccttatttttaacattgtaaattatttagatttttttgaaaatttacaaatagttcactgtaaaaattagaaatagttttggataccgaaataaagggtctactgagagggggtgtactaatttttattagatcaacttatcttttttttaaaactatcatgaaattatttttataaaagtctcaactaactatttgaaataaaaataaatttactaattattttttaattaaaaaagaaaaagaaaaaaaaataaattatgagaaaaattgactaaagtaaaacaaaattaaagaaaagaatgagtattaaaatattattaagatttgaagagatatgtaaccatgtagtaaagtctatattcactatcatactccttacattcttctcaccattggatcattaataaatgtgtaataaagtgtccctatcatagagacaaaaaaatgcatccctactatagaa

SEQ ID NO: 36492 - DNA, 3379 bp, Cannabis sativa
agggaaaaagaaagaaagagtttttagcatattatctgtgggctcaattgtatgaataagctgtgtggttgggactatatttgtaaatctttatatcctcactcagaaagtttattttctcggtgagaacgtttgtaaactatattttggttaattatgtttttcagggaaaagagttctctctgatgcttgggttttggatactgcccaaaaaccctatgtatggcagaggctgaaccctgaaggtgatagaccttctgctagaatgtgagtactgttttcttatttatcattttatgatttaagtattctttggctacataaatacctacagtacactaatcaacaatattttgtaggtatgccactgccagtgctcgctcagatggtatgttcttgctttgtggtggaagggacgcttctggcacagtatgttgactctttctgtaaaagcttgatcgttgtgcatacttgctgtctttgtttttccttttgatttctgcctgatgtttagtaggcatccatctaactttggaataatgtataaccatgtacttgcttgggcagccaatggcagatgcttatgggttattaatgcataggaatggacaatgggaatggacccttgcacctggagtttctccttcatcaagataccaacatgccgcggtaagccatgtacattttgaaaatgttgtctaatgtttgtatactgtataccgtaaatgtactatttgtctttcaaggtaattcctaccatatttagatatattttttttgaagtaaagttaattacgttaggctctttatctcatttcatgggaatagaagtggttgttttgtatcatttctgctaccttttgcaggcacttgtgcttcacttcactttaatgagatatgttattaggccaactttccttacctagctctgaacattatttgttttcaggtttttgttggtgcaagattacatgttaccggaggtgttctaaggggagggcgtggagtagaaggtgaagctgctattgcaggtaagctttaagtcaaagctaaccactaatggtgttgtaatattagtgatttgctgtaacatattttctttttaatttacttatcattgctattttgtttatatagtattggacactgctgctggagtttggttggatagaaacggactcgtgacttccccacgcaccagcaaacattctgactatgatccttctttggagcttatgcgccgatgtcgccatgctgcttcatctattggtgttcgtatctatatatatggtggcctaagaggaggtagagcttaaataaagatcacaattttaagattgtaattaaatgtttggaaaatttttttccttcttgaggactagatcttccgaaagttgttcaattgcaagtagaacaagcttggccaataccttacttttccagtgttgcgaaaattaaactaagctgtagttaacattttagaaagcttggtcatttccatacagaagaggaactatttttgatctgttttgtcttgcaatacagatgctcgtgactaagttttttacttgctgttatttatctttaataatgttttcttgtgcagatatcctgttagatgattttctagttgcagaaaattcatcatttcaggctgaaatgaattctcctgttttaacatcggagagatcaacgcctattacaagtcccaaagtacatcacgctaacctatctttctcaacaacacctactcaagacggtgaatctgagagttccacatctggcggcttgaggtattttattgtttatactttgtatccttgctcaaattctgtccatctactttggaacaatttcatacttgtatagttttggtgatctgttttcatctttagcagtatggacaaaaattctatggaaaagctaagggaggcttctgctgctgaagctgaggctgctagtgctgtatggcaagctttgcagtcttcacctgttgctcctgaagaaacatctgtgtccgatgataactcacaagctgcagaaacaatttcagatggtagtgacaatgaggctgatgttcggctccatcctagagctgtaagctctatgcaccgctttcttataaactgatatctgtaactgaaacttcataatttattagtttgtgctgttgcaatgcaggttgtagtagctaaagaggccattggtaacttgggcgggatggtgagacaattatctttggatcaatttgaaaatgaaagcaggcgaatggttcccgtaaataacgacttgtcatatccagccaaaaagttcaccaggcagaggtctcctcagggcttacataagaaggtagttcattatacgtgtaatgcttttatttttccctatttatttgttatgtatccattttttcctatttatttgttatgtatcctgttaagatttctctctgtacagattatatctgcattgctgaggcctcgaaattggaaacctcctgtcaacagaagatttttcttggattcttatgaagtgggggagctttgttatgctgctgaacaaatctttatgcaagagccaacagttcttcagcttaaagcgcctgttaaagtatttggtgatcttcatggacagtttggtgatttgatgcggttgtttgatgaatatggatttccctcgacggcaggagacataacgtaagttcagtgattgttttcactttgctaacatatattgctatttacaagtataccatcttgtgttatgtgaaacgtttgactttattagattcttagtgtcaaaaaatctgattttactagatttttaattgttatgaagtaggaaatggctcttacttaattgggattagtttgtgttttatgactggagactggggactttgttctgccttaaagttcattcctttgctgtgtcagtaacaaattatgtgagcaatgtgtgctggtagtttactctatgattccttttgtaaaagattttagaacaagctgggagggctatttaattagccaatttatttattttcaggtatattgactacttgtttttgggagattatgttgatcgaggacagcacagcttggaaaccataactttgcttcttgcactcaaggcaagctttgcattttaacccttaaaaatttgatatgaagtcttgcctcttaatttcctgttggttttgcagattgagtatccagaaagtgttcatttaatacgaggaaatcatgaggctgctgacataaatgctctttttggttttcgtattgaatgcattgagaggatggtataaacttttgtacatggttatttttttcagatatacatttatgaggatttgaacctctatcatttaccacac

SEQ ID NO: 36493 - DNA, 4781 bp, Cannabis sativa
tttagtctcctagttttgtatataaatatgtactattctatgaaatatatacacaattcgattcactattttctacaactagaaagggagagttatcaaagattagtcggaaaactagtctctctctctcatattagacttgatatggccttctccgtcagcgtggtgagtcatcatttgcacaatccatatgaggagcacttggaagaggtgtatcgtattctaaagtatctgaaaatgacaccaggtcttggtttgcacttcacaaaacacaacaatcatgatttggaagtttacactgattccaattgggctggagagctgaccgatagatgatcaaccagtggttaccgcacctatgtatggggtaacattgtcacttggcgaagcaaaaagtagtccgcggtctcaagaagtaggtgtagagtcagaatattgtgctttggccttaggtatgtgtaaaggaatgtggatcaaaaggttgatgaatgaattgaggcttgactctcccagagtcctttaaaatgtatagtgatagtcaagctgcaattagcattgctaacatgttgaaatagacagacttcatttttgagaaggtgaattcaatgattattgagctcaactacattcccactaagaaacagattgccgacatcttaacaaaggccctaccgagaacaagttttgaagaattccattccaagctgggtttgtataatatattcaactcagcttttgtataacatatacaactcagcttgagggggagtgtagaaatattagatagacatgttttaaatacatagtgtattattcagctatgtttaggtcgtaaatttattcttaatttgttcctgatttttagttttctagtcctttgtattcagcctatatataggccattcttttatcattaaaattgagaataattctcacaaaaactacagtcgttcatcttagaggagaccttgaggacaataacattaagcaccggactcatatcttcctcagtaggtgaaccagaagaaaaataatctgaaaatagtcttggaatataactgcaagatcatgctgaccaaaacttcagtacccgatgagtcattgttattttgtttatatatgaggtttttcaaatgattaattcctaagtctttatattggttactttttaaaaataaaaaaaaaaaaagaaaaagaaatattatataaaaagaaatattatattattactaatttcagatgccatgttggcttgatttaattgttcttttctcttttccttttcgtcggctaccaaattggcactatggcttatgtaactatatatagagagagataaatattggtgtaatcattgagtactaatccgcacacacacacacatatatatgtatatatatataattcatctaattttcattttggacattgaacaaaagaatgtgtctctttcaattggttcaatatctggaatttaatttattgaagaccatagtgattagcatcttgaaagcaggttcgtgtagctgatccaactttcgtgggttatttcattgataaaggtgttgttgctgctgctaaggttgtccgtaaggtacatctaagatttaatgtgcaaatttatacactcattctgaaacatgttcgtggttttttcattcaattggaaaaccatgctgaagtgaaggctttatgaatttatttcatttttagtttacatgatgaaatattatgttgtattttttgcatgatttgtatacctttagctcttgttgtcaatttatttggaatgtgaattgcgtagatattaactgaaaaatatgatgagatcttcacctagcgttttcttagctcatcacaagatatatcatgggtttaggtccaaaatacggtattgcagttttctggtgaatctatacttcaggagtgtttcttgatcatcaagtcttaaagagtataatataataattgcatgtgatgccgtgaagtcagtcatatgtatggtatagtagagtaatacagccgattatgatacacatgttgtatttatgactttatatgatgcataagaattaattactagtcttaatctgaatactgttaatacaatggtgatcatggagggtgatttatgtataacatgatataaaaggccactttgatgagcttatcctgatagatgatgcttaagaaccactgtgattaattcatgtgtcagtatattgtctaagatcttcaaactgaacctactacgttggtggtggttgtgagacttgttaacctaaattttgtaaactcttttgtatttaggtctgttgttatgtgcatgattatttttgctttaaccggtacatactcttgctgtaatttcttttagtctattttctcagacttgtatttatattacattgatacaaatcagattattttttatttttttctgaaaaataaagttaagggattctgaagtttcttgtggtttcattacaggcatacccccaagaaaaggttggtgtctttgtgcgccgaggaaaagggggtcctctaactgttgtcgaatacagtgagttggatccaactatggcttctgcaattaatcaaggaactggacgccttcggtattgttggagcaatgtaatatcctctttatctatttttattagatttttaactttcataatcttatacatatgaaaaagatgataattgggaagccctattttctacttgtggattttttttatttaaatattaagtgaatgctgctcatttttgttgagaaatattacactagtttaatgtaacttgtaagcattcatagatctataaaactgtttcatttcagataaattgcaaactaggtaagttgtaggttcatagtgtgctgtacatttacagtacaaagtgaagcagattatcatgtgagatggcttgagatgaaaaatatgccatacatgcattattcccttaatagtttgctttttgtgttttgcttccttccttatactagcttaggagacagcctatctttaaacataattatttgtaaacactcaatcatgactgttgattcaagttcataatgatgcttctaggtttggaatgtaatttatgtggcagtgatggcagtaacaaacatgtgaatcataatcttgttttggaaagactgtcacaatttcctaaatggcttgtgaatgctatgtgatgcggaatcttctctttttttttttcttttcttttctttcttgcttttttcaaactttggtcagaagaagcaagtttgtttaatagtttagatactaaatgaagtaattttctagtttgaattgcatttagttttgtgcctcaaattgagctctattcttatctggtcatttgttagtggggagcgttctattttcatcaattactctatattatatatataaacatgaactcttgcaacttatgcctttcaggtatgcctgcacatgtttactctggatttcctgaaccaagtggcaaatggccttgagaaagacagcatgttagtcacagttctttctttaactctgcccatggtttttttgtttatctgtgcttccgttagtctattgtctttcaagttagtatgatgtccgtttgactactcgaaagattaattttagctcttaaaacttaaattacatacaggagtgaattcacgttctttagaagaatctctttaagattgctctttcaaacaaaaaaaaaaagaaaaagaaaaagaaagaaaaaaaaaataaaactaaaattatggcgtaaatatgattatcctagctctagcttctaaatcattgtaagttcctttcttttgttataagctgtaactgagttaggttaattttttttttatggttgctgtactattctatatttgttgtattttgtttattgttatttttcatatactagtttccattctttctaaaaagatttaatactatgaaataatgaactgaatcttgattttgcgtactcaattttgttgaacttccattatcacgtatagttgcccaaaaaagctggtattcagcatagacaagaatgcaggatgtaatacatgctcattaccataatactttgctgacaggacaaatttgaattttgtgcgacagctttttgtgatcagttgcattttgcatcaaatctttttgtgttttttaatcattatgcttaattcaattttacaaatgtagctaccatcttgctgagaagataattccttctattcatggacatacaatgggatttaaactggagcagttcatatttgatgcatttccatatgcgccttctactgccctttttgaggtcattttttccccatctctatgccccagcattacctttcatattttcattgttgtacttttcatcaactaagggagattatttttttcttaaaaattggttgttctaaaacaggtattacgcgaagaagagtttgcacctgttaaaaatatcaatgggtcaacttttgacactccggaaagtgctaaacttcttgttctccgccttcattctcgttgggtagttgctgctggtggattcttaacacattcagtgcctttatatgcaactggtgatgctcttttaattatttcagtttttattgttagtagaaatgatacaaagtttacatgcataaactcaaattggaaagtagatagagtggtctcaccaagttagacgttgccattttgttgatcctagatgggaatttagcttgggggatttctttgtattttttaattcaatat

SEQ ID NO: 36494 - DNA, 5317 bp, Cannabis sativa
agactaaaaaaaaagcgcactcctacttgcaactcagcaattacgtatttattataaaagctaatacaatgcttctaatggacgtggaaaactaaaataaacccaaaagaaaaaattgataagagaaaaaaaaatggaaaaggcaaacatcgttgttatattgaaaaaagatacccaaagttaaagtgcagagaaacaaacgatgtcttgtttgaatctcctctagtgttttgatccatcaccaaatacctctttgtaacaaatggggcaagcctggaaaaaaaaaaatcacgtgtagaagacattgtcagcttaaattgaaccttgaaactaaactattgttaccgaagtgtttcacccagtttttaccttgttaatgcttagccatctggtgccgcaactagcatggtagacatgcttacatggtagagtcatccgtcgattacctcgtttatattccatctgacaaatcacacatctacatccattcaaaataaacgggtttaattgttatgaaagagcaaagttatttcttttttctttttcaaatatgaatttatgatctcaaacaagttccagtcaagcatataacaaaaggctcccatccaaacttctagtgggatctcatgaaattgcttgctttgtttccttctcagtaacaattttctgaattttttttaataatagtaagtgatgacaaaaaagtcccaacatgcaaaaggaagtacaaattacaaggcaaaaacaccataattttgagtacggttggttcgattcagttcacaagttcaaatgtttacctctcgtctcgtgatttctttcttgagaagaagctgcatttgtattttgagactggaagtaaagcaatttgttctagtgaaagacctcgattttgagttccgaccacctcacctaactcgagtaattcctgaacatgaaatgataaatcacgaataattctttagataaacaaataaaaatggtggcaccaaaacacagatacagcaaattcctagcgagcaactaaatgggcatattcacactccaatgtttaacaatatctggaggtgtagaggcaccacttccagtacaccaacatactcttcccccatatggggactcttccctcttgtgatttctagtaaattagtgtgaagtgtgtgtctgtgtttacaggaatagaccccacagctcaaacattctttagcctaaactttcagagcgtgttgtggaatgtgaaaataggtgtgatctcacaaggtcacaagcagctaaaaatatgatctgactgacaactttttccttctaataatctcaatagttaaaaaaaatataagaaaaagaaagaaagaaataatgggaaacatgcgattataatattcagtctaacatgtaaaacatttaaaaaccttgttcaaaaaaaaaaaaaacaattaaaaactgaacttttgtacaagcaatcaattaaaattttacgaatttctcacttgaaactttgaatgataacaagtttcatcctttcaaaagacaaaaacaaataaaatattatcattgctttcatgcatgaatcaacaggaagggcacatatagcagctctttcaaaactctaacctcgtaagtcatgttatcaggatcaatgttatcttgccaaacaacctgcattattttccacagaacattaaaaacagctatcacaacattgctataataaatgcagagtatgaaaacaactatatagagggatatcagacatggacttctgctgagagaacatatttcattcgaagaaattgtcggtgtgactgttagataaagatgagctacacacctgatagtcatgagaaccgggatgtcttcgcggacctgaaaagtataaaaaggaacttaaaactaaaagagtagtagttcgttcttccaagttatgttaggcagagaaaacaaaacagtgaaggggcagtggagatgcccggcacaatagcacatgacataatcatcaagttgcacaaaataaaaagtgtcaatatatccagagctctgcagataaaacaaataatgactcctctctctcccactccagcatgttataaaatgctaaaatgtaactcaataaccattgtccctctcctataaagatgctacttgaaagtactttttttgtcaattaaactgcaaagcaatgtaaaaacacgcaccactgaactgccaagtctacagagcccaagtaaataatatactgaggtctctattttgttctcgctcgtggacaggccaaaaaaattaaaggaccagcacattcttgaaaaccaatttggaggaaaaaaataatcacagcaaagaactcacattctacaggattgtcacgtctgttcacattggtatttccttcccaccctgaatttgctgctgcagtgtgttcattggtcactgttgaagagttctctgagggcctcctatattcatcatttctatggtcgtaatcatgaacctcgtaagcattgccaacaccataataaaaaccgctcccaggttcagataacccaaatttgtaaaaactagtacttggagatgggtagatactctcctacagaaattaagtgcaggtatttcaattttttacatgaaaatagtgttatacccacattaattttcaaatgatgagaaaattactttgagcaaataaagaaaaacataatgtggacaaacacctcaagttttaatgatacaacaaaatggaattttacttataacaacaattaacatcaaatctcaaaaatccgatccttatcatttacacaaacaataaactactgtttctctacaaaactatgtagcataacaagaaaaagtcctccgaatgctattttgaatcgattaaggctaccacatctcccaaaagtatatccacagacatttcataagaaagtacctgagcatgtgaagcaccagaaaaaataaaattcacatgttcataggtaagaccttcaaaatactccataaagctaccagctgaattatacggataactactgttaacgtaatgaacttccatgtttgggttccaactcattcttaacgattaatctgtaacacaaaaatacattcaacagacttaagatctaagaattgaaataaatttttataatatgaagaaaaacaaataataaacatatacataggggaacctgatatatcgacaaattcacgactgtagaagcatcaaatgaaatcaagcaatcgaaaaaatttgtcagctttttgtatatttgcaaatcctgcaacaaatagtgtggctcagcaatcacattaacgcggattacaaaagctaaagattacaaagtgaaacgaacaatttgactctggaaaccagtcttacaaaaataaaaaattacgattttccaattgaaaaaaataaaaagattctttctaccggaaaagaagtttcacctcttctgaaaaccttacatgcttgttcattagcttctagaaactaaataatctgtcattacagattaagccaacgagcgatttcctatcgagaaactaattacagattcattcaaaaaaaacaaaaaatgaaaaagtgaacaaatacctcatgaccgaatttgaatatccaaaaggtatggaaatcatatcaatccacattcaaattatttatttatgtttttgaaaagaaaaataaagaagaaacttgatgctgcttgcttagaaaatgcaagtctcccgcaatttcataagaaagttttgttgggaaaatgcagaggagaaacaaagaaaacgaaatgcaggacggatcaaatgaaaacaatagaaaaaagaaaaagaaaaagaggaagtgaaaacgagagattaaagaagcgacattgatcgctttttaagatgataagaataggttctggttgtctgagaacgaatacctttccatcacagaataatcacctctgcctttgctctctctctctcttcctccctttaagcagagagacacagagcgaatggggtttcctttcagatacacgcgaagtccgttggatgacaaagagagtgagattgggatcgggtgtcacgcggcgtacgataaaatgggtgttccctcactctcctctactttcctccttttacagttggtcttcttttatcttctttctatatctacccacctcatatgtgtataattagagggtatcccatctattttccaactatgaatttgttgtttataattttttgttcaattttatatttaaaatacaattatttttatagctgagattattatgttaataatttatagttctatatcaaacaggtgtcgaaattgaattttttcacaataatacatatttgcaattgcaaatgtaccactcatggctttgggtttagatccaactctaaacattatttagataaataaggttatccactactttaccacagaagtcgttgttatttataaatctttataatactaataatagtataataaggatttcaaaaaaaaaaaaatatatatagtttaataagaatatggactaattaaaaaaattagtacactatattactttaccattctgttattttggttaatgatctttcgaataggatagttgaaaattgagataaagttctacaaagtttttttatcacgaagggtgttaggactgttttaaaggggtatttcgtaaagaagagaaaaatatataagacaagattaatatacaaaatgattatgttcgtaaatttataccatattattcacatcacatgtacctatagtatcattttatcatttaatccttttgcatgctatgtgtttggtgtattgggtacaattttatacgtatttgttatatattttttttttgataaatatttgttatgtatttgatatttagtttatgaacaaaatcttgcaactcaactggtctatgttaccgactagaggagagccatgttaaacatacataaaaggtgtacatatatatatatatatattatatatgtatctgtatattttttataatggtatacataaatggtgtatatctgtatatttaattaacgtataatggtatgtattttttataatcatatatatttataaatagattttcattatttttaattgtgtaattaaaattacatattattgtatatacatcaacgaatacaaattgaatgtatttcaaattttaattgggagtgtttggaagtaattgtgtaattactaggtagggtaattattagagtagtaattacacaatttagtaattacactatattttaaaatgccaagtgtgtttggatatgagttggt

SEQ ID NO: 36495 - DNA, 3762 bp, Cannabis sativa
gagagagagagagagagatttgatattttttttaggttttgaaaaaaaaagtaagggtattttgggtaaagtgttatttggatgatattgtataaaataattaagaggttattttttaaaataggtttttttttttaagtatattaaatgaaattttcctttagaaatatagacaatgaaaatagttatttttggtatatatgtttagttgtaacaacattttaattcatctatatgtaagttaattttgacaaaaataaaattcaaagacttagtgatcgttaaaaagttagttagcttgttagttttattaaggatgttaaagttactaagtaaattttatgaattgtaagaaattagttaatattataattttaattatgaacgttaaaatcgtatcttgcaataatttagaaatatatattgacgatcaaaataagttctttttggtatataagttaaattgcaacaaaatttatatataaactaattttgactaaaattgaattagtagattaagtgatcgttaaaaaattagttaagttgttggtacaattaaggaagtcaaagttacttggtagattttataagctgtaagaaattagttaacattataattttaattatcgatgttagaattgtatgttgtaatgatttagaaatatagacagtgaacgcagttgcttttggcatataagttaagttgcaacaacattaatacaattgtatataagttaatttcaattaaaattaaattaatagattcagtgatcgttaaaaagttggttaagttgttggtttcattatgaatgtcaaggttacttagtatattgtatgagttgtgaaaaattagttaacattataattttaattatggacgttagaatcatatcgtgtcttgcaataatttaaaaatatagatgatcaaattgttatttttgttatataagttaatttgcaacaaaatttaatactataagctgatttcaactaaaattaaattagtagatttagtgatccttaaaaagttagttaagttgttagttttattaaggatgtcaaacttagcagattttatgagttgtagatattagttaacattataactttaattacagacgttagaattgtatgttataataatttagaagtataaacgataaaaatagttgctttggtataagttaagttgcagcaaaatttaatactacccaataaaagctaatttgaactaatattaaattaatagatttatgatcgttaaaaaaattagttaagttggtagttttattatggatgtcaaagttacttaataaatttatgagctgtaagaaattagttaacactataattataattatgtacgttagaatcggatcttgtataatttaaaaatacagatgatgataataattgcttctggttataagttaagttgtaacaaaatttaatactattgtaaataagttactttatttggataaatgcatataacttaattttgatcaaagttaaattaattagtagattcacagaccgttaaaagttagttaagtcgttaatttcgttaagaaattcataatcatattttgtataaaaaaaaataatcaaacgtaaaatttcaattataacaaaaaatttaaatttattattaatacattaaaaaaaataaaattattatatgaaatttgatgaataaaaaacacttgggccaatgttaaagaatatatataatagttatttcatatatatttctgtgatatattttataacctattttatattattttattttttatattttatatgtgagaacatatatgatagttattttatatattatatttttcaaaatataaagctattttattccaaattttagaaggtaaaaaaacagtttgtttatatttatagaagtctctcctttttaaaaaaaagattttgaaagtgcagattgtcatgtattacacaaaaaaaaaaaaaaaagaatgccaaaacacctcttccagcggcatatagttgtgttccaggattggttatgcctatgaaataaacgagtttgcgtcaactaaatccataaataagcatgttaaaaaacataaaataatataaatgattcaagaatattattctattatccattttgtcaaccaggaaacatcatatcaaatgtgtctcaagctgtcaaaataaattctcccctccctccctccctccactttctcaatttgaataatttacccaagtaaaagattcagctgtataagtcaaatttctaaaatgctaaattcatatctaggtacaattaaacccttaacattttataagtttatgaactaaaataaataaataaaataatccaaagagaagggaggaaagtttctgaatctaaatctctcttctttctaaaggctttttttttaagtctgtttgcgtctaattctaacagcagagcaggaagggcatttgacgagaccgttttcattgcaagccaaacaagtcctaaaaccacattccccagcgtaactgtaaaccttatggcttccatcacattcatcgcacacaacaaatctcagccctccacaagaatcacaaccattcgaatcgaccactggcagcccttggatcagcatcttcaactcaccacactcgttgagtttccggatctcgtcgcagccacctacgaatctcccacctatgaaaaccatcggcagattcagtctcttcgttcccacaatcccctgtagctcgtccagagactcagcatccattgacacatctcgttcgtcgattgggacacgtagccctcgaagtatggatcggacggttctgcagtcctcgaaggtcttgcggaccacgcgtaagctggtgtagaagatcaccacccgctggtcactgtctggtaaggacagagttgggtgggaggggttacggtggtgggcccagaagcggaggactgagctggcgatccggacccggtgaaaaatggaggcccgtcttgggctgagtaacccgacctcggtctcaggttcgggtttttcttcttgaagtagggtttgtatgtccttaaaggatgagcaagagaatgtttgtggccgtgattttggtctctgaactctgctgggtgatcttagccatggcggtgaccacatgaccgagagagagaagaaaactaagaagactaggtgagagagagaaagagagagtagaggtggtgttaatggggaactaggtagcgtaggctaagttaatttaaggggtcattaaataatagagcatataacgggagagtgacctaataaaggaataagtttgaggcattaatacaaagataagaataaaaatattcatgtacgttagggaaagtccagaaatattatatttctgtcttaaaatgattttaaggaaagtgtttaattttctatttgtaaaaagaaaaataaagttctttttgcggaatgcattttgtacgttaaaggggtgaaataatttttaacatactattctaattgctatataatattagtatatatggtcaaacagaatcaaaagtactgattttttggtttctctagttcgacgaacaatgattttacaacagtaaatacaattgtggagtagaattttgtatttccattgtattttaatttcttttaccaaaataaaatacccaaacaggaaggatttgaattttaaatgaatatcgcatgaatggatattataaatttaatgattttatcttgaatgataatttgttttttt

SEQ ID NO: 36496 - DNA, 4820 bp, Cannabis sativa
aaaaaaaaaaaaaaaaactcagccacttatactagctctctctcttaccaagatttaaccaaataagtaccccaactaataaaaaatacaagccagccaattagaaaattaaaactcagcaacagcttctaattactttgtggcctattcttgtgcctcattgtagtcatattacgcatatttgaggttgaaactgggctttcatgtttatctatgctatattcagagtctagttttagtttttcctttgtgagttcattttgtatctgctgctaactgagatccaggctacttatgagttgcatttttattccttgtgcagaaccttacaattacttcggtaggagggggcgaaaagaaccagaggctctagctgctgcctcctcaaagcgcctgtttgtagataaccagccttatttagtcagtggtcacactcaacatggatttggtacaaattcactgccttccaatggtgttgtaggctctaagttctctagccttttaaggttaaaaattagtcagcttgagactcccaacaacatactttccatggctgagaaatacaagtacatgcgggagaccttccggaagagattagcttttggtaaagataatgattggacttatttaaagcttgatttacatgtgtgctttggattagtattccaatgcttctaacaagttcttaaagaaaataattggatatttacatcattaaatatgataagctttttctacagaaaatgatttgaaagtttgaacctcatttcatcaacaactttctttcatagattcgttgtccctcttaacattgtaaactaatttattttcttgctccatctgtgattcttgcttagtctcatcttagggtgacattttatccatctagggaatattctgataaattgacatattatatgtaacatatactgctgatggaacatgaattacataagaaaaacctattagatgtacatttaatgcaacacagatttatttttacttgagtggtttgacctggggttatttattccattagctgtgtttatcaattagttttaaccagatgtattgctcaagtattttgtgtaccgttcttactataaacagtacgagtttattagccttgtgatgtcataagactatttgtatgaatgaatcgtgtattcatggtaattgacttcttctgcagggaaatcaggaattcatggatttggcatctttgcgaagcttcctcatagagcaggcgacatggtattataactgcaaattataatttaaagttttattgctagacatgatacccaacaagaaatgataagtttcttcttttacaggtgattgaatacactggagaacttgttagacctcctattgcggacagaagggaaaagtttatatacaactcattggtggtaagttatcagcttgtacttgatatgctcgttcagatgcatgcattattggtgatgcagttttttactttattataaaaaaattaatatctctgtaattatttgatttataagtactgtgaaaaagtatgtttctgcaaccataggaaatttggtaatcattttgtttgctttcataatgcacagggggctgggacttatatgtttcggattgatgacgaaagagtcattgatgctacaagggctggaagcattgctcatctgattaaccattcttgtgaggtgcgtagtatttttattggcatgcttaagttttgtggtttacttttttgagaggccttgtactatttcccaataattttaataatcttatatcaatgataagtttttatttctacacaagtacatgaaactttcaaatcatgaaacaagcttaactatgtttgcatgctcccggtaaactaagcgtgacttttgaaaaatgactattttgctaagcacccaatattttaaatagaaaagatgacacggaccattattaacttatttttattttcatggatatgttatctatctcttttatgtgcagcccaattgctactcaagagtaattagtgtcaatggtgatgaacacataatcattttcgcaaagcgagacatcaaaagatgggaagagctcacatacgattacaggttctcctaacatctaactgctagcaatttttcgactattttcactgggtgcttagtttcttctcgtgttacaggtttttctcaattgatgaacaactggcctgttattgtggtttcccaagatgtcgtggtgtagttaatgatgttgatgcagaggagcgagcggcaaaattatacgcacctcgtagtgaattaatagattggagcggagaatgagtggtaggttgtgtttacggtctttattgttttttgatgtcattattttccgaagtagtcttttcgactttgactcagtaaaaaactttttatttctcctggcagtacttataactgatcggatcggattagagattatacactatatcaatgaaaggaatatgaatctaaggatttattggtacattgtgtcattgcattggtgagctggttcaacattaagaattggaattcatctttgatgcttctttcatttactttttgaggtacttgtggttggggtttcattttgttgctttaggttaataaaaagattattttgatattttcttgaaaatatctcagaaaaaggaaaaataaaaattaaaagcaccataatcttacttgttgaagacaaatgtttcacctttaaacatctatacatggaaatctggggatcatatttgctaccagtaggcataactgagttatcgaattcacgattgaatatccagtttgcttaaccagttcaatgcttcttttaagtgtgtttaatcacctgtgctgtattcatagaaagattgcttattcagccaaacagttgatatatggggaacgtatattggagatcaaaaggagtgaaattttcttatcctcttaggtcccatccgatgagaggtcctttgtttatctctttatagaaagcaagatacggcttggttgcagactactgtttttaatgtgcaaattctgaaaagtaacagttgtttctttggatgggcagtggactggaaattttctagtttccttcagttactaaccattggtaggaatgttactaagcatgagtgaacctaaggtttgtgtgtcgacaacaaacaggaacttcccaggccgaataggatgttcatagtcttcgagttgatatgaactcgagtgaaagtttgcgagtacttctggacagcatatcgtttttcagtggggactggggaggctaaagcttgacttagcttctacatagcatcaacgggggcacaacgtctcctgaggtcttagtgtcatatatccaattattatatgttttgtttaggacataattgccttgagtcttgagtgtggtcattgttttgccgagtataagtttacccccgttttgagttctttcttgtactagaagaattgctgtttattactattagctagtactataatagttcttatctttggggctcaatttgtcccttcatgggaactttgatcaggagccattggtaggaatgtgccttgcacttgcacatctctgaaatcaaaaggattactgtcacctagatgttgtaaggttccccgtaattcatcacatagctgcaatttgtgagaaaaaagttagcattgctgttgctttctaatatttgatttctgtttcgcataggggacttattctattttttgattttgagcattgctattaggtgcttatagtgctcaacaacatttagcaaatgcttaattataccaatagcattatgacatctcatggtggtagtgggtaccattgatgccctttagcgtttcttttggctataactatcgcctttcaatacgactcttcatttattttctttattcttgcaatatgtaatgatgttttggtttattttctgccatcataagatataattatttctgtatactgacgatttcttttcatttccctacatgcagagttaccatgtaaaaatattctactgtgagcttttggaaggattcttttgtgccaaagaaatgagcctaacaaaccccatcagaaggttgtaaagtttttctttttttgttttgttcaaactatgtaatggcaagcaattgtgcgcggcttttcttgttcatatcgttcttatattgagcgtatagattgaggagatgttattaggaaccttaggaaaatttaaatgtcacgtgctggaatagtaatgttgaattcttacccacttttaagttggagtgcacaattgtttatatgaataacatttttaccctttgtataagaagtattgttatgaataaaagtacatattgattcatatcgtgtttcaatttggagtcttgcttggtgtgagtgtgacaccctaattcaaataccaaatgtgatgctgttgcaaatattttccaaatatctttgagataaattactctcatttctctcttactttcccaatctttatctctcacttgattcgtcgtatgcttgaagtctattgactttgaccctttctcacttcacccgagctctctcgacattgaacccatgcctcgaagcaccccaaaccctcggcattgcacttaaaatcgttgaatcattgagatcttgacccatgcagctctctactaagaccccaacccacttagtcccgatcaacctggtgttgcacctagactaacaatgatgattcgcaaaaggttagggttttcgtcttttaacttatcttccattgtttgctttctttttttttttttttcttt

SEQ ID NO: 36497 - DNA, 7455 bp, Cannabis sativa
  modified_base (5228)..(5232): a, c, t, g, unknown or other
atcaacggctgtggttgttgcagctctgtcctcaccgccatcagctgccggaactctgctggtatccctccgtactggtcttccattattttcagtatactatagagagagagagagaaagagcgagagagagagattcgatttcgaagtgattagaaataagaataatattgtgagtttttttattaaaaaaaaaaaaagaaaaaggaaaacctaaaagacaggatccgagtctaacgcgactaacatacgtcactctatcgtcactggtgagaaaaagaaggggccaaggtgggtcccggactctctccccgactggtgaagtgagatgagcattacgtgatgatggagtagccaatgaaagagttacacgtgttatgtatggttacacgggggagggggtccgacgtttagtcatcaattcgtagaaacaaaatagagacattacatagaaaaaggtcaaaagcaggggtacgtacgtaacgtaaataaagttaaaatagtatagtacgtacccaccacacactatcactattgctactactaccactatcagtatcactcccaactctcaagtgcagcttcttctcaaaacaacttcattttttttaaaaaaaaaatattactacgcaattctaatttttatattttagatctaaactttttacattacaataaacttatacacttctctatataaattctttaaatattttttttgaacaaataattctttaaatattatatcttaattgattcattttaatatttctcttaaattcaataaaatttctatatcttaattttatgggaggtaacataccagtacaactccctctccaaaatcatatcagattttttttctcagatttctttattttatgacaatatgtttattatagtaatgatgaatatcctatcaattttcaaatattctcagtattttacattgtcaaaaaaaagttttaattatttgttgcacggcccgtgtaaaaataattaatttgaactttattttttacattataaataatttgaaaattttcaaattaaattcctttactgtgaatattttcatgaaaaaaaaactctggcttctatattttccgggaaggtgatgtactggtacaacacaacagacctccccaaatatatatagcaaaaataaaatataaaatatgtagaatgtcacaaaaaaaaaaaaaaatactcctagtcacaataaaatttgtgactaaaagtaaaattgtgactaattaaattattattattattatgtgactaaaaattctgttactaaatgtattaatcacaaaaatgataatttgttggaacttttttctttgaccaattctttaaaatttaaagattgctgtattttacagcagctattaacagtgctagctcttacttgtaataagttttggttagtagcattagcttttgacccaaccattgtttaggcatggggaatggaggctagcaacatggctcaccttaacctatttttttttgggtcgaagctcatgacttaacttaacttgctttctcttcatgatcatgcgcgccatgactctcgatctcgtacttgtatttgtatatatgttggtaccacacgcatccatctatattaccttatttttttcctgaccaagaagtttgtactcttttctttcttaatataaccacgtgggatcgactgaattaatattattgatgagaccgatcttagccaaattcctttttctctatgtatctctgtcttatcattgtttgtattttgattgtcaaatcacttgaattagaaaacgatagttacggccactctcttcatgtgatatatctagtacatattaataccaaccaattgttcaaaaaaattaataatgttagtgtttatgatcaacggccacaaactcacttgatcaaaacgtcaatatatatatatatatccttgttctactcatattcacttttattattatattaaggaaatactaaagagtattctacagtacgtataccccatgttattgtatgttagtgactaagtttataaaatattaattaattaacacttgcattttatatgcatggtagatcaaccctttggagagagacataaacagagaaagatgataggagagaaataaaatatagggggcgcgtttagtaatattttgcctatatacacaataattaattttgggagttgaatgtcagtgttatagttagttctgttattaagttaattagtacaaatgttatatatttgtaagtttgtaactaactcttaccttgtaagtacttgtaactaacttatcttataaatactctgtagatgcttagcatttcttatggttgagaaagttgaaatcaagtatgtataggataagcatttcaaaattaattcacaaacgagagtatgcttattttattttatatatagtataattttttctacacaataacacaatatgagactaattctaatacatgcatccaatactattagtaatacaccctctttatatctggccttggaaagtgtgagtataataaatgacctttaagaaattataggaccgaacgtgacatttgaaagaatcctataagaccaaatcgagaaatttgtgagtgtatacatcgagaaatttgtgaattttttaaaacaagtcacagaccacaacacactacatgaaaaaagagtttttgccagcaagtaattccaccaacaaaagttgctggcaaaaaatgatatttcgccagtgaaagtcacatttacatgtgacttaaacattggccaccgacattaattgactcgacgactaagtctcgtcgagaaagttttgctgataaaaaaattcaccggtaaaactattttcatgtatttccttattcgtggaaaaatttgccaacgcataaaactttgcaaaaaaatattttaaatagttttattggtgctatataatgcgttggtaaaatattttttatataattattttttaaaatttatttaattaaatgaaatataaatgtaatttgaatttaaatttaaatttaaattaaaatttcttaaataataatatactaatataattccaatcgcatattataatgacactaaattcaagtaaacattatagaaataattaaaaaatagatgtcataataaaatactaaaatttacactaaaaaatactaaataataattacactacaaattaacagcatcattgtcatcatcgtcattctagttgggaggggagtgttaagaatttgaagaacataacagctccccaactccaaattatagaagatagaagtcttgagcctctcaacagttcaatatacagcagcagcagagtataaaatcagagtatgctacagctcagcatatcctttttatctagaatattcccaacgaccttattatatttttttgccaatgatcatactttttgctgtactaattttctgttatgaatatgtaattgtattgtgccatttcttaatacaacagtggccctctcttatattaaacctctatataaggaaatgcatcacctcactcatatttcagctgaaattttcatttatcaaccattactatttttactactaaaaaaattataattctcgatggtttcacaccgtcgggtaaaaaattcttgacggtttataaaatcgttgcctatacaagcgtcacgaatattgggtagaacaagcgacggtagaaaaaagtcgaggaaaataatttctgacagtttaaaaccgtcgactatagtcgatactataggccacgatatatagttgatggttttaaactgtggcctttagtatagccgacggttttaaaccgtcgctatagtggatacccaaaaaatcttcatcttcatcttcctcaaaaccacttctcgcatttatcgcatccgctctaaaacctttacaagcttcatcctcctccgttgtcgttgtgcttgtcttcctcctcattgaaactttcttttacaagcttcaaaatgcctttcatttgacgatccttgaaattttctattgatttccaagcttcagatttcttttacacacacaaggatcaagatcatcaaatcaaatcatggctaataaaaatttaaacaataaataagagaatattgtgcttacctttatgttgccacgagagagcggacgagagggacaaagcaagaaagagtggaggggaaggatggtgtggctcatggttgtggaggagagagagtcgggaaatgaaacgaaacaaaatttataaatgactttgaaaaaatgagatctaatttttttgcgggggtttatatcttaagatgcgggaaataaaaatttaaagtttaagatgcgagaaaataaaattttagatttgaaacgcgttaaatattaaatcatgagaattactgacagttttaaaccagcagcaatttccctttaaaaatacactagattttttaaggcacatttaaaaatcgtcgcctatacatctcgactgtttaaatcgtcagaaataccctatttctcctaatagttttaattttttttttgcaaaggttcctcataaaaatattttaggactcttgcgaataccccctttttgtaatagtgtttctatcttgaggcacgtgatgaagatccatctccaggtggaatcggagacatctctggcatgttgaatctaggagcaatgctggaaaaattcctaataaatttctcttggaacgtatttaggtactgtttctgcatcatttgttgcttataattattattacgttcttgttgcttttctagccttcgttttaacgcctcatattcctcgatgtttacaatagcccgtctggagccctgagccctgggagttgccctttggcccctgccttaataagtctaggtaaagggtcatgcctctcaggtggcgtaactgctcaccaagcacttgtgtgtgttgagatctacatcgtaccaatgaaggacattactctgtggatgtttattttcgcgtctctcaaccatattttgggccataatatatatttataataaccatatactttcacaacaaaatatcttacttttactcacaataaaatttgtgactaaaaataagaaagttgtgaccaattatataaatcactattcttatattgtaactaaaaaatctatggttaaatattgtattagtcataaaaattacaatttgttgnnnnnaaatgtgtttttagtcacaatatacttgttatgagtaaaattaaattagtgataacttatatctaaatattatattttagtcaaacgtaattttatgttgtaactaaaagtcacatttaattacaaaaaaaatattttgtaattaaaaaattgttactaaagtaattattttttgtagtgatctctaaaaatgtgcccgacaataatctctgatccccataaatcttcatcttgtttcaattttttgcattcttttggactcttgaaagtaatttaaaataaataaaaattagaaatttaccaatgtctactacgtaccgtttgttgcatcagctgggtcaattaattatttttgactagtactgaacctactggttattaatataatgcacacgtcatatgtagaactcaagttatgcgtcaaggatggtactgtgctagctagtttacattaatttaccatatatataattattttctactttggtctaaagatgtttacttaagtcatggactgtggtatataatgaaagttgtcatacatgtggcatgaactaagaaactactacaagaaatagaaatgtcatttttgccaaaagttgttattgcgctggtaaaatgaaatttacttgtgatgtgttggcaaaaggggttgacaaatcaatgttagtattagaatttttgccagcataaaatgaaaagcgctggcaaaaatgacttttccccagcgtgtaaatacgctggtaaaagttagattttagccactgtaaatgtacgctggtaaaattttgacttctttgccagcgcagttagcgaaatgcactggtaaaagttcgcagtatcgaactgtgctggtaaaaataatatttttgtaatgtatatatcatatatatttaattaattagtgaagaggaatgatctcatcatatttttactattcttctaaagtactatatattactataaaatcaatatccataatgaacacttgaggctagttcaagtagctataggggtgcgtgtgtgttggaagttctaggttcgagtcccaaattatgtatgatgtaatatataaacgcttaaataaaaaaaatcaatatccataataatataaaccaagcaatatttctatattgataaagctaaatccaattgattagttgatcgtttttaaatttgtatattggaatgagaggtataagcgtatatatagaggaaagctagctaatattatattgtctttgcggtagcatgcatataccaaattcattatacatttataatttaatttctctattaaatgacgtttttgtaacatttaaatttaaactctaatacgtttttagtaaacctaaataactagattgaagactacaaaattttcaatatctcgcacgccacatgtatagtaaattttgtaaattcagcattctatgtattatttataattttaaaagtatatattatttcgtataaaagtgatgtgatacaaccttgggtttgaagtattataccgtagtttttctactaagctgtcgtaattaattgtccctgcacaataattttacgggggcgcttcgggaaaaatagagattgaagaatgtgtaattgagtttttttagttagtgcaacttttttcgtggatcccacgtagtgatgcacacggggcggggaattagcgaggagtgctccgtccccatcttcattaagaattttaatccccatccccgccctatcactgcttattcccatcagagacggggcggggaatcccctatggtaaaaataaagtttattttaaaaaatttaatgtataaaattattaaattatattaaaatattacatattatttactattcaatatagtaattattatacaaaaacacaatttcaaaaattgtaaaaatgatattaatatactaaaaaaatacaacgcatctataaaatagggtaaatagcagcataagtacccaaagttttcagtttgtaagtgacataatcccaatgtttatttttagcggcataagtacccaatatttgtaaaactgtaatttttctctaatttcgtccgtacaaaccctgttattttcttaaacaggccacatataaggtctagattcttgatcattaggtctagacagacacatgtgtatcagttacttctaaatgttcctttaataaatttaaaacggagtctatattgacaaaactgaagaaaaatt

SEQ ID NO: 36498 - DNA, 14819 bp, Cannabis sativa
tatggagctaagctcaattgaaagacacaagaagtcactatttggaggctttggttcaaccaattcgattaaagaggaggaagatgaggaagctcggttgaagtgggctgccattgaaagacttccaactttcaaaaggcttagaacttcactgattgatattgatcatgagggaaaagaagctgaaggtatgagaatggttgatgttacaaagctcggagcagcagaacgccatcttttcattgacaagctcataaaacacatagaacatgacaacctcagattattgcagaaactcaaggagagaatagacaggtataattagtaatcctactgttgtatgcattcatatttagtgtttgaacaagtatacatatcttaagcagtcgtatgatgatgatagttcattaataatcttcttcttgtttagagtgaatgtgacattgccaagtgtggaagtgaggtataggaatctgtgtgtagaagcagagtgtgaggtggttccaggaaagcctctaccaaccttatggaactctgttgtgagaagtgtattatcagtaagtatatggtttttcaattttcaccatttttattattattatttgactgattctatgtgatgagattgttatgatcatatcaaataggtggttagaaatgcaatgctgtgcaactcagaagaatccaagataagtattgtaaaagatgtgagtggtatcatcaaaccttcaaggtacataaacttctgatcataccattcaagacatgattaagagattcctaataatctgaggtatgagtctcgtgataaatggtgttatatggtggctgcaggcttacacttcttcttggcccaccaggctgtggcaaaaccaccttcctacttgcccttgcaggaaagctagatcaaactctaagggttagtgttaattttttttaagggaatttgggtaacacactcacgcaaccaaccacttgagttggcacaaataacatataactttgaaaaaacttatgaataactgcaaagtcaattatctagtatgagaaagttgaaaaaaggggaagactcatgttgatccagctccatcattagaattagagaaattatatagcagaaaacttgatatgaaatgaaaatataatataacaagttggtaatcacaatgcaccacataacttactacagacttacaacataatttaattttctgaatacataaatatgaacagagctatgactaccaaaatacttgttttagatttccagtaacacaatatatttctcatactcaataataatcaacataatagaagtcctaaacctttgactccaggtgacaggagagacttcttataatggttacaaactagatgactttgttcctcaaaaaacctcagcctacatcagccaatatgacttgcacattcctgagatgactgtaagagagacaattgacttctcagcacgctgccaaggtgctgggagtagagctggtaattttccttttcccctattgatgttatttctcttatttaatacttttcccataaaaaagatgaacttgaaacttaacagcatatgtgaaacttgaatatctttatggatgagcagatatacttttggaagtcagcagaagagagaaagaactaggaatagtccctgatccagacgttgacacatacatgaaagtaataatatgaacataatagtccttatcagcaatttccagaaacctttcttaggaatatacaaaataactgtgtgtttacattgcaggcaatttcagtagaagggcaaaggagaaatctccaaacagaatatgttctaaaggtgggttcttttgtagtttaggtaatgaagtagttgaaggaaggtttttaagtttccatccatcctcacatgtacactgcaatactttttgttcttcctcttagatccttggactggatacctgcagtgatgtaatggttggcgatgcattgaagagaggcatttcgggtggtcagaagaaaagactaacaacaggtggtgaaccttagatgtgcaatactggctatcttggaagaaaagaaatgatacaaagtactaaaatttgttagttttttcatgtggcaggggagatgattgttggtccaacaaaaactttatttatggatgaaatatcgaccgggttggacagttccacaacctttcagatagttgcctgtttacagcattttgtgcacataacagatgctactatattagtttcactacttcaaccagcaccagaaacctttgaactatttgatgatgttatattaatggctgagggaaagatagtttatcatggtcctcgtactagtgtacttgagttctttgaaaactgcgggttcaagtgcccaacaagaaagggtgcagcagatttccttcaagaggttcaaaaacatgcttttatactattcatgtcatggttttatattactatactcttttgtctaaaactactccattctttactgtctttaggtaatctccaaaaaggatcaaattcaatattggtaccacacagaccgtccttacaattatgtctctgtggatcagttttctcaaatgtttaaaaggagtcatgttggaaagaatttatatgatgagctatcaaaaccatatgaaaaatctcaaagccacaaaaacgccttatcttttaaaacttactcagtgagaaagtgggagctattaaaagcttgtacagccagagagcttcttctcatgaaacgaaactcctttgtttatatattcaaaacagctcaggttattagctttttaatctctgaactgaaaagagtagcttttttttcactatgaattaatgacacctcattcagttcttcttcctctttctttctttctttctttctttttttttctttctcacagcttatcatcacagcattcatgacaatgacagtattcatacgtactgaaatggatgttgatttggagagtgcaaattatctaatggggtcattatattatgcacttgtgaggctcctgactaatggagtggcagagctggccttgacagtaactaggcttccaatagttgataagcaaaaagcattctatctatatccagcatgggcttattctattccagcctctatattgaaaattccattttcattgatggattctctgttgtggacagcattaacttactatgtcattggatatagccctgaaatagaaaggtaaggaggctagtaaaagagagttggccaaatgtgaaggcttttaacatatgtgttgttgttgtattcatattgtacaatatatttcaggttcttttgtcagttccttgtgctatttgctcttcatatgacatcaacatcactgtgccgttttattgcctgtattttccgaacaactgttgctgcaacaacttgtgcctttttggttgttatattaatgttcatgctaggtggtttcattctgccaagacgtaagtcacttcctagtttgagttactttgattttataggaacaacaacatgagtagtaccaacacaggcttttgtttgttgcagctgatttaccttattttttaaggtggggattctggctttctccaatgacatatggagaaataggcttaacactaaatgaattcttggctccacgctggcagaaggtaatctaacttagacccttgttaactttcaaaagattatgtatgctaatagctcttatcttttttgtagatcaaaataggaaacatgagcattggaaagaatgttctaactaatcatggtctagactttgaggcctatttctattggatatcagtagcagcattgttttgtttcacaatactttttgatcttggatttgtcttagcattaacttacctgaaacgtgagttaacttcaattgatcttaaacaaactgtaaaacgacacatgacttttattctaactattgaatttttgtaaattcagctcccaagctgtccagagccattgtttcaaagaaaaaaatgtctcaactgcaagcaagaaatggttacaatgatagtacaaaactagataataaatcaaccccagttgagctttcacaaaccatatcagaaacaagaaaggacggtgagaaagtgtagttaaaaattcttgtaccaatataagcacattgaataatttgtaactgattcaagaatactcgatggtgattaattatacaggtaagctggccataccattcgagcaactgacaatctcatttcagaatgtgcattattatgttgatacccctgcggtaattcatcatttttcttagattcaataacatgtatagtcatagcacttgtatgtttaacatgtatgttccttgtggataggaaatgatggagagtggtttcactgagaaaaggcttgagttgcttcaagacataacaggagcattcaggccgggggttcttacagctttgatgggtgtcagtggggctgggaaaaccactcttatggatgttctttcaggaaggaaaactggtggtacaattgaaggggatattcgaatatccggttaccccaaggtccagaagacatttgcaagaatttcaggctactgtgagcagactgatatccattctcctaatgtcacagtggaagaatcagtgatgtactcggcttggttgcggttgccacctgatactgatgcgcaaacaagatatgtgtgtgacattctctcatttgcagataaattactcaattcttcatagactttcttacagataaaccagatttaacattgaattgctttcttttacataaattttataggctggctaaatttagtgatttctttaagtaaggacagttagtaataataacaggctctatcttataatcatgtagaggtttgtggaagaggttattgaaacaattgagctgaatgatataagagattgtatagttggtattcctggacaaagtggcctatcaactgagcaaaggaaaaggctaacaatcgcggttgagcttgtttctaatccatcaataatatttatggatgaacctacctcaggattagatgcaagagcagccgcaatcgtgatgagagctgtgactaatgtagtagccactggaaggactactgtttgcactatccaccaaccaagtattgacatatttgagtcttttgaggaggtaggatgtatagcattttctacttgcatcaaaattttaggcttcatgtgtcgatgaccagtgagaattgttaatttttttgcagttgattttgatgaaaaggggagggcaaatcatttattctggaatgctaggcccacattcaagcaaacttattgaatattttgaggtagatttgcttatggtaccaaaactatacttataatgacacaaagagccatttttccactattaacataataatgttattgttgtggtaaattactgattccagtactgtttaccatgcatagagtattcctggtgtgcctaagattaaggataactacaatccagctacatggatgctggaagtttcttctacttcagttgaagcagaacatggcatagattttgctaccatttacaaggagtcatctttatataggtgagtttcagcctaagaacatcgcctataatcatcattctctccaaggcaaaaattagcagagtttttaaattcttgttgaatttccagagaaactgtagatttggcaaaacaactgagtgaaccaaagccgggttccacagacctacacttccctactcatttcccacaaaacggctgggtgcagtataaggcttgtctttggaaacaacacttatcctattggagaagtccccaatacaacttggcacgtttcacgttcatgattattgcgtctgtgttgtttgcgataatattttggcaaaaaggaaaagagatgtaagttcccatttaatctcttgaacatattaattctcatgtaaccaaattttgctgttgacaagaagcgcctatggaaacttctaattcctttcattatttcttcaagtaacaatgagcaggatctgtttaacatacttgcatcaatatatatggccgtcatcttcctaggcgtaaacaactgctcaacagtcctgccttatgtggcaactgagcgcaatgttttgtaccgggaaagatttgctggaatgtattcaccaaaggcatattcccttgcacaggttcacactcaccaccctaaaaattgattgagttgtggggtatagatagtactttgctcttgtcttactaacaaagcaactctcttgaatgatgtaggtgactatagaaattccttatatattggtacaagcagttttgtatgtgctcattacttatccaacaatagggttccaatggacaggttacaaggtcttttggtacttctatgcaaccttctgtacatttctatactttgtgtatcttggaatgttcatagtttccattagtcataaccttgaaatagcttctgtattatcgagcgccatctatacaatgttgaatcttttctcaggcttcctcatgccaggacctgtaagtaactcttttcttatgactttgatttggtgtagaaatcaattggattaaatctttagacatagttggctgacgtagcttcattattcaccatgtatgcagagaattccaaagtggtgggtgtggtgctactggatttgccccacatcttggtctcttaatggtcttctgacttcacagtatggagatatgaacaaaaaaattacaatatttggagagctgaaaacagttagttcttttatagaagatttttatggttttcaacaagaccatttagctcttgtggctattgtgctcattgctttcccaattatttttgcatcactcttcacttactgcattgggagactaaattttcagaggaggtaatgtaaaagctacaaggttttgctcctcggaatgtagtgaaaatatacatacaaattttatgatatttctaaataataataataaaatgcttgttacaaatgttgggattgtaccttttagtgtcaatatgatgcttattatatccaaaattaaataaattcactaattattgattattcgggggcattcaagaaattccaaacaaaatcctgaaatcacacctgtctcgagtatggatttagacatgaagaaatatgctgaagatggcatcaaagttatttgataataataactatggtagttgaataaagaagcatgtactgttggctttaatttacaaaacaatataatatgaatgccttttaacaacgtcatctcctttgaaagttcaactttccaataaagtaagcgaaaagagaagcaaatattaagggaaacaaaataagtacaacagcaacaacccctaaaaagctgtgttgatatccaaagtaatcttctaagaaggcagaaactgttgttctctctccaaatgctgagatttctttctctaaatctccatactgtgaagtaagcatgccatttaatgcccatgaagaagggcataggtaatacagccacaaccaccacttgggaatatgctgcaaaaagagaataactcattttctcagttagtttttccaaactcaactttgaaaatattacacttctatactaaatgtttatctccattttaaagtatgttattaagtatggacttccaagtacctagacacctttctatctcttacaatacaagttatacaacaaacatatttttagaagcggtataaagtggagaaatgagaagttagcttactggttttggtacaataaaaccggtgaaaaagttcaacattgtgtaggaagatgaagccacaatggcagccagctgaacatttggtgttaatgataccactaacattccaaggtaattgaaagatagcaacgagcagaaaatgctatagaatgaccaaaatatcttatagaaagaataggagtaaccaatcattgggtatgtgattgctacatatatagctgcttgagtaaacagatagggaacctcaataaccacctacaaaaatcaaccaaggttactataaattctaactctatagtcagctgtaaaaatctaacaatttacctaagagttaaagaaaacatttgatattataaaaaaaaaatcttgaacctgtgcaaaagaataggcccatggagaatgcattcctgcaaatttttcccgataaagaacattgcgctcaattgagacaacaggtagaaccattgagcaattgtttatgccaaagaatgttatcgcgcagaacatgctaccaacaatattgaagatgtcttgctggttatttattgtctttccttgcttccagaacaatataccaaacatgatagatgagaaaaacatgaaaactattcgcattaagttgtatgaaggacttctccaataggacaaattttgcttccataagcatgctttgaactgctcccaaccattttgtggaaagcgagtacgaaaatgcaagtctttcgagccaggaactggtgagttcagttgtttgattaattctttgttctgtctgcactcagaagagcaatgaaaaaagtgcaagcacaactttagaaacaaagattcatgagaaataacattgctttctttgtacaccagtaaatagaaacacggataaaatggaatgtgaaaatattatgttccttgtattgcatatgtatacttactcatgcaagatggagcctttatatatttgtgcaaaatctacaccaatttcaacttctgcagattttgaagtaacttctaacatccatgttgctggattatagttgtctttaattgaagggacccctggaatactctagaaacatgaagagattgcatcaacatttatttcttttccagatataaaatttaagcactactactgctcaagtactcaaaaaactgacctcgaagtaatcaataacgttccttgaatgctgtcccagtggaccagaatatattatgcgtcctccagttttcatgagaactaactgcagtgatgataagaaatggatcaaattcatttggtttatgctcagctaacaagaaaacattgatactaataaatatgtgtctgaacttcataagaatcaactggcagcctttaatgtagaaccatttaagaataatgttgtccatcctaatcaatttacagcagctacctcgtcagacaatcaatataaatcatatgattaagctagaaacaagacagcagaaaacaagttcaaactaatcatatgatttaagtggcagcaaacactaaaccaaactgtggagaacagtgatcttggtattactttgggttgtttagtttgaaagaaattcgagaattttttagggtcgtgaaagttcagcagaggaactttgggagaaaataaagttctggacagctacttgggtgtacaagactaagcattttgaggatttatcatttctggatttgagtagagaatggaaaacctttatgtaaggagtatggtgtgtattttatgtttttaagttatctttccctctaagttctatttgtagttaatttctgttgtagtaaattgtgctaaggttcttgtaaccaaggttttccaacgccacaagtgaagctttcaatttataacgagggaaagtcagtgtaagacaagtggcctctttctctttttcaaaaaaaatcatttcatctctatggaaagttacttttacctcatcaaatgcctcaaagatatcaatacttggctggtgtatggtgcaaacaactgttcttccagtttcaacaatattctttactgctctcataacaatagcagctgcccttgcatctagtcctgaagttggttcatccataaatatgatagaaggattggcaacaagttccacagctatagtcagtcgcttcctttgctcagttgataatccactaaccccaggcatgcccaccaaactatctttaatcacatcaagttctatagtttcaagcacttctttcacaaattcctgccaaaaacaaactgaagaatcaatctatgtccaagtctaaaaacactgaattaactgaagtgttaatttaatgtgtttcatacagctttagtgttcgaatcaatctgaggtggaagtcgtaaccaggcagaataagccactgattcttccacagtaatgtttggagaatgtatgtcgttttgctcacagtaacctgatatcctagcaaatgtgtcatgaactttaggatacccaccaatccttaattccccttcaattgttccacctgttttccttccacaaagaacatccataagagttgttttcccagctccactgacacccatcagtgctgttagaaaacctggtctaaatgaacctgaaacatcacaaaggagttgcagttttttgccttcatagccccgttgtctcatttcctgaaaccacagtaaataaataaataaacaactacatcaattgatgttcatattgaaatatcagaataaaaaaaactaagccccggctatatgatttttaccagtggagtttccacataatactgcacatccttaaatgttaatgtcaagggctcaaaaggtaaaaccatccttcctggaaagaaagaaaaaggagattatagtctaaaatatgtaggaaaacatccttgtattggttcaaatcttgaacaatattaacaaaagacaaaaacacacttacctttcttctttagttctaccgtagttgtagaagcaccagaagattcattgtttgtgtctgtaccattgttgtctttctttccttgaagttgtgagtacttttcataagaaatgagagcacgagttctacccagtgctgaaaatgtatcagagcgtttggtcggctatcaagtatggtgacaatacatttatatgctattgctcaaaaagtgacttactaacgaaagagaatgaacttacgcttcatgaacgtcaaagccaacgtaaaaccaacattgaatagtacggtcaaaccaattaaagcaccaattgaaatccaataaaaataactctcgaagtttaagccccggctttctagtgtttggtggccaagagttgtatttccagacacctttcatcaattaaaatttaacaagttatcattatatgtgagccttctagcattcttattgtcttaacgtgtaacataagtaatgtatttgttaccttttcccatcgaggggcgaggaattcattcacgctaatggcaatctctccatatgttaaaggagaaatccaaaatccccatttcaaccaatcaggcatagaggctgcaaccaaagcactctttaagagacatggcagcagaaaacatgttatgaatacgataataaatgcaagagatcttacaattagggatgatgaagccaccaaataataaaacaaataatatggtgaaactaccggctattgttgatgcaaccgcagttcggaagattgaagcaataaatcggaacatagatattgaagttaaatgcataaagaagagtagaagaaactgacagaagaacctgttggaacagagagaagaggaaaataaacattgtgaattatatcaattcattattttttatgtaatggattgttgctcaaagttttcacttgggaaagtcaaaaggttctatctgtggctaaccttccaaattcaggactgtaaccaattacatagtatgtgagagcagtccaaacagaagcttccaaaagtgaaagtgggactttaaggacagcagttgggatagcaaaagcccaagcagggtaaaagcacatttctatctgtttattgagagctacaattcttgagacagtcaaggacagttctggaaatccatccacaagaagaatgagaagcccatagaacatagaacccatgtagtaattagcatggatgacatctacagccattcgagttcgaagaaaaacagtcattgctattgaagcaataatgactagctgcattaagaaggaagaatggtatttcagaaaaggcagattgaaataaactaagagttcaataattccagccaaaacagaatttcacctgtactgatttgaaaacatagatgaaggaattccttttcattagaagaaattctctccttgcacaagcttttaacagttgccatttggataaggagtatttttgaaaagatagagcatccttatggctttcagacttattatacggctttgaaagctcctcattaagtttccttccaacatagctatccttgaattttttaatgaactcgtcaacagaaacatatctataaggttgttctcttctgttccaatactgtgcttggtcttttctagagattacctgaaagcataatttaacattaaagaaaaagatagtaaaatactgaaaactttgcatagtgaaatatcataaacatagagggctacctcctgcaggaaatctgcagcacctttcctttgtgggcatttaaatccgcagtcctcgaagaatttaaggatgtgagtacgaggaccatgatacacaatttttccttctgtcatcaacatgacatcatcaaagagatcaaatgtctctggtgcaggctgaagaagagagatcagtgcagtggcttctgtgagatgcacaaaatgttgaatacaagaaataatctggaaagtggtggagctgtctaaaccattagatatctcatccatgaatagagcttttgcaggtcccacaatcatctcccctacatcattggaaacaaaatttatgattcattctcttaaaacagaaatgcataacacatttaagctaactttaccagttgtcagtcttttcttttgaccaccagatattcctcttcttatgggatctcccaccattgtgtcagaacacatgtcaagaccaaggatcttcagacaatatcaaacaaattatatatataaagaaaaagttatttcaatacctttttaagaaaaaaggcacacttagagactgtgctcttaaaatacaagtagctacatatatactgcatcacctttagaatgtaatccgtttgaaggtttcttttcactccctccactgatactgcctatcatatgaacaatgtttaatcaaagaagcaaagaaaatccatacacaaataaataattcatttatgacaaatattaagtaccttcatgtaagcatctacatcaggatctgggacaatccctgcttctttctccctcctgctgacttccatcattatttcttcatgcatacaaaacattattacatgccatagaatgttagttatttagaaattaaaacagcaatatacaattatttacatcaaaccaaaaattaagaaagatccttaccagctcggcttccaacaccctgacaatgcgcggagaaatcaagtgtttcccttacagtcatctctggaatatgcaggtcattttggctgacatacactgaggtcttctgaggaatgaattcctctagcttgtaaccattgtaagatatttcgccggaaacctatttataagccactgaagattagaaaaatataaagacacagtgatcttgacaatgtaaaatttaaaggcatagtgatcttgacaatgttcttcaagatgctaaaaatggttacataccttgagagagtggcttagcttttttgaaaaagccatcaacaatgtggttttgccacatcctggaggtccaagcaacaaagtcatcctgcattaaaaccaagtcccatttactccggaattacattaatattactattctatctcgtttcttcatgtattttccatatatggtatgaagtctatcagggaataaatatagtttgtaaggcaatcacaggaacatattcattatcaagacaaataaagaagaagataggaaaggcagtaccttccaggcttaatgatcccactgacatcattaattatgctgatctttgcttctggtgtgcctaaagtagacaaatttgtaatgtcctgttatgaacaaagaaggtcacatggcagaaaagtgattcatggtattgttttgaagccaaagcctccaattcagtaaacaagggactaattgaacttctcaggaatttaatgaggttttaatatttaccatgacagtgttttttactgtgttccatagggtggggagaggttttccattaactattttgcactctgcttccacacacagattcttatatctcacctcaatagtgggtaacttcacaccaactctgcagagtaaaataaaaatcagaaacaatcaagagtaaacaaacagaatattcaagttagcagcagcaacatgatgttttgtgagttgtacctgtcaatcctctttctaagcttctgcaacaatctaaggttgtcattttcaatgtgtttgataagcttctcaatgaaaatgtgtcgttcttgagcccctagcttagtgacattagtgacacgttttcccttgctgcctcctccatcttgaccaataccatcatcttcatttgtaccattattatcatcataggcatcaaacaatgccaaagtgttcctgtcagaagtgggcaatctctgaataacagcccattctaagtcatactcttcattaacattcacagtagttgagctactccgaaagctggaaccattgacatggcttctgaaggaggttcttatactccttcctatctctgctaactcaaaacgcaaggattctatttcatctgttcctgccaactgagccattgttttctttctttccttttcttttggcaatggaaactaaacaacaaaactctacatatccaaacca

SEQ ID NO: 36499 - DNA, 2672 bp, Cannabis sativa
catgccgggtcaatctttgagctctgaatcgtgattatttaaaactatattgtttttgggtccatggttttttcggttgctattctgtttgtttagatagatgttaatgagtctgcttgaacaggttgatgttaatactgaggttggggttgttagagatattcgcttgaaagaactacgaatatatacggactacgggcggtgtagtcgaccattgttcattgtggagaaacagaggcttttgataaagaaaaaagacatccatacattgcaactgagggtcagtcagctgaactcgacacacttatctcttgagttttatttcttcattgttattgtttttacattgatgattggctttaatatttcaggaaaaccccgatgatgctggttggcatgatcttgtagccaagggattcatagagtacattgacacggaggaagaggaaaccactatgatttcaatgacaatcagtgttagtcaatattttttaatttcctgagtggaaatggaaattaagtaattgatttgcactatgagcatgtgaacggtttgtaaaaaatattgattgtcaattattgaaccaggatcttgtgcaagcaagacttaacccagaggaggcatattccgagacatacacgcactgtgaaatccatccatcacttattttgggtgtttgtgcttccattataccttttcctgatcataatcaagtaagtctatctatgatgtcaaataaactttacctattcaaaatatttactataattgttctatctaataaatttgttgcgtattaattagtcgccaagaaatacatatcaatctgctatgggcaagcaagccatgggaatatatgtcacaaactaccagtttcgaatggtatgttaaatctatttatttttctaccgtataatatgaaacatatgtattgatttagttatttttcatttactttttgaaccaaattagttgtgacttattattattattttattttaattattattaatttcaggatacactggcctatgttctgtactatcctcaaaagcctcttgtcactacaagagccatggaacatctccactttaggcaacttccagccggaattgtaaagatattaccttgctttttatttttttgtacaattaccaactttgggtgatgatttttgaaaggggtttctttcatttgttagaacgccattgttgctattgcttgctactcgggttataaccaggaagattctgtcattatgaatcagtcttctatagatcgtgggtttttccgatcacttttctttcgctcatataggtaagattgtttcacttagtcctttttcttttcattttgtctttgtgctcttttgcatcattaaatggtttattggttcttgtgagacagagatgaggaaaaaaagatgggcacactagtgaaagaggacttcggtcgtccagatagatctaatactatggtgaggaattagttagatacagctaatatttagtttgtggcttctcaatgtgttggatgttttattaaagtctgattttgcagggtatgagacatggttcttatgataaattggatgatgacggtcttgctcctcctgtaagcacccatgtccctgttttcttcttcttcggtcctaaagacttttttgtctaattgtctaactgtatcgaattgtataacagggaactagggtttcaggagaggatgttattataggaaagaccactcctcttgcccaagatgaagctcaaggacaagctgcttcacgttactcacgacgtgatcacagtataagcttacggcacagtgaaaatggtattgtggatcaagtaagttttataactgaatcttctttctgatcttaagtggtcattaatgatcttatgatttcttattctgtttttcttttcaattcgtgaacgtacttttaatcctttccaggttctactgacaacaaatgccgatgggttgaggtttgtcaaagtgcgagtaagatctgttagaatacctcaaattggagataagtttagtagtcgacatggtcagaagggaacagtcgggatgacttatacacaagaagatatgccatggactgtggaaggaatcacccccgatattattgtgaacccacatgctattccttctcgaatgacaatcggtcagcttattgagtgtatcatgggaaaagttgctgctcatatggggaaggaaggagatgcgactccgtttacagacgtaactgtgagtacacattatctttgagttattctaatatatttattaatgcgagctaacattatcttagaatctcatattctgataatttgctcttaattagtgttttaatataggtaatccaaattttaataatgtaattttgaacttcctttcgaacaacacaaccctaagctattaagttcactaatactgttttagggacaatttgctgtgtctagacaacgttaattcttctttacacgggtcttagaagttggttggcagtagtgaaaatattttttgattcccagttgctatggaaaacgaaggatgaaatacaattgattcaaagtagtaaagtcggttttgtgaagtatatgatgtgatatgctatgttgaaaattcctctcaattttcaggtggataatattagtaa

SEQ ID NO: 36500 - DNA, 2282 bp, Cannabis sativa
gtaaaataattcccaacaattacaaccattgaaataaaagaaataaactacactagaacaatctctctatttaagaactcttcttgttgttcatccatgtagctttatgaatttcacactatcttccatgatctatcaccatattattagaaataaatttctaaaaaaaattaaattaattttcaaacatttatcttgtctttattagttgtaattaaatgattaaataatttaaatttactcaattatttaaataaaatattttaaaatatttcacagcacaattaattattatatacaaatatataacactatagttaggattcaaaaataatttttaattatctaactaaagacaagatacatgtgcatttaagttaattagaaataatattttatttaagtttaaaaataataaattataaccacctataaaaaattcaagaaataatagtcaatttaataataaaataatacttataaaataattatcatatttattcaaaactaaataattaatatatagttatatgtttataattaattttcaaatcaaaatacttttttaataatattttcaaaatattcactaaccactttttaaaacaatattatttcatatatatatataatatattttaaaaaataaaatatctatatattatgtatgtttagaaaaaaaaaagaatatatataataaaataataactaaaatttgaaaatatgatatcttaacaaaataaataagataatgcacatttaaattttgaagtatcaaaatatctcttaacttattttccaaaaattaactaatctaattaattaataaataaactaaaataaagtaaattatactatatatacactctgtatatataggttcgatcacttaatggccgaatatggtggtggtggacggtcagaaaagaccaaagggaagcccatgcaggtcaaccaccaacggtgttggacagagataggagaaagctctaatcaaagcttatacaggtctcatcgactgggtttcaccagaccacgaagcctcacgactttaggaccttactggtcctactctcctatcgacgtcaatcaaggaccttatgatccaagaagatggataaatcttgacaataaactaatagacttattagtagaaaggggtccaattagagtgagtgatatagagattctaaaagatgttggtagacatttttctacttatcactatacaggaaatttatcaaatggagaataatatgatagaaagtggttagtgtattcaaagtgtttaaataaagtatattaattttgttgtaaatcatttagtgttagttctagtacgatgaaccaattgagcaatgaaggaactaaaaattagaaatatcttggtgataggttaaagagtcatgaaacaagtaacgaacatataatcaacatgagtacttggcttgatttagaatcaagattattaatgaataaaataattgataaacctgctcaagaaagaattaataaagagaaagaacattggagaaattttttagaaagaataattgctcttataaagtgttaagctaaacataatttagcatttcgtaggagtcacgaaaagatttatcaagaaaataatagaaactttttaagttttattgagatgatcactgaatttgatctaataatgaaagagcatatttgtcgtattcaaagcggtaaaattcataaacattatttaggacataatattcaaaatgagttaatacaagtgttgacccacaagataaaaaatttaattttaacaaatattaaagaagcaaaatactatgtaattatattagattgtactccatatttgagccaccaagagcaaatgtctatggtcttaaggtgtgtaaatgtttctttttgttctattgaaattgaagaataccttttagaacttttgaatgtggtagatacttcaagaaaaaggactctttgatgaacttataagagaaattaaaaacttagaacttgataaaatgatgtaagaagacaaagttatgataatggatctaacatgaaaggaaaataccaaggtgtgcaaaaaagattattagatataaatcttaatttagtaatttgtgatgctgctacttcttgtgttagaaccatatcattttttgggattttacaactgttaattctattttgtcatatttaattgacaaaaatattttattatttattttatatttcggctggtgtgttttaatttggtgtccatattttgtgtatctaaactt

SEQ ID NO: 36501 - DNA, 3644 bp, Cannabis sativa
  modified_base (2235)..(2235): a, c, t, g, unknown or other
aaaaataatataaaattgcaatttaccataatttttgaaaaattagttacaataaatcttgtgagtatttatatgggtgaaattaatgagatataattaatagttttttaatcaagataactttgttaaataatagaataatctgttaaaatttaaaaaataaaaatatttaaattgcagttatataatcatttttaatatataaacataaaaaaaaaaaaaatagtgtcagttagttacctgaccagcttaagccgagattgaaaaaaaataacacctcttaagtctcacctaaagagaaagtaaattatcaaaataaacccttcgacccctctctcagccgctcgcgacccaaaccccaaacaccacgctcactctctctctccctcgtcgaactcttcccggcgacccaaccccgacagcctccttcccgcataccctcttcctcatcgaccccaaatgtaaactgtgtccgcccgcccgcgcacctgccctatctctctcattgccgttctcggctcaccgcgccaggtgggaacctcgggctcacgtaaaatttataatcttgattttgattttgtgttattttgtctttctttttgtgaataatataccggagaacttgactggttaattaaaaccctactgtcccttcattatatataattccctcttcgatctccactctctcatttggtatgtataattcattctgggtttgttaatttttgttttgttttggtgttgctttgcgttttggaaattgatttcctctaatttctgtttcttggtttgtataatttttttgttgaaaggtcagaagaataatgggatgcaatgtcatagagttaattatctagaataaaagttgcttaaactaaagatatgctaattaattttttttaatctgtcttggactttgaaaggcttcctttaattttgttctttaattttcctaatgaattcctttaattttgtcgttcaattttgtgtctctttactgcatttcttcaaagttcctttaattgttagtttgtttttgtgacaagaaaaaagtctacgacaagcctttattgtatgaaatgaacattcattgatatttaggaatatatctgattacagcctaatgaggtatcagaaaaatatattggaataagtttctatttcgttattgttttaggagaattggaatcactaattatttcgttatctgattacagctctatttgctggtttcttgtcatttcagcaattaataacttcattggataggccatcaactgttttgcaattgacttttgctggtttcttttcgttgcttttgttacttatataggtttgtgattatttcaaggcttgagcgagcccgtctattttttatactgtgaactgtttattgtgtttgcttgactttttatttttttatttttattactgtggtagttgttcaaatcaaatttcagtaccaaactcaatgttaaaggaaaaaaataattattgttcgaagtaatattctcaatgatctagacagaaacatgctttcaatttcataaaatttgaacatgagggaaaatgggaatgagattgaattaattgatgaaaggatctctgaaccaaactgtggaaattgaagtttaaagagcttgaatttggacatgtatagcattttacaatgctctttattctgttatatatgctgtttctcacattcatataacttgataaaatggcaacgtctgattccattgattaaattttgaatgtcaggaagaagtattgaaagtggtaagagagactgaactcatcaaacatgtatccaaatggttgatatctgaaagttccctttgcaagcaagtcaaatctatctgtgggacgacaaacacattaccttagattgctgtaattgcaaaggttacctataacagttgtatcagggagagtattgacaaatggaactgaacaaggagttgacatgctgataccttcatgtcgaaccgggagaagtagtttgtgcacctttgatcaagcatcctatgatactctactaaggaatcacaggtgaattcatacacagtactagttattaattagctgcaaattaaatatgtttatttttgtaagagtatctctaaggacacactaaatttagtgttacactattattaaatttggcgccaaaaagtatttctacttcaatcataaccctaaaaattacactaaaaaatattccttatnattgtattaattttttaataaaataaaaaaaagttgatatcatattaattaataaaaatcaccataattgttatatttatctaataatttaaataaatttactaattagattaaacataatagtactgtaaaattaatgaaactcgataaaataaaatatcatattgcaataacataaatattacattcatgacgaaaaaattacattaaattaaatcacacattaatgtcattattagatcctggtaagccaaaatatgcatgccatatccagagatcatagtcagctagtgctttaagaataatagtcggggacccactacgatcgacatattatcctccacaagcagttggacaattttttcatttccaatgcatacaatttaaattttccaacattcttagaaaacctcgacgttcactaatgtggagtagtcttgcaatatcatgagcattgggtgatcgaaaatagtgggctccaaacaccccaacaacaaaagacgaaatcgcttccagctttctaaagttgtagatttttctattttgatgtattcatcgatatcatctaccggcacactgtatgctagcatttgacatacatctattacttttagcaagcttgataacctgagttttcccattctattccttcggtggaagaagtagttttcatgtctttgtataacatccaaaatacagaggaataaaggatgacccatttaaaatttttggcgaaacgtcaattcggtaaatcgaggattgtttgcaaaatagttgttgaaaatattacgattaaattttttttcggtcaaagttaataactaaatgactaggaattgagcactgacgtgagccttggttttttttttttttttggtgttgaacgatacaaaaattattattagctgtgatttgacttacaacttgtatttttatatcatcataatattcatcatcaaaagaagatgatgataaataagatgaactaccaagataagaattcatattttttcgaagttaaattgtgtatatttttggtgtacctcaaattatgtatcatattcattttttatagtgtaaacactttatcttttaaatctaaaattagaagataagaaatctcgtggtataattttgattgctgaaataatttgaccacaatctcaatcattgcagtttattgtcacatcacatccttatcttttgaatccaaaattataagataagaaatcttgcggtttaatcttggccgctgaaattatttgaccacgatctcagccgttgcagtgtgttgtcacttcacatctttatcttctgaatttaaaattagaagataaaaaatcttgcgatttaatcttggccgttgaaattatttgaccacgatttcaaccgttgcagggtgttgtcac

SEQ ID NO: 36502 - DNA, 1840 bp, Cannabis sativa
atctcaatagttcaagaggaatttttaatagccaaaaaaatttaaaaaatatgatttagtacaagttcaggaaaaaaaatcttaattaacttttttaagaaaaaaaatcacttaaaaaatttgaagtaatatgatactttcttagttgaccaaaaagataaggggatgtattttctcaaaaaaaaaaaaaataataataaataaaagagataaggagatgtaattgggttatatagataaaggggtcgttgatatttatgagaagtaatatccttgagacaacaatttcgattttcgaatatatatgtatagagtttgttatttgatattaatagtttctaccactttggtatgattggtcagtcatatatttaaaaaaattatataagataaaatttaattacatcaataagagtataatgtgctagatattagctaatagtaatttttatacactataaaaaattttactttaatcataataaaatttgtgattaaaaataaaaaaattatgactaattattaattatatgtgactgaatgcttaattacatcaataacaatataaaaagagcaaagttattaattctaatagtatcggttaataattctgggagattaatgagaaataatatcctagagacaatgaagggttttcttttcttcccgccttctggataataattgtagaagcacctttttcacctctctcttttattttatttacttatttatttttcatctattaattcattcttttctattattcattttctttaatattaaatttatgacgcacgtcctacgtcgtgggaagccaccaccctttcctatattattattatttaagctttttgtgatttgtttaaagcattgctactacatatataactaatattttttaaaaattattatattaaattatataaagtttaatatttaattataatattaatacatataaaagatattaaacactactaatattttttaacaactatttttattttttttcaataacatgcatgaatattattgaaattttgcttgctcactcatacaaattttactattattgatttttaataacatgaatattattgattttagcaattttctttactattaaccagaatgaataaactgtggcagtggagttttttcaccatgttttacgattatatattgaatcttctgcttgggtcttatccaaatttcactattctcttttatttcagcttaaaaaaagaactatactacagtaaatattgtcaaatatagtatatagttgcgtgtgtacgtaatacaggtatattatccttgctatttaaatatgtttcaataaatataaaatcaaaaagctacaactctcaagaaattacaatgatttatattactaggttagattttggtaattaatggataaatattaattttgtgtgattaaatctattaaaaaaaagaaagaaaaaaaatatgtatattttgtcccacacatgagtgatttgtggatttataattataaataactctatgatagattcaatgtagatggagagacttacaactaaaaatacaagaacaagtaataataataaaaataatcataatggtcttttcaaaattgagaatagtaaatattttttttatttttttattaatttaaaaattcaatagtattactattagccaatattttgtaaaagctgttttttagttttttttttttttttctaaaaaaaatactttagtacatgtttgacatcataactaaaaaattgctttttatttttaaaaacagaaaattattttttaaaaataatttgacttgtttgacctt

SEQ ID NO: 36503 - DNA, 6855 bp, Cannabis sativa
  modified_base (114)..(117): a, c, t, g, unknown or other
gctattaccgaactgctcgggactgaacctctataaaattcatgtgtcttattattgctttatcacatatctattgttacatatcgttcatcgcttataaaatagactcattgnnnntggctaaaagtgaagtcaacaaaaataataatgaataataagttaattaataaataaaaataatttgttgagaattaaataatttataattaaataactaattaattcaataattaataaataatagataattaatttaatattattgacctcgcttttagccaatgacagcgagtcttaatattaagcgataagtgatataatttagatgtaatgtgaaaagataaataaagagcacatagtttttcaagaggttcggccccgagcagttcggtaatagcctactccccttgatttgtattaacttaagaacaaagaataaaaatattcttctcttaaagctcttacaatgagatctctgagtatactctcttagatcattctttcgaccctttgtccagtgagaatagattactatttattgcgctatgtgcttgagggaaggtttcccttttgtttacaatttctatgattgctaagattacacattatatatacaaaatacactgattgagggatttggacagcttgccatatctctgtgataggatcctttattatagggattgcttttgtacttcacgatgcaaattttggagttgctaagtgttgagatgctattcggattttccactgctcggctaggaggactttttccgtacaggtatatgtggtgttctgcttgaaacatatctttcgggaaaatatggggagttaattccacgtgtcactagcgtgtgatgccatgtcagagtgtaaaaattaggataacatttggcccccaagtctgcacgggacttttggagttgcgtggagacttcatccgtgcagcctttacatttgaatgggtgacacgtgttgagtgtgtttgttcgtgattcgatgtgagtctgaccaggcgtctcttcgtttttttggctaattaatgctctaactaaattaatgcctcgaaacatggtttcctttgcacgctttgatggttacactggattgcattttatttcccaaaatttagttttggggggaaatcgaagcgtctacgggatttttgaaatgattaccccttttcactagattgcttataaataaggctcaaacttctttagaaatcactttcacaattttctccacgaagcaaacccagagcgaaagaggaattttcttcaagtctctcatgagacttctatcagatgcatccgagaagcttcatctggactacgtttaggcttcaaacagtgagtaagttttcaatacttttctcttttaaattcacatgtttaatttctggaattccattgtagaaaatacatttgtccttgacttgttgtaggagatacacagaagatctaggctcgaaactttgtagttttctttataatagttcacacggcttcgctgcttacgatattctgcctttaatcttgcaatgctcgattctgaccttgcttattcaaagcttcatgaattttagcctttaacctaaaaaaaatttcaaactcctatgttttggcttaatctttatgcattttttatccttttaatctgttgagtagtcctggtcggcatatttgtctgtttattgttcgatatccaagccaaacactcatctcgtgtgttgtcttttgtagatgaaccctgtgagttttggggaggcaaacacaaaattgacaaggatttgctgcaacttctatacgaggatgaacctcgtcttcgtgccagtccgtcctcttcaagtgacaaactctctaactcgaactttgaggattgggaagtgagtagtgaccgttctcctactcctgaacatgaagtgcaacaccactcttactccgagcagatgacaggagaaggttacggtcgcttcatttgggaatggaagaagggtttgaggcattatctgctgtccaactagacgtatattgttcgaccaggtgttgctgatacccttcctattggccgtcaaggttctggtaaattcggcatcctaatagttctccttgtcgttactgttgcacgccacacacatcagtatccgtccaagagaaggatgatgtcctgcacaaagaaaatgatgtagaaagtcaatgcatctgaccctcacttggcccagcttgccacattaccaagtgccgagcaagatctgcctatcgtggaggaggagcatcacgagtgggacattgaggtccaggagatagataagcaagttgatgtctgtcctgatagcacttccggagctgaggaggaaggagtggctgaacctccaaattatggagggtataatgaggccggaaagccagtatccacagagggtgatgtcttgttcgagggggaagactatgtcactgaggagcttaccgaggaaattccccacaggaggtaaagtgctataggagccaaatgggtgtgccctcagtctaagataagcgaggcacgtatgagggtcttggataaggctgggaaactgggaagacttgagtgttatgtcccttcttcgaatcaccgggcaactaacccaaagaaagggttctatgcctggtcgggtgccatactaagcaaggggcgatgctgcctgtgcagtcgtacttcaagagggttgcaaattattttcgcctttgtccgacccagttcactcccaagagcattaagtacttctcttccattttcgtcctctacgccattcaaggatggggtgtgccgtccccacacgaggtcaactagtcttttgacctgaagtctacccgtaagcaaagcaggtcggggtacttctacttctctcagccatactttaagtggctcacaggcaccgtggacaaggatattaacgaaatcaggggttttgttgatgagtactacttcgtggaaggcatggataccacctatactcaatttccacatatcttagtatactgccatccacccattacattggcactttgggacagggctcaaaagattctccaacttccagatgctgctgagaatatcactttgttgaacttagaggacaactttgtgaagtacaagctttatcaggcagactttatacccaagcctatcaaggggaagaagaagaagtccaaggctcgctgggcctagggagctgagtaagagaaggagctcattcaacttaagcgtgtggctaagttgaagggtgatgctggagccaagcagtatgctcaggaatattttgagcaggagaagagagaaacattctccggttgatgagtgtggataatttttggatgtatggcttgtgtcccccgtctcttagagctacaaggatgctagttgcagatgaggccggccctagagacgggcaaggccttaacttggatgatgatgaagtacatttttctcatattgtaaaaaatttggagaggagagagacgactctccggtagcacctggccactaggggtttagtaggtgatgcttcctttcatatcgaccatagaggccagatttctcagagacctacatgccccatgcctacatcttggggcaagggaaaggctgtagttcaggactgtgatagctcctcttttgatgatgatggtatttgatagttaataacaccatgcttttgtttttgtattgaatatttatgaatgctttctggctttgctactttctttttgtaaatttgtcttccaagttgagaggtcttacaagtggaccttcggataagcctactggaagggtgagggccaaggtggtgaggacctcccgcgatgaggatgctaccggagggcctgtaccagctggaaaacctgtgataaggcctgctggccaaggtacacataggccccatagagaagcgtggtcagctactggatagaaggctgctaagttagcaaatcggtgcatagagagggcttttccttttttagatgaggctctgaaagagctgggtgacggtggacctgacaggctttactcttccgagctttgggatctttctctagtgagttatgcttttagctttgatcattttctttgcactgtataggctgtcaagccattgtgcttcttgcatgttgttggaatgccttggaagcttatatgggggacttgccagccagagttgtgatgtatgatactgatggtgttttgccttattttcaggccctgatgaaactcaactcagctcgtgatagctctagggggtcttcagatgctcttcaggagcgtgtgaagatctttgaggcttcccttgtagcaaaagacaaagccaattctgagctggaggccattttggcacagaggcaaacaatacagagaaaactaccaaggttttcctcatctcagggttgcaaactgaacttgaggttcacaagaacaagttgcaagaggctcttgatggtcagctggccattaaggaggagtacatcaacctatccactgaatgtacctatcagtttcacttgcacaaccctcgagccaaactatcgtacatgggcagtatgacatttgtggatagaatattggcccgtgtggaggcactatttgagagccagatggagacaaaccaggttgctgcttatcgagaggggtcatcatctgggacacacggcgacttattggctgacccacctgtggaggaggtggcaaacaaacattctcaccactaggctggtcagcattgtaatgatggggctggcctggactctgtgtatctcgaccttgtggttccagattcagctccttctacccatacacacatgtagacatcattttcattagtattcaccatcgtgtttgtatcatatagacaatgttttcatgttccacatagcatgtggctttttatggcgtgtgacattttagcattaggacattactcacttttacgtgccatgtggcctttggcctttttaaaactttacattcatgccctatgtggcctggagcctttttagaacactgcttttgtgtcctatgtggcctaaagcctttttagaacattactttattttcaaccacagggccttcatgttcgtatctttggccataaaccctctgtttttgaacactacaagtatttggccctgttgcttttttatcatggattttctgaccgactaggcagtctttaatccaggctatcttcttatgttcttcacaagtaagggtctggatttactttgccaagccaaagtatgcctacatgacttagaggcaggcttagtagcttatactaagtgttaaaatttctctgtataagttctttgtgctagttcgatgcattgtacagtatgggtgcccccaaagttaccatctagaaaagtctcttggtcacttgctattaaccatgtttcatagactttgcctagaatttgtgttacaagggtatcatagtatgcaagtggaactaagagtttaatctgagagcaagtgtttcaaagacacaataaacagaatataaatattgttattattcattaattggtctttattgttgtgcaacttacataaattgtatctacaagcctatattacacaaatttatcttcaagatgtaaagtggctacccctgctcgcctagtgaaacaaaggccactgttgaagaacaattaaagactacgcccaaaaagtgtcgtgggtgctagcgctttttgtactctaatgttgagtagatagaccgctaatttggagtatagttttgtaagctaattattgatagtatttatgaaggtgttccccatgccagtatcctagtaggagaacgagctatatgttctctttgtaccttcctagcttgtaggctcccttactagttatctctataacttaataagggtcttcttagttaggtccaaacacttctgctgctgagtctttagtgttcaggaacactcttcagagcatcatgtctcctatgaaaaactttctgctcttgacatgtttgttgaagtgccttgctactttttactggtaggcctgcagctttaagttggtttgttctcttctttcttctactttttcaagggactctcccagcagggtgttgtttgtttgttggtcataggttattcttttgtgtgatggtggcactagctctacggacaacatcggctgatagccatatgctagagtgaatggagttttcctagtggcagtcttctcagtagtcctatgcgacccataggacctctatgagcaatttaggctagttgccttttgcttccacaaggagcttcttcaaggtgtccttgagggttttcttgacagcttctacagcccatttccatgaggatgtgccacgataaagaagctcttgattattccatgtttgttgcagaaatcagtgaacatgttactgtcgaactatttgtcattgtctgacacaatcttctagggtaggctacactagcatatgatgttcttgacaacaatgtcaagcaccttcttggagttcatttttcaaggggttcagtttctgtccatttggtgaagtagtctactacgatgatagaaaactatacccctcctttttcctttgagagttgacatattaggtctatcccccacctgtcacattttcacacatagtccatcgagtcttccatcatcattggctaaaagttcccctgtcggagtatctttttggataagcattcctcccaacatggctgatgtagaagccttcatgcacttctatcataagccatccagcatcgggtttggtgacgcacctcaggagaggcatagagaaactccatctgtacattatctcgtcta

SEQ ID NO: 36504 - DNA, 2470 bp, Cannabis sativa
  modified_base (45)..(62): a, c, t, g, unknown or other
tatataaaaatatgatatataacccaatttaatataatacaatannnnnnnnnnnnnnnnnncgttcaaacgagcccatacaatacaatacgataaaaccaaacaaaccctaaataaatttttgagaatatcagataattatattacatttagtagctaccaagttataaccctatgttaattagataaatactactttagtgtcattaaatgtatatatataaaaaaaaaatatcagataatataacgtattaaaaataaaatttaaacaatatattgtacacatacttattttattttacataatttaaaattaaaacaatttaataattcgtaaataaacaaaagatctttttgaataatatccaaatactttcaaacatatttttcattacatcttcgtataatagttattcaaactctaaaaataagtcaaaaattttagctataaacaaaagtagaaatttaatcaagttagactaatagtaattatgcaaatcattattataatattctaaatttatggggtttatttgtaaatttaaacgaaatagagttgactttataattttcagaaagacaggggaataatttaattatacaaatttaaagtgcgagttttctaattatcggttattgttttggtttatgtgatcctttctctttcctctctgaactgtttcgttccccaattcaatgaacagttaacagaacgaagattccaagctccgatcaaatcaatcaatgaaaccatagctctctctaaccttgcaaaccaaaattcaaaaccctaaattcaatggcgagcgtctcagtcgccgccgagtggcagctcctttataatcgctactaccgtaagccggagctctatcgaatggcctggaagcatatggacctcactcggaacaaggtcgcctgcgcacccttcggtggtccaatcgccgttatccgcgatgactctaagatcgttcaactacactctgaatccgccctccgcaagctccgtatcttcaattcagccggtgttcagctttccgagaccgtttggaaaaattcaggcggaagattgattggaatggcttggactgatgatcaaaccctagcctgtatcgttcaagatggaaccgtttacaggtacaacattcacgccgaacttctcgagccaaacatctccatgggcaaggagtgcttcgagcagaacgtagtggattgtgttttctggggaaatggagtcgtttgcatcactgaatcgaatcaattgttctgcattccggattttaagaatccgaagtctgtgcagctggctaatcctgggattgaggagccaccgcattgtatggctgtgatcgagccgcaatacacgatgtccggtaatgtggaggtgcttcttggcgttgatgatgcttatgtcttggctgtggaggaggacggagttcaacaactcggctttgaggttctgcgcgggcctttgcagaaaatggcggtgtctcgcgatggtcagtggctcgcctcgttcacgcacgacggccgccttttggtcttgacttcggatctgcgacaagtcatcatcgagcaagattgtgaggtacatttctggttttcgatttactgattttgctacacgatcatattgctatttactgattactgatgttttgcatagttgcatattcgagttgttcatatattatgtgagaatgtgtcttaaattagtttgagtgtgtacagtcagctcttcctccggagcaactttcatggtgtggaatggactctgtgttgctctattgggatgatatgctcttgatgatggggccaagaggggatcctgtgcgttatttttatgatgaaccgattatacttatcccggagtgtgatggggtgagaatattgtccaactcaaacatggaatttctacaacgtgttcctgattccactgaatccatctttaagattggtagtacatcgcctgcagctttactttatgatgcacttgatcattttgataggcgaagtgccaaggtagagttgctaaaccaacctatgtagctgatctccattggttattttagcaaattacactcagtgacatcatagttattgtaaatatatgtatacaaaccaaccaaagttttcttggctgttgtcaggcagatgaaaatttgagattaattcgttcttccttgcctgaggctgtagaggcttgtgttgatgctgcaggtcatgagtttgatgttttgcgtcaacggacactgctaagagctgcaagctatggccaagccttttgcaggttagtttgctttgattgctttaaatgagttgactttatagagcttacttttttttttgcaacaaatgggaaatttggagaatctgttagttttttcatatcattgtgtaaactgtcatttttttgttgaaattgctggaatattttagtaataattaggcaatacagaatattgcaatggtt

SEQ ID NO: 36505 - DNA, 2868 bp, Cannabis sativa
tccaacaaatctatccgagaataaagaatatttaacagatcataattgtaccctagaatatagggatatttactctttatttactccttttacggtgccaaatgtaacaacttttccttcgtaaataaaagtgaaggcattcacaaagggaaggaacctagacctaaaatgtactcacacatagcacttggtttaaagatattatctttaaacactttgagagctgtaactagaattcactgtcttccgtagtgatcaaactcctatataaggggagtaagtcattacccatatataagggggtcaaactcctataattctgtatgttttttttttatttattatttctaaatccttattggtgattcattagcgattatcaaactctaagttagttgactcaaaaggcaggttttatagagagatttatattgctattgtaaatgtagtgtatagaatttggaaatcaggaaacatattatttttggaaactaattaaaatgtatattgttcaattagttgttaatagaataaagattgagatttataataggtttactcaaaaggcgatagaatttgttttgaaaagttgactcaactattttgtacattgtaattattgattcttgagtaatacaattagtcattaccaaaaagaaacaagatgatgatgatgacaaatggagaaatagtaaaggtactattatgtcaagtactacttaaagttttcatatgtaattatgtattaagttgatttcaatattaatgctacttaatcataaatatggtgttaaaggacctgcctatagcaaccatgatccaagatcaaatctcgtgaagttgaaatgatacgattagcataagcatcataattatattgatctgtccatggtattatatgaatagagcacctaatagttaataaacagttttccatattatttattaaatcatttgatagtgacatacattaataagagccttgttatgagacacgcatagtactgagcaccacgataatatgtggtcttataattagttaataatttttttaatatttattaaagtaaaataagtaggactcgatatttagttgcaccaatcacaagggtgcttagcatcttaaggtgtttctttaatatttctgagatgaatatcatcattaccaatctaattaatctttataattagttgttttctctcttattaaactatataaatatatagttaagtggggtaggctataccttgcgctaggatatagtccatgtacatagggaagttcatattgggaccaagagtactctaaaataagtgtacgtctacttgtttactcatggggaaaaaccaaaatatatgcatataaatatatatatttattattaatcgaagagtgttcgttggaacatatataaccatattaaataatgatatgtaggaccatatatatctagctagcttatatttatgtggccgggccaaaatatattcacctgattagatcttccgatatgatagatacatactaatctaaatagtatctaagcagattatatgagcacgtacttcatttctgtcatatacgttgttaagctacctaaattgtaaattttgtacgtcacccatttgggcacacttcttatattcttcaccaagtggttaaaattataaatttttacaagagagagaagatcacgcaagtactcataaaaacaatattaataaaataaataaatcccatttattaattaagtttgatagaatggacaatggggtcacccccttcttaattttctgttttattcctgcaaggatctactttatatataagaaatttatatatatttacacatatttatgcatgggagtggtccattatgtatttttgtcatattgatcttaagaattttgacagatatctaaagcatcttaattttttttcctaaaatcttttatgtgataggggaagattccctcaactagattccactgccaagtttaatgttctttactttttttttttttttttgcgtgtgtgctttttctctccatagatggagctctccaaagctctgagctagtatattacataagccatttattatagtataattaatttttagcaaactttgaaacaaaccctaatgaatcgagagcttttacttcatagatttatgacactagctaacacaaaaaaagtgggcaacacagaattaatataattaagtacccgcgttcatattgtacgtataaaaaaactattaaaaatacagaaagatatgaaaaagtaaaataagttttttattttttatgttttgttagttgatcaacatttattatggtataatttcctattatcttatataattattattatattttctaatatatatatgtatacctacagttatgttaatgattatgtacatcattaattattgagatctcaataacgagatttgtatatgcatggacataaattatgaagtttaattaggagaatatcttatgtttggaaatcataaacatatataatatattctaattatatacatatatataagtatataattatgattattggtgtgtgtggatctcaattctcaacgttcaatttattctcattgaatgtgatatgatccaatttaaatatttcgtcattaaagtgacagatagcagctcaatgcatgattgcattgtaatgatgctataaattccgacaatgtatctgcaaagatatggacaacaatgtcaacaatttctgatacacattcttaacacctattcaattgcttcccaccctttttcactattcattcttaattcttcttctatttctttttcgttttttttatcggttagtatagg

SEQ ID NO: 36506 - DNA, 3381 bp, Cannabis sativa
gaaaaaggaaaaagaaataaaaatatttatgtgcataaataaatctgaatgaccattgttaacttaagagagagctttccagataaacaagtgtctttagcaattcggctctaattataagtagatttacagaacaggttaatcagtcggctttcttctacttctttctcattttagaccttgcatatctggacagccaacgagaaaaggtgaatagataattattaaaatgacggccatttcaaatagacaaaacaaataaaaataaacagcagatgtgagaagaggaagtttactctatgtgcatgccgccacggtctgatgacggtaatgagctgccatgaagttcctccatagccttgttagcttgttcaattccctgccagaaaaagaggttaaaaattgcatataacaatatagaaaactacgattcccctctttctacagtgtcgatcatcaagtaccccaaaatcagcaaatgctactggcattccacctctggcacgcaatttgagcatattgaacccaggatacctgcgcaacaagtagagcaaaaaaaaaagtgaaaaaaaaaagacttccaattaaaatattcacaagtgacaaagactaaggagaagaaattgtggaaataagctgtagcatcaagccagccttgagaaaataacagaagaaaaaaagatatgagaacccacttagacaaaacactcttcagttcatcttcagtacaatttggaccaagatttgcaatgaacagagtggaacattgacccccttcaacagtattttctgattgctgctttacaatcgatgtggaacataatcagaatcataatataagtctcatggagataccaaatatgagaaggaaaactggcaagagatcacaagttcaaggagtatgtagcttacatttgaagcagctactgcattatcagaagcatttactgtctcaccactgcacatatgattaatataagacacggcaacatatttagtgaaccacaagatttacttacggaatgtcctatgttcctttttctttctttgaaatattaggaagtctagtgagtattggatatttcaatatgatttctcaacctttttgaggtcactgaatcacccttattgcctgaatcttgattttcagcatcagatggttcctcagaatcactgcctcctgaatgcaaaaacaaggttccattatgtaaagtgagtagcacaggtaaaagtgggcatgcttcccaaaaagagaaccattttaaagaaaggaaaacgtttaatgaagaagagaacaaataacaaaggaaattaaaaggctttttactgaaggtagaagattacatccttagaatttgctaagttgggaaaatgaaaaagaaacaaagcagaattgagaaattagtcaatttttcattgaaatatgacataagcaccacattaccatcattactagatgtttctctttctcggttattatctccctttttacttctattgtctatgacaacatacactccgctacctgtccaaaatatcaaaaccacctttgatttagcatccagatttgaatttagaaataaaaaattttattacaatgtcagacattcaacactggccactctatacctggtttacgtttcctccttgagtttgttttagccaattcaatatgcagaatatacccagtttgaggatcaaatttgacaccctgatttcacattagaagacaagccacaatacacattttataacaaatacataccctggtaaaacagctacactggatgagtttcttagagttcaagtaatcaatttcctaacactgaatcaaaacctaaatttttgtcatcttaactataaattgtttttgctcaaatttctgaccaacaccaacagatgacacctaaacatgagtaatgttacaatgttgaacacaaattattcggaaaacaaataaggtcatttccaaagatgaatggattttttcattcaaaaagatacagacttatataagcaaataaagcttgtgttctcacattcaacgaaataagtgcttccattgctgattgatgattgacaaaggtagcaaacgcgacgacctgccacaatataaaacgtgagttatcatactttcttcctttctcacctatcaaaaggagcactttcttttccaggaaaccaataagtaaaatcccttgaaaagaaaaaagaaacaataaaaagaaaaaggggaggacctggttgcctctgccggtgtacttgagttggcaagattcgaaaccaggtcttctaccgaagagattgtgaatctcgcgggccttgacatcgtcggggaggccagaaacgaagagcgttttgatgccggtgttatcgtgtagttgcggctgtggtggttggtagtggaggtaataggggtcgtacggcggatgagccatgaattagggtttatctacaccggcggtggatctttttactttgaatgagagattttccggaggggtttttcagtttagcgtcggaagagacggcagcctaatggagcatttaacaaccagtcccaaagccaaaaggaaatcgacaaaacgacaatagtttcatgtcgttatagattaaaacgacattttaaagctcacatgttttttttttatagtatttttaaaagtaagaatagaaaacggttttttgtcattttaaaaatttaatagtgttagacacaaattttttctttctaaaaacaaaatttaatattttacaccataccatgacatgaacccatcctaccctagatctaactcgaacttggacctcgaccctaacctaaagttggccctagactcggacccaaatctggaccacaaacccgaactcagactcggactccaaacaccgactcgaacccggatcccaaaccgggggctaggtctaaggtccttggctgggtcagggttcggggtccgcgtttggggtccgattccggggtccaagtctaagtagggtttaggtctgcggtccgggtctggggtacgagttcggtgttcgggtctggtgtccgggtcagggtccgagtctgagccctgtctggttcggggtccaagaactgggtccaagttcgggggtcgaggtcaaggttttttacactttaaaacaatttttatggaattctacatagaaacttctattgcaactaacaaagcaacctaaatcgcaatcaaaatccaattaaaaacccacatagaaactaccagagaaaccaccttagaaacttaaatcgtaaatttttttaaaaaaatagtatataggataattttttatttttgaaacaacataagtatgatattcacactcacctttcccatacgcctatagacaagtaattag

SEQ ID NO: 36507 - DNA, 4050 bp, Cannabis sativa
catttatgaaaaaagcccttaaaaaaaaaataaataaatgccaggaaaataaattaataatttaagaaccaacaacataattaatatttgagaaaaacaaaaaaaacaaccaagataattaacaattatttattttctctaataccatcatgtgacttcgcacgtgtgtagtcaaaacacagctaaaaatatagacaaaatgcgccctctgttcagacacgacaagaattttttttctttgttttgttcttttattttacaataattctcatcaaaaacccaactcaaactcaaactcctaagttcaatctattgatttcattctcccaaagtaaaaaacctcacacaagtatgaaataaaccaaagcttgctccttttggttcttgcccaaaaaccccacatatggtgtgattaaatttaagtgatcatgtaatagaaaggaaaaaagaaaaatagggtcaaaaataaatattggagaagaaaaatgagcgtttcgttgactgtaatgaccttcaatcttcatgaggatcagccacctgaaagccccaattcatgggataagagaaaggagttgtgtttaagagtgatcactagttattacccaatgattctttgcacccaacaaggtattttttcagttaccttttatttataactttgcttatttgtatatggatcttgtttatggttaaaaaatgatcgatttgattgatctgggtcttctttgatatatgtttttgatgtgggtttttgttctatttcgatgtagttgagttttactcttgtaatgtctgctctatgggctaggattttggtcactggtgtttttttgggttggaataatgtttgcttcactttgattatatatatattggaagaattggttttgttattgggttgctagtttcttattgagatgtttacaattttgtagtttctcctattgtgttctttcctttgttggctcattcttttaatcacttattattaatatttttctataatgagcttcatttgtgctcaggagtgaagtctcagttggattatcttcaacaaggcttaccaggtattgagttattactattttaacttgtgaagcttaccactgatagctttgctggatagttaatatgatttctatatagatttttctctgtattgggggtacataaatggctctagttttaattaaattcataggtatgagatgatgtcttgagcaatggttatagatgaaaaatattatcaatttcttgtgtttgatgtgggtagtgcatataggcaacggtccagtgcattgttcttattatctccagattggcttatagctgtttcgcctgctcttcggtaccatgttatgaatctcaagtcttaatgcttcaaggaagttgctaattttctcatattgacattcttgctaatgcttaaatacgtaaatgtatgaatggaaaggaactaatcatgttagtacaaaattttacagttaaccttgctaattggcgtccggtttgacaaactaaatttagtgatatgctcatgtgcttgctgaactcgttctaagtcttatcctacatatagaagttactttctgttggccttatgttcattaggttatgatcaattcggagtatctagaaaaggaccggaggacacttcagatgaatactgcacgatcttctatgacaaagaaagggtatcagattaagttctttaaaccatctagcatactttcactttcttctattcctttcggaaaaataagaaggggaatttagcatatttcctgtttattgtcatttcattaaaatttgatatcgactggccctttctccattgttgtttatcgaataaaggtggagtttctcgaaggtggaacgttttggttatctgaatcaccctctgtccctggaagcatgtcatggggatcaacagttccatgcattgcaacgtgggcgatatccttatcattttacttgcttacatttgcatgtttttcctattgtgttgctctattattatagagaatccatatcatttgtttctttgacatgatgtccacacattccaactgaaaggagttgagccacccgggttttcattcgagatagtaaatacaaacatggatgaatttagtccacgtgctcgtagacgaagtgctttactcacctggcagcacattgcttccttgcctcctagcttgccagttgtgtattgtggaggatttaacacacaaaaggagtcaactactggacggttcctgctcgggaggtcaaggtatatccgaaacttacaaatcttgcttgttttttatgtgccaaatttgttatttccaattttgttgtgttcatatatcgatgattgcggagaatggtgatgattatttagcattgttaaatatatcgatgattttggtaggtataccttggagctaatgagatgataaattttttgtattttcccaccactttgatgacaaaacactagtaccttcagtcatttattcaagacaacttccattacaatggatggttttaacggttagctaagagtaacacatatttcattccgcgcagctgttgaactgattagatatttctctactttatgtattttctggtaaacatttgttttcctgcttgaccacagagagcatggtgtagttggagatttgagagatgcatggccgaacgcacgggtgaggaaaaatctttctcttattcgcacttatcatgggtttaaaggtaacgctacactacattttgatacaactcacttttatatgataatgtccatagcctaatttttgaatattgtctggcaatttcaggtgacaagcaaggagcagttgaatttctcaagttgattttcagagccctctgcctttgctgggatcgtcaaactcaagatctgcacatagattggattcttttcagaggtagatctctgattcccgtttcatgcgaagtagtcaatgataactccgaaggttcttatccctcctctcattttcctttgtttgctgaatttatgcttcctcgtaccgtgagaatgctcgaaccacccacacaagaggaaaactgaaaatccaattgttttggagccgagctcctaaggccaattgctcatcctttcatctctatgagtattatttatttaggttgttagtttaaaagcagtcattttttgaggttatatatataaatatatatatatttatattatatattatgatctttattcttcaagtggtgttgatgctatttagtaaagattatggatgtagttgcattttaagtggttgtatatctatgtcactatgggctgtgaatcttatttggaggaaattttttattcacatttatgaaattgcacttttactcttcaataacttagacttcaagattgtcattactattattttcttcctctgattttgtgttactcaattcatgcaaatcccacttagagggagtagaaaatttaagagaaaagtaaaagaaaaagagaaccagggacagagacaagaaatggatgaccattttcccgagcctccagcatcgatatcggtacctttcgcaccataagattgtgcagcctgtcttgattggaatcgaaagggaactagtactagtccatacaacttcagaggttcccatgaatgttaacttaccttgggaaattgattcttctgatttctccatttccataaaatccatccattctttaggaaatgtcaaaactagaaacttcatttatagcatagatggcagttaaaaaattgatgtcatgtttggtatcccatttgtttttctagttattcattcttattagtacattagaaaagaagggtattgatgattttggtgaaattttcatattttaatagcaccttacatttcatcaattgtagtaatgtagaagaggtttaaaaactataaatgttcatttttttggaaactgaaaatgtcttgtcaataaaacttccatttattccaaatctagatctatattttcttttaataaagtttcatgagaaaataaagaacccc

SEQ ID NO: 36508 - DNA, 4564 bp, Cannabis sativa
ttcagttctaaccaagttcctcaactgttgtttttctgttgatttttggtctatagctttgtccatttaaccgccaattggaaccataaatattcgttcccccgctttgccaccataaaagataatggaggctagacatgtatctacaaaaatacataaaaacttgcatgcatgtaaaatcaaatatcacaccttatgaatagtgaaggtaggctgcaggtgcttgaatccaagtaatggaggtcgagaacaactggttacaaatttaagaagcatacaacgatcatttggttcgaaacctttaagtacctgtgacatgaacagaataaaacttatcaatgcacagaaacaagaattattaactgccatgaaatacccgtaaaaaccacataaaaggttcagtaacttagaacggatcaatacctcccagaagattttgatagttcgacttccctcagaataaccaccagtgtaacgtgtgttttttcttaaatcatcaatgtcaatatcgtagtctccacctgaaagcaactgcatagtatatcttaaattagcacatgaccaagaaataaataaaagccggataaagtttccaaataatttacaccattatgaccagaacaacattagaatggaactgaacaaagtaaaactcatcaaggaagaaaatcaacaatataactataaattaagttggacatttgtgaataagacggctccttctctgatgtcccaatcaaactcacagttaaagtagctctcaaggtgttcagcaggttctagaacctattttacattaatcaatatctaaccccagtcaaaatatatgattttaacattagaagggatagactgatagtataaacatacattcatgccatatatccattcatctatgagagcacagcaacatcccaaatattttataggcagcaagttcaattatgaaaagtaaatcatgttaatcagcaaactacccgaacttaaaaaaaaaaagaatgaagacttgtaaatttgaaaattgaagcattttccctttgtagtgctgattcggcatgactattgcatttttacgcagcaagacacaaatgcttctgtatcaaacaggtatgtcactgacagacaacaggtataaaacataatctacctgattgaattcgcgtgcattgaataatttcagccaaaatggtgatatgagatctgttaatcctctgtagaaagcattggaaaagggaattatctgcaataaaagatagagcagttaaatatatctccaagaaatttcctttgagcaagttatgcagcattacagacctgtcggtttagtttgtaatctgccatagcatgaatgtactgcattttgttctcatttgtcacagaaatatccttgccaccaggtttaagctcgataacatgctgcttaccaaaagattcttcaatcactgtgaaatccagaaaaagatccttgacatcgttgtcatagtgctgcaccagttaaggataaaaaatcataatgtaaattttttccattttaagcgaatatgtgaggacccttttcaagcatgtaaccattaatttcagtctgtaataaaagcatgaatcaaatttaataaataacaaagctggatcaatagagcactgacggcatgatgaatgtagattctctatttttcttttttcattattatatgaaagatacaaatcgatacaaaatcagactgcagtttttttttttattttatctttcaaaaaaaaaatccactctctaactaaataaagcaaataaaatgcgttataagtctatcacattgaataaccaaatagttattcaatatctaactttatcccactgttttgctctcaccaactcatgcaaaaggtagccattgatctcattcagaaagaaactgcaacctagaacttcgtgctttatcgtaataatgatatatataattgatctctcaaaaaacgaggcaccacaaaataatttaccttgacatacataagattcctgtacagctctggatcaagagttgatagctcatcaagaaagctatatcggcctagtagtttttgtacaaatacaagagaaaaggagtaatctagcaaaattccttcatataaagcttttccaacaactcttccaaggaattcaatcatctggactccattcccgagatattttgcagatgcattggggattaaaagtctgtctgaagctgaagtttgggagaatagcccgtacctaccaaaaagaaaggcaaaagtaagaagggctgactgtggggtataaagccaaatgtgaaaaggtaaagaagagattaacttcgaaatgtaacaaacagccaaattatgtgacaagacataaatagaaagtaaaagaccattacaacatactcaggggcaaaggctgcttttgatatatcagttaaaaactctttagataatccaccataatccaggccagcctctggaagaccagaatcactcacaaatgaaacatggatggatgattttaatcttggcccaagggaatttaattgtctataaccatcttcaacaatatgacctcgacgaactactatcccaactgatcgtgaaggaggtccatcaacttcaccagccatttttcgcgaggttttgtccatctcaatgaactctctaaacatctcaactctgccaagtgacaaatcattaagaaatcattgaggtggaagtaccaacaaaatatttttggaagcatccaataaaagtactaaattcttcgcttcaaatctacacaaaatgcattgaaccgacagctgcaaaacgcaggaataatgacggtcgggtatgtcaagaaataagggattacctttcttcaaatggatatacgtgcggaacagtagttataatagaccgcgtacttggaagagctggagcatcatctgttcttgtattaacagacaaaacctcgtgagttctggcagctacagcaattggtggccggctcttggaagcaggtgaaagccacagaacagtgggacagaattggtgtctgcaatctctttcatacattaaatgcaagcatttgattgcagaatccataagggatctagtctgctgccccatattatggcacaaaccattatagacgaaagtattaagcatcgaggcaattctccgctgctgctcaatcctgaatggaacctaggtcatgcaaaatgatcgcgttagtatttataatttcaaacaaatattgcatttaggggaaattatatgaatatatacacataaacatcatacatacctgtttctcgtagaactctatatcatccaatatcaacagcagatgtgaataggtagcacagaaaagatgaagcagacaagagatatctttagatataccttctgggccatgcttcaaaggttctacatcccatatatcatgaggaccctcgacaatgtggctatggcttgatggatcatcaaccaaattcgtactatcagctcccaactgcgactttccagtaaacttatgtagcacggtcacccatttattgccttcatccttaatactatgtttttgccttctctcagaaagtccatcctttttattccttgaagttttactagatgaaagatcatgattttcagtggttggaccatctacaggaaaaagggcactttccagggttccccataggctcacaagaaaaccaggagtgaaagatagcatattgagaatataatactgtccaactgctgggttcaagaatgaaaaaattctaagaagataacaataaaaatatgcaacatcaagaaatcccaacttctgagagtgcaaattgttatgcgaaaaagtctccaacccttgagcacaatcatcttttccaactattgccaaaagatccatgagatgctgctgttgacaaacaggcttaaagagatccatgtatgacacaatcaaggaaccatgtctttcatcactcataccaaactttgtatcagtgggcataacagaatcttcgttattacttgggatttcttggttcacattttttatacttccaacattatcaagcctagccaacaagtcttcagcaagaatgataactgcacgaacatacaacacacagtccaaaccttggttgcaccatccagaatcaagagaaccattctcattcgctgttgcaaggcatatgatacttgcaagtgcccaacctaccggtggaatcaccttcagacaaaatggagcttgtgactgatttatttcagaaatctgattcagtatcttctccttcaaaatctgccatcacctgtgatagtttgatcagttcccacatgaataaaaaataactacaaaaaagagtattttctttaggactcataagcccaccatattcaaacataggacttcggaaagtccacgtaagcaaaatgatatatagcagcatgatacgttggcacatttccacatgtcactgagcaacctagatacccagtacaagaacctaagattaaaatctaggaatcagattagcaagcaatacagcaagcaaggagaaataatatcttctcaaag

SEQ ID NO: 36509 - DNA, 6130 bp, Cannabis sativa
gcaatatttacagatttcaacaagcttcagcctgccatgactgaccttacaaatgttgttacttgcacggtttggtttcagaagacaattaagtcaatgtgtaatgtgtaagcaaactctctaaaacaatctcaaactgtcatctttcctgtttcaacattaactatatctatatctatatatgtatatatatatatatatactatataccaatagaaaagaaactgaattcacatttggagatcactaaacatttttagcttctgcattacaaagtatgaaaatgtatcacaacatcaaacatatgatcattataaacataacaacactattttttttttcttttcaacatgaccaacatttcagaagctgaagctatgcatctttctcaagcaaaaattaaagaaaaaataacaatattttaaaagaaatcaaattcaagataattgttttgatcggggtaagcggctgaggcagcaccgttattagctttgtcgcttgttgatgatactaccggtgatgacaaccgctcaaactcaactggttttggtatctcgggtgggcttgcacatcgaatcaatgcccagtttatgccttcgaagaatggatgctgtttaatctctgtagcgcctcgtttgtatgccaatctattctgtggctctttcacaagcaatcctcttatcaaatctcttgctgaaaagcttactactggtgtctcggggaacctcaatggttgcccgactacattgaagagagtagctcggtttcctgatcccttaaaaggggtcttaccgaacaatagttcgtacaaaaagataccaaaagtccaccaatcaacagcactaccatgcccttcgcctttgatgatttcgggtgctaagtactcgtgtgttccaacaaatgacattgagcgagcgttggttggctcggctataagctctggcaatggagtgacttggttgcccatttcatttttcggtttcctttctttctttgatttgctcgaaaagaaacgaggaccaaagcatgttgtgggaaccgcacaggttggttggatacaagagggttgaatacaagttggttgcacacagtaaaccgagttccttcttaggggatcagattcgggtgctgatgacttgacaagtgttggactaacaacacagcgtagagaaagatcgaaatcagaaagcattatatgcccatcatccctaacaaggacattttctggtttcagatcacggtaaacaatcccgagcatgtggagatattcgagagcaagaagaacttcagccacataaaacctgcaatatcgaaagtcatacataatagcaacaccaattacagtcagttcccgaacaagcacaaatccaacgagcaaagtttgaaactttatacaaaaataatgtttttggagttcatcttagcaaagttctgaaattgttcactctaagatatcgaataaatcgttccatattaagggtagttagctaaatattggattagttaagtgttggtttcattagttaaagagtgtcttaactaactaaactaacacataactaatccaacagtacctaacatagctatatttcatcattaataactcaacaaataagtttgacatgaattcaacaaattaccaacaaggcaaattcaacaaaaatatgaattatgtaaaaatataaagccgaaagagagaaatgtcatacttaacagcctgctcggtgaaatgcttcccgggttgtctctgcctaagagtatgcaaatcaccaccaggacaaaactccatcaccaaacaagaatacttctcggtctcgaaatgggtgtatagtgaaggaaggaaaggatgatctaaggattgtaaaatttctctttcagtctgagcccgaagcagtttctttcgactagctaaagaagttttatccataactttcattgcaaaataacattttgttcccctaagctctgaaagataaacacttccaatatctccacaccccaactttttcaaaagtctaaaatgcccgaaattcaacactccttcctttgttctaacagcttgaatcgcttcccattgtatgtcattagccttatgaggtttgttaacactgctactcaagctactacaagtactctcatcactcacatcactacttgtacttcccctacaaatactactctttccactctcaacaaactcgccccgttcgctaactttagcgcttccactagtcttagcaagactactaaccccatcactaactttagccgcccccgaagaagcaacattcactcctactcctagatcaccaccattttcgggtagagttttagttccaattggttcttggagtgataaactcgagtttaacttatctactaaagaattttgaggttgttttttgctctcaattgtttctaaagaaacctttttcgaaacaacttgtggggcggttttagggactaaatctcttggggtaactggctctgatttactagtcttggaaatctgtatagggggtggccttcttgagtttccttctgttttttgacttatttttctttgcctttcaggtgaaattctagtactggatgattttgatgccattgatataaactggttttgagatcaaattgaacaaaacccatttactcagatcccaatttcatcacttcattcacaccaccattcataaactcagttgttttcatcttcatgttcatcaaaaaaaaccaagtgaaatttctacaattaaaacaaaaaaaaaatcagactttaccataatgggaaaataatgaaacaaaaatgaaaatcagttaattaacatttgaagcaaataaagaaacaaatctaaattaactacccaatatacctaaaaagttagtttgccctaatagatgaaatcaaaaacataacaccctaatagatcaaaaagttgagatttttacagagaaaaattatgttatgtaccttaaaatgctgatcctttattcaaatcaaagcataaatctttattatatgaaacttaatgaattctcaacacaaatgtagtttcatttctctattagctttttcactattagaaaccccaaaaagtctataagagcaaaagataagaacaaagtaaaagaagatagattcatacagatctcaaacactaataagagacccacttctttggatccaaaaagtccccacacaaagacccagatgctaaaaaacaataaaaagataagagatgatgatgaagaagaagaagaagaagcaaaaacctaccaagcatcataacagaaagacccaattaaaagccaagagaaaaaaagtaagtctcaaaaagggtacctgagacttgtgagagaaagagagagaagtcactataaagatcagaactttggtttaacagagtgaagaaaaaaattaataaaaatcaaatctttttcctctccaagagcactaaatatcatcactttcactactactacttctactgtttagagagataaaagggaagaacaaatgtgtaagaaagattagctctttcctttcctttcccctaaaacttgtggagtgagagaaaaagcaatgaagagagagagagagagagagaaagagtaaagctttctgttgtgtttttagaaagagttgggtccatgaagggagagaaagtgagagagagagagagaggggtcaaagttgaagaagctttttttatttttttggagggttcaattattttcaatgtatttgtctaaaattacaaaggtctgaatcaaacacacaacatatggccctccaaactctctaatctgtctctcatgctttggtgactttattattattattacattttatataaataataataattactaatatttgtaataattattaagctaattagggttttgagtcttttgtgaaaattattgaatttaagaattttcgttcgattttactagatgtctaacgtaaataaaagtttaaaaacataattcggtatatatttaaattcaaagatacgttttaatacgcgaataatgttacagtaagagtctgtaagtaattgaacggaagttcttgtatttaaccatttcaatagttgagaaaagctcgaaaatataatttatatgttataattcggagaaaaaatatcctaattaatgtattttttaggaagaaattagcctaagatttattaaattaaattacactataaaaacaaaatattaatggtaatgcccactattattgcagtttagtaaattttaataataattaagtaaatatatgaatatctctttaattaatgttagaatttttttcaacattgtataccttctcctaatagtatatctttatcatttttgcattttggaattttttgagactaattttattaaaaaaagtagattaattttttttatagaataatgaaatagatacatacagagtgtataagaataagcaaaatgctaaaagacaccaataatacttaatactatctaaagtatcatatcgctaaaatgatacaatttaagtatcgagtctcgtataatttaatataataaaatttctataaaatatcactaattaatcacaaaatgccacctctacgtaatattagataccactgatattttataatgatactctaaaaataattatttaaataagtgtagcatagtaacccttttaaagagtgtaatataaaattatcctaatattattattataatattatgctaatttgcatttggggggcttaaatttcttgggaatatccagagttgtccctcactcacttataattataataaaaaaataaaaaatattaattcaatattaagtggtcctaaatatagagtgagctgccttaaacataaatttatatttatagatatattttaggttttgtggataattatatacataaattggtccacaacatgtcagttgatgagaccatgatcattcatcagatctgacggtgagaaattaattactcaaaaaaataatttataattcaaaaaaaaagtgggcccatttttctttttctcatttgttgtcatgggtggagataggagttggcaaataattggttttttttttaattaattaaaaaacaataataatgttaattaatagattttttgttaattgggaataattgtagatttaaataaattaataaaaatgtaatctttacaaaattttatctccaccaaagtagatctgattgataaaaatttgatctttcttggaaatgggttcttgttttcaacttcaaaatgtgttaatctacacaatatatataatttggtcactcaattattaattatacacattttttccccattatatatctttgatttttctttcctttttcagttttgggttttttttttctacctagagtttctgaagaaagaaaaggtactttttaggaaaagaaaataaaaaataattattccataaagtagtgttactgtgaatttcttattacaatattttaattaatttttgtacttgaaaatacatgttggaatattttttccaaaaaaaaaattatggggatgttcgttatgcttacagaatcagttctgtaatttttaaaaatttcgaataatttacagtatcgaaaatacatttaaaattttttaaacatgtgaggaaaaatggaatatcaagaactctgttctcggtactgtaaattttttaaaaatttattggaataacactgtaactataataaataccattataaaaaaaatattctgaacatgtaatttcgaactaaaaaattgtaattaacactatttcataaacatagaatagacctaactttttgtttttttttttttattgaaatggaagcttcatttaaggttgatcaaagggcaaaagccctacaagtccagcagataaatcacaatctcactaaaagataacaaaaccgattcaaaaggagcattaagctcaaggctcatacaggagcataaaaagggtcaaacacctcgaaaaatgcccactacggacataaggtgcaccacaccgaaacaactcaaactgtgatagtcaatagtccagtgatctgtaaggggaaatactaggtaagctgtgcaatcccac

SEQ ID NO: 36510 - DNA, 9419 bp, Cannabis sativa
  modified_base (7227)..(7228): a, c, t, g, unknown or other
  modified_base (9376)..(9378): a, c, t, g, unknown or other
gaactaagcaaccagaaccccactaaaaattattagaactagccaaagggataccctttggctagtaacaactgaattatagcactctacttcataacatttttaaagtcaccatcccttactaagaccatatcaataaagttatattattttatatatctatttatggaaaaaatagatatcaataaacaaaattttctaattcattattaatgtaccctttctcttgaatgagtttattcattaataaatctcctaattttatttaaaaaaaaaaaaaaacaataaaatcaatactcattaacctttactatccatttatcaaagattaaagattattgttgttaacccaagaataggcaatgagctcaaacccatatattaccacccgtgaaaggagtaagtaggaacctcatacttttggagctttgtgaaatttcataaaagtgaaaagtgaagtatgtgagtgaatggagtcttatatgggtgagaaacacttcgttaaaagtgtatataatgtacaagtttagcacttgtgtttggaccccaagaggtacccaattttgtgtgcatgggtggtaagaactcacacactggaccaccacacacgtgcgcgtcgccgtctgaccgagttaggcggacgaatgaggtgtcacttatttttttaaagaaaaattatttaattaaataaataaatattttttatttatttgttaattaattattttaacgttaaatgaattagtaaaaagcaatcagtcaatgatctgtttttctctaccatgatctaacttttccacgattatattaccgttttcttatcgtttaatattggatcgacttctctatataagtttgtatcaaaatagcggaaaaatacatcgtttcaacaacaaaaacaattctcttcttccttatgatttttctcagagtaataatttaggctgtaattgaacgatatcgttcggtgcagaacatagcgtatatagagggttggggctccaaagggtacctaattttgtgcgcatggttgaaaactcacacactcgaccactacacactcgtgtcatcgccatctgggttaggctggcgggcgggtgaggtgtcaattattttttaaaagaaaaattatttaattaattaaataaatatttttaatttatttgttaattaattatttttaacgttaaatgaaataataaaaaataatcagtcaatgatctgcttttttttaccatgatccaacttctttatataagtcgtatcagaacaacggaagaatacatcgtttcaacaacaaaaacaattctcttcttctttacgatttttcccaaaataataatttagggtgtaatcgagcgatatcattcagtgcagaacatatcgtatacagaggttgttttatcctgagaatgccgtggttgctagactgtcgtgcacattttgggcagaaccgcaaaatatcttaaagaaagcgacataatccgcaattctgctagaatcttctttcggtaattcgttccaatttttttgttttaaatttagtataacacatatctccacttgctcccaaacccacaaaaatgatattttgacaggagtgtaagtgttacgatttaggcccaacaagcttaaagatgcattatgttaaactcgtgaaagccgcgatgccgatttcatatctactttttcaggattggcatggtaaaaaaaattaagagctgatgacaaatcaaacaatcttctttatttttcccaaaaggtactaagttttgcgaatttgaaaaacttatatagtttttatgatgctcaacaccactgatatgttgtgttaagagtggttattaaatttttatattatttattaaattaaaatatatgagaatcgagattaatacttggcaccacacgatagagtaccccttaatatttttctttcaccaattgatttcaaaacacagtgaataataataaaatataatataatataattataagaatgtgtacacattcttttgttattattattctttattctttactttgtcattgttatattattatagttccttccatccaaggatttttacaaacaaagctctcctctctcacctagcatttttcatatatatatggttacaaatgaaagaattaaaatatttagctttgttttgttttttcttcctaacacctttcctttcttttctccctccttgtattttcctctctctctctctcactctctttcatatctacaaactccctaaataatcattcttaacaaatcagcatatacaaagctcttaacaacttacagattacaaaaaaaaccgagctcgccaacttccatcatcatcatcaaacatgaagcgaaatccgagttttgatcggtttcagcttcaatcccatgctttctggggaaagaagctctggagaaatacacaacgggctcaacgggcttctcgggctgacattcaactgagaagaaactttatacaagccataccccatcaagaaatactccaacggtatcatcatggcatgaggctgctcctctgtcaccatcgacccgcaagactgaacctgttggaaaaacagttaaattatgacatgatcatagcttcggttacagcagagaaagctgaggtttactttacgtacctcaaccaacgcgctataccgtctgtctagcttcgatgtcatgtaaagcgcctcagcatggaatggagagttgtcaccaacgaagattagcgaacgacattgtagttttcgcaggccatctgtaatgtcgggtctcctgcaaatttgtagagaaaaataagctcaaaactaatagtgactggccaatactatcaagaattttgattgttaaagagatttggagaaaaatggaaacaagttttacccgttaattgcttcaagtaaacgccaaacgtttaaactttgcctctcctcgagcgactgttaggaaccaaaaaaagattagaaaatttgttcacatcagataatttgacacctttaggccgtgtttggttagaggtaatagaatagaatctaatttcataatgaatgaaaaggctattccattcctattcttgtatttccatttcttccaaccaaacataccattagtgcaactaacaaagctagaaggcttactcttctgcaagcctgaacaacatccgaccctggcacttgagcacaaccacgaatgtcctgccatcagaaatttaaaatccaaacatttcttaatctaattcaatttcggatatatataaaggtacatatattgataatagaagaccaaccttgctaaaataccgcttgagcaataactcctttaccattccacacatgccatagaagtaaagtaaatttgacattacctgaaaaatataaacttatgtaaagtcgagacagcttttaatatccacaaaaattgaacaagtccaccaaaagaacaaaccttatttagtaaccattctgtccaagagggtgctttgcataatggagatatgagaatcaagccaaggactctatgtctgtatttcaactgtagccaggaattttattaaaataagattaaaaaaaactttcctaaaagtcaaaaataatgatttgatggctacttgaaaaagcttattgctttgtatgaaaaggaaaatcactcacagcaaatagggtgatgatgtaagctccagctgtaacacccatacacatcacagctccaagtctataaagagaatgagattcattttcttaatttaataattgtaatatttcaaaagataattatgttaacaaatcattagagaaacaatattttcaaaacttaaatttttaagtcttaaatcactatgagggtctccttctggctcttgttgtataaaaacatacattgaagaatagaaagaatcccttacccaaaataattaagaacatcggctatctgatctaccaagtcatcagcagaaagcagaggatcatcagaactaattgtttcagctcccaactgaaataattcttgaagaaagtacgagataagaaacgatgtgaattacaacttaagaagaagacataataatataagagcagagcatatatgtaaacaaaaaagaaaagaactcagtcaagttattgagtgacaaacctcatggccgggaggactaatatgatatatgcaaaaattatggagcagcaaagaacatgcttctggacaaaagaataatccttggaagcaggaaacatctgatcaaagtgaataagaaaaacagttgaattagagctagtaaagtcactaagaaacgagcaaaatattttccctaaacacgctgataatatatatgggagaaagtttaagaaccccattatatatgaatatgacacgctgataatatatatgggagaaagtttaagaaccccattatatatgaatatgatggtactgactggtacagcttcttcaaattgaatatatgatttaccataaacaaactttaaagatctcaactcttaaataaatcagcttttcatcagtaatttccgtactatgactatgaattttggtcaaatttacaagcttaaaaaactaatgactggtttcgcaaaatccggaaattgtgtcaaaattgaaattttgtggataatgataagtaaaatgaatcaattgtcgctacccacatcatccaattacatcattttatagctgtaaagcattggcaagtatgacaaactaaatatattgcccaaaagaagaaacttacaatttaaagctaaatctggataagtaacaagagcaggtttatcctggtctccaatcacagtaaccgacacaacaccatgacaagtttttataagatgctcctgcataaagataaaccgtaaactgatttagaaaacaattcaggaaagtaacactttatatattcaataattaggtaataaatacaagccatgacaaaataaacaatctggtttaaccatatcaaataaaaatatgtctttttttcctttaaatgtatacgatctttaacacagagaggagaaaacactgatgtatataaatgcatacacgcaacatatatacccaaatatgtaatggaaattagaagagagaacaatacccaactcgttcatacaactatatcagattaatttggttctttaaactccggaactttatattccgataaaaaaatagcaattactagctaaagaaaccgatcaaagagaaagaacaaaacaaataaatgagaagaaaatgccattatctgaaaattccagatgagaaattcgtggtcgtgaaaacttattcatagcacactctaaaattcccttcaaaagaataatatctatatctatacataaatatatatacaaaacattacacacaatacattcacatttcattcaaaaaaaaaaaaaaatacattcacatctatacacacacatatatatacatatattaggtgaagtattcaacgtaaaagttttcctaacctcaaagaatcaaaaccaatgcaatattgggaatttcaagtgcagaaaacaaataatttcttcaaaaacgctaactaaaaaagcttccacctccgccattaaaactaagctaaaaggttcttccattaacattgctcatttacactcaaagaatcataaccaatgcaatattagaaatttcagaatcaaacagaaaaaaaaaaatcaaaatacgcaaactgaaaaaagcttccgctgcgtccgccattaacactaagctgaaagaaaatcaagaaagctgaaagaaaatgtagacaataataataataatacctttccggcgagagaaactccatccatatcaacggaaaccgaatcactcgaatccgccattttctcactatattatcttcctctatacgtaagctttggttctctgtctctctctctctctttctctaaatttggattggtttctctctctaactctctctggttcgcatacatgtatatataaatatttatatttatatttatatatcttcttcttcgtctccctctctttttttttttttttttgaaaaatataaaataattgactcggttttgactcgggcgagttttaaccgagtcaccgacgctcagggtcgttcagaggctcacgaggtaaccctataaacagggttcttaaccatagactgtggttaattatttaaccatagttagatgactagaccagaccgacactttcttctgtttttcttttgtttttgttattttaccattttgcccttcttttttttgtcccctctttttttcaacgttgacgcctttgttttatttatttatttattttgttgtcttttaatttatttttaagaatctattttcttgatcttgtaatttaattttacccttttcaaaaaaatagaattattgtatttttaataatttaaaagaaactttaaattttatttagtaaacttgataaatattttttttcatggccaataattttaaataatatattttagtgaatttatgcgatgtaagtattttttttatgtgtttcaaaaaaaaaaagtattttttttttatgtacatgttttatttatatataaatgatgatgaaaaatattaaataaaaaatagttcacataaaaaatatataataatttgtataattagtatttttttaacaatagaaaatgtaaggtttttttttaacaaaaaacaaatattgagaagaatgtaagatattattattagtagaaatatgtttgaaattggtaattttctattaataattatgattatcgtgtggtcataagtttttaactatttatttacccatattaagtgaaaagaggcaaactatatataaaaaggtcaatttaagcaagagaaaaaacaataataataataataataataataataataaagactaaaagtacttagtttttatatcgaaattattaagtactcgaattttttttaaaaaaaatcaactaagtacttggtaacttgaaatttgagtgatgtgtaattattattattatatcaataataaataaaagaataatttaacttttagttgtaaatgaatatttaaatttaatttttgatgataataatacttctattataattttaaaatttctgtagtacttaagtgttaaataaattgtcacatcacaatccttaattagttcagtcattatatttttattttttatttaaaaattnntttaaatataccaataagaaaatagcatgtagattataacttgacactataagcgggtacatatggaaattttaaaaatatcattaccgtaaaaaattaaacttaaatatttatttacaattgaaagttaaaattaaatatttttaccacaaacatgttacatgcacggcatttgacataagataattagtaataaattattatttgaaataatatcaaagaaaaaaaaaacatttattattattaaatgaaaataatgtcaaattattacgatattaatatgtcattgaaaagtttattatttttatattattttaataaaaaatatataaattgcttcatttcatgcaatttttttttttactaattaattttttaaatagtgttttatttaattatgtacacacattttttctcattcaataattaatcattggcacacaacatttccaaagcttttgtaattttttttattattatgatatttagtgccaaaagtctaaaagtgtgtgtaaaatgcatgaaacaacaacaaataattatggaattgaccaatatttatattaaattaaatatatataaataaaaaatatattttattgtattattgtatgactctcattctttttttcttttataattgattttattggctttatagatcatattcatcactccaataatttttttgttatgtgtgggggcatacaatgcaacttgattcacactatttgaaatctcactactaaagaaaatatccataaattattgaatatgcttcatcattaaatatctcttcataattagtagatttgctaatcctattttactaggtatgtctcctatatatatgccattgaaattgtcctactttttcctcaaagtatatctttaattttttttgttttttgttttacattttactttatctttctgagtcgtttacgtgttttatttacagatgatatttcagttcttaacatgtatattttgttagtaaaattgaatttcggtccaaattattagactttgtgttgaggttgtttttagattctctcttagtaactttttaatgaatagtgtatagttagtagatataataaacacttgattttaattgattacatttataattatttaatctatttgttttttacaatatcttatcataattaagtttttgaaaatattaaatttataaatgagaattttaaggctaatagattggcttagtatattttttggttagacgatgagttttttttaaagaagttcttcctcccgcgtgtaactttattctagatatatttaatacaatatcatattcttaacaagaaaaattgtgaagaagatatttgttaatataaaaaatgttaaagaataatttcgaagccagacattaacatcttggttatctactttacataataatttaagtaattttagagtgatagatcattatttttacttggatattaaaactaattacaagttattatgtaaaattttgtacatctctagcattattccatatataatataaacatgatcaggcttgagctaaagcatgctaagggctgatttagggcccatcaagtctaagggtctaaaaataaaaataaaaaaaaaatcacataatttttaataatttttaaatatatcacattttcttttaaaaaatatctaataattttgttgctacttaagacctaattagtcccaaaggccctgaatataaatataaaattatgtaataggaggtgatttatttttatttaattttaaaaaactccataaatacatattatcactactttagtggaagatactagcaatttaatataaattaaataaagggtaattagcaataaaattcttttttgttttaatttttatacatttaatctttttgttttttttttttattttagtggcagaactctcttaaattagttattttctttgtaaatttgaggtgtcacataaatatcgcatttaaataccaatacagtggtaattcaattggtatataacgatgatatctaactagcacctcaaatttgcaaaaaaaaagtaaaacagttttttcacaaaaacaaataaatagatggtgacgtttggtaacatttttgttttctaattttttannnacaaaatgaaagtaaaattttttgtttttgaaaaacaaaaa

SEQ ID NO: 36511 - DNA, 3543 bp, Cannabis sativa
caccaaacatatagagatcgaatgccattttacttgtcaccatctgaagttggacaccattactttgccttttgtttcttcttcagcttactggtttttttactaagtcgcatatgatttcttatttttttttttcttttaagcaaattctcaatgttttttgcagcaatatcctgagttaagaatgttaattaataaatatttaagattattttagtcttttcttttatcttaatcttttatattagttatctgctgatttttttttattagttcctataatttgatttaacatttacagaggagggcccacaaatttgtacagcttttttctcttggaacacgaaaattttaattcttaacaaacttattttatgtatgtaaatagattaggtggaatatgagaaagagaaagcagtggctttggtaggtggtagaaagagaaataaggacattgttggtattttcttgtactttggcagaggagaactttaatttgttggtgataagacatgtgtagaaaattatagccatgttattgtgtgcatttttttcctcctcaattattatgaaacagagaatgaaagaataaaaacgagaggctccaccaaaacaaactaaacttatccaagtgcaaaagctaaatgctaagggcacttaaatgtgatattattagtacattttagtaaccgatcttacatattttaaattaataaatattataaaaaaattattaattaattaaaaaattttatatcggtgtattattactgttcaaagatataattatggataaataattatttggtagtatttgttatatatagaaaaagaaatttactattggtttcaaataataatttttttttttttatggaatcataccatttatgcatatgcatatgacaccctatacttgaatctgaccatttgttacactatatttatttacaaatgatgcatatggtacccttttattgggtctgatcgatcaattcatttttttaataagaccagatggaccacatcacacttaattagttaattatagtattcaaaattgaaagttaaattataggtagaacatatgtaattagtataaattactataaataatagtctaataacaagtatccaaagtgtcataaataatctaaaatattacaaaaatccattttttttttgtttatcaacccatatgtttatatatacaaatccaaagtataacaaatctaaccttacctaaccatatgcttacctaatattttcctcttaaaatattatatttcacatatggtaggtgaagtggctttaagaaagtcttggtcagcttcaagcttagccatttgatcctctttcaatccaatataggcatctattccatcaccagttctagagtccatcaaagccacaagattattaaaagtcaacgcagctgagctgacccacgacggctttccccaaccaaagtcagaatcataaattggaaacctacacaaactactgaaactaaacgatctcaactctccaccaatcatgtacatttctgatccaaattccataatgaaatccaattgttcttcctctccaccttgaacttttctcaagaaatcattgtccactttcctaatcccttctcttattttcctcacagcctcacaaccgtactcttcgctcgagaatgaactacgtccaatagctgccattggcgacgacatagggaacaatgaaaaaccccatctgtaaaggtttccgaatgagtgttcgggcaatggcggatcaagcttcggacgaagatttaccggatgaaaaactgcgtaaaatttatcggatttgtcggtgttggaattgtttgcagccacaaaacgagtccatataaaagaagataatgcttcaactcgagaaagtcttttctctccttccaaacgacttttctcggcgtattttgacctaatagcttcaattgttttgccatcaaacacaaaccttttagatacgacgttcttattgatacctgagtttggatcatacttgagtatttcaacaggaggaaacaactgggccgaaacaaactcgggtcgcgaaactcgatcaccttctccacgagctatggcggcccatgctttgacaaacatgatgcaagataatgcgtcggcgagctggtgagataagcataagcttacagccactccgccgtgttggaagatgttgagttggacgcctaaggtgaattcttgtaatggaaagagttctttaaagggaagaaactcgttgagttgttttgggagtggattgctgttaatggcttctgaaacatgactcggtgactttactcgggctaatgtgtaaggaactccctcgtcgttacaatcgacgaatcggtcattcttgactcgtcctgctaaagggtagtaaagggttaagacttgtgataaagatttcttaatcttgttggatatttcttcgatcttgttggactcggcatcattaaactcgtagaacaaaactagaggattgtatgtttgtggagatatttgatcaaggtaggatagttgataatggcgaagatgagttggggttggtgatgagggcttgattatctcatttgagattacttcaacttcaactttcattattctcagccaaaatatagtttaaaaagaaaaacaaacttaaatttataatttggctttggcttttgcctatttatttgcatatgtatggtatttatagagaaaatatataactaataaaaagaataaaatgtactttttttcagctgtgtatgctaaccaaccttttctttctttgcttttatcatttttataatgttaataaaccttttagtccagttttataattcaactttagcttgcgtataccaattgagaacaattatatatatgataaaggtagtcttactatggtagttggtggtttctccattatttataatatatggtataatgtggtaggtataaatagtcaaggttttgcgaaacaactagttgtttatatatagtaaatgacacaacacatataaagtagacgtttagtggaatcacactactatttttatcttatgaacccatgatcttaaatgttgaatattctcaagttagattttttatttaatattaagtaattattaaagtttgttacatcacaaatggatcgagcactatatatatatatatatagatagaattatatatagttggaacttggacccaaatgtttatatatatttatgactttgttcaatacatgatgaacaagattattttaattagctagtcgactggctctttgtgcaagttcgtcgttcttcttttgtcttcttgtcttttgtttgcattacatgttcggcaataattatataaagaattattagttataaatctatcatatacaaactggattttatatatcattaattagctagatcgaggagggagatttaatattgttattgttattgcgattgctacatatatataaaaatatatatataatagatactatcttattgaaaattacatg

SEQ ID NO: 36512 - DNA, 6917 bp, Cannabis sativa
ataaagtgaagatagatttagtaagtgtaaaagagtaatatgatcatttaattccaagttctgaaatcacgtttatgtcagaacccatattcaattgccatctatacattttacttcataaatgttataataatattatatgtatattttgtataaatgacacaccacgtgaatgccctcattttcttcctatcaagatgataacaaagattcaaatgaataaaattgataccgaagagagaaaatataaattcaaagtttttttttttaaatagtaactaattacatgccaatagaacaaataaaagaaatttattaacccgctatgatttttaaatagaaagttttttaaaattcatttttatcattttttttggctgagcatacaaatatgttttgtttttttgacaaaaaaaaaaaaaaaaattatagaagaaaactcaaaagaaaaattaaaaatatagaaagaatagcttattgggtaaccaattacatccttaaggtaaccagttaccttatttctctatttttctaattattttttaaaaaattctaatgatatatattaggaataaaaaatagatcacagattttttcctcactctttcggtggcttagtcagttctaggaactacgtgctatagctataggccttcaagagtcaagtataattccttacaataagagacgttgtagcaacattcgacgaacaattaagattgttaataaatattttcttaccactacaccacacaattggtaaaatatattatttttaaaaaataaaattataatttttgtacaaaatatataaaacacattaaccatatcattatataacatgaataataataaagtaaaataaagaagtatatcccaaggaaaaaaaaacaaaaaataatagcaataataattgtataagatgtgtataaatggggagacaagaaaaatctgataaacatgtatatatagtgacttatgatacttatcatgagtacatataaatatatatatatatatatgtatgtatgcaggtgtgtatatgtgatttgaatttaaagtgtagtaattatgtgtgtgtgtgttcatttatagatatcaagacacacatatatatttatataataggtaggatttttgtattatgtattattgtagtgttggaactagggttaggacgacttacgaaaacatgtgaaagactagggctttcaaaaaatggccatggatcatgtgaatacaaaaatagagagagaggttgtaccttctatgctcttaattatatatatatatatatgcctatatatatagcttactgtatatattgatgccaaccatcacaattttttatcactcacaaaatttataacaaccccttttgccttcttcttttgtattttctctccttgaaaatccactcaattaattctttgatataaaaaatatatatattctctcctatatataaatatattcttaattatttctatatatcctatattattggaaaattcaaatcatgatgatgaagggcatatcaattgttcatcaacttaagatcaacacagcttattttctagtgattttcttagtgattactaccacctttggcttgaggcctcaccaatgtaagtcaaagtgatatatctcattatgcatatgcatgtttatataaatatatataaatttatatatatatatatatatatatttacaaaatgcttcatctcctgcactaattaaagatcattagtttagatatattttcttcttaaaaactttattatgtatacatagttatatagtatattatatacttatatattgtaaagtatatcaattttcaaaagatataaaataatccaaatccaaaaatgtgattagtttgtgaaattataacattatctctaacacttgttattattgatttttttttctaaatagatatgtcagttacagttagatcgagaaatgaaggaggtggagttggcatgagaaacaatgaccccaacttattctccaaggttaaaaaaatttccacactctctttaattagttcacaaaaacacttgttaaagagtgtgcaatactattagcaaccgtagaaccaatttgaaaagtctgtcatccgaggaaaaaaaacactctgaagttccaaaaaaaaaaaaaaagagaaaaataaaattcaaaacctaattttaacctttttttttcacaaaacaaaagattcgaaaattaaaattttaaaatacgaagtccaaataggtaaatgatgcaaaacatatggtcgaaaacatatattcgtaagaaagattttttcgatctatgacactattattccagtctttaattatgttatggttacttttttttaactatttacatgctttttacttaaaaggtttagaatttggtcgaagtgagtattgtcttcaactccgctaattgaataattagaagagattgatttctaccgtctgtctttcgcttctatcatattatataatatattcaatttgtataaaccctaactaacatttttgtggattaattgcagaaaaaagatgaagtggtaggattgggaatggagatgtacccaacagggtcaagcttgcctgattgttcacatgcttgtgggccatgctttccatgcaaaagggttatggtgagcttcaaatgctctgtggagtcttgtcccattgtctacagatgtatgtgcaaaggcaaatattaccatgtcccttccaattaacaataataattttgtattacttttaattaatttaattattagtactctattacctccttcccctactatctaatcattttaattaaccacttatttctttcttcttctttggtaatttctattttaggtaggttttcggaaaaatgttgtacatgtttttatctatccccattaaattgaaatctctatgttgagaattcatattctaaactatgtccatctaataaaattgagacaacttatttaagaaaatgatcatatgatttgttatttttaaataataagttatcacaattctattaggtggtcataattttgaccttgaatctttttcggcttgctaagtgttattaatgacatttatttttgtttcaaatcaaagaaggaaaaactttcatttattgaaagatgttgaggggtttctttactatggttgtttgtggagttttagtgaattagtgattattaaatattttatgtattattttatacctttgcccatattaccaaaaaaataaatgtatattacatcaaattcttgatagtatcaaaatgactgagcatatgtatgtaaagaataaagggtgtagaaataaagatcaaagtacaaattttgagacctttttactaaaggaagtgaaaatctcaatatttttcaataatcttgtctcatattctatcacactataaacacaaattattcctaaaatctaaagataaagaaaattacataagaacatggagcaacttcttgaagccaagcctaaaagagatttaaagtttgtactaggatgagttcaaaaaattataacaattgctatgtcaatacaaagtaaagactttgaactccaacattttcaagaacaaaacacataataggtaatttttttttttttaaaaaaaaaaaaaaagaagtttcaggagtgaacacgaaaactttctaaaagatcacccatcctactactactctcgccaaaacacgcttaactgtagaattttaatggaatctggtgcattagtgctggtatgatcacacccaacacatgataggtaattgttccaagtaaaaatataaatttaagaactaatccccattaagggacatgcttgcttgtgatcttaagcttagagagtttatgaatgtgacaactaagaaatgtacttgtagagctcaatctatcttgcaccactgaaactatagcaatcaagagctggttttgagccccaatttcatgttgcagctgaatttacttactgcttggcaatgcttagccaaccagctcggccagctgcttattcaatgtgttataattataataattattattacattcataataatggcacacaaaactagtcatgctatacacctagatatcctaattcaactatacattccaacaagtaattaagaaagcacataaccaatcaccatatgaattgaataccctggtgattgagttttgaaaattcaataaatgtgattataaaacaaagtgaaaatgtagagctcaatctatcttgtaccactcaaactattgcagtcaagagctggtttttgtaccccaattacaagtctgcagctgaataaatttactgcttggcaatacttaagccaaccagctcgggccacctgcacattcaagatgttttttcttactataactacaacatttctgctgataatagttcacaatcctttcttattgaaagctttgataacatcagtttcagtatcacaaagttacaaaattgctttattcaaccagctccccactaacaacaactaaaaaaaatactctcttcctatctctcatattacaatcatattaagaaatcttgtttgaaataagaaaataacaaaataaaagctgacaatttagttgggcatccgccgttgaaaaaaatagccacagatttcagataatttattttctaataggaaaatgaggtttctttaataaatattgtagcatgcacttttaacatgcaaagaatgtcatgtttaccatatactttgtgtagactaatatattatgcggcacactgcttgtcctcgtaatcaagattaagaacttgaagcaactttggccatgattcgggaatccctcctggcaaatcaaactccaatagtttgcctcgactacggtaaaaattctcaacaggttgactctggaagaagcaacaggttaacaaacaagagatttagtatataaaaggtttttaaatggacatatgataaacaccagaccagattgggatgattgagtatcttgttaagttaatagatttcgctattctaaaatgttcaagtgccctttttcaaaatgaatgataagaaatggattaataaggtaatattaccttttcattgtatatcttgaggcgttctgctacaacttcctcaacatcatccgatctagtcacgagctttgacatacaatgtgcagggggaaggagtgggggcatgataattgcaggatgaccattctcacccttgacattaatagaagccacattgaagttcttcccacactgaccacaaattcttctaccgaggcatttttccatcagtacatcttcccgaagcttcagatttactactaaatcaatgtcaatgacctcttctagtatctcctaaaaaatccatcggaaagccaacattttcagcactttactaagaatctaaataaccactcataaagtaaattaaacgcgaaaaggaaataaaaaatgattcaggattcagaatgagtaacagcaatccaaattccaatttttgagaaaaaaattatttacttattatcttttactttgataataagctacgcaccaaagcttaccgcttgatttattgtccgagggaaaccatcaagaataaacccagattcgcctttcgcatccccagcctccagccttttcgacaacaagtttattataatttcatctgaaaccaacttaccctggtttacaatctcagacagctgcaacaagaaaaacccaataacagggggaaatgatattaaatttacaattaaaaaaaacaggtggtgatttttttttctttcaagctcaacaaaaaacctgcttagcttaaaattaccagtttagaagtgagaataactagagtctagcttttctttctactagctaaacagaaaaacttacaagtagatggtcaagcaatttagtcaatttcgagcccacttagttggaaacatgattaaaaataaatactttatcctaaaacaaaggttcaatactcataatgcaacttgtccatttttcatgacattgcgaatgttgaataaacttcacaaaaaacaaatctttttcggttaacgattggatcggaagtaatcactgtctttcaaaacgatcccattataaaaattagtactttttccataaaatttcacaatttatcttattgggtaagctaattcaacaatcaattaaggaatacgttcatgaatttaaaataaaacaaacctgttgagcgaaaggaccagctgaggcgagctcttcgcggacgagatcaccggtggcgatgtgaggaacgtcaagaagtttacagagccgactagcataggtaccttttccgacaccggggcagccgaggaaaacccattggacgtttctatccttgggatctttacgtacgagattggtgttgcgagagaatgaagaatgatgagattggaaattgggattgggttcggaggccatagctgatgaagataaggatctccgtaatagggaagccatggaagaggaaaatgtaggtttggataggcgggttaaggccgccattggaagaatttgagaagaaggtattgaagaatttgggggatttgggtttgaagaagaaatctgcagagtctgaattgattgaaccctaaccctaacgtccctattagtagtctaccgtacgacaaggagaacttttaactcaaattataaacaacatcttattataggtacgtatttttttttttaattaaaatttccaataatttatatgctaaaataaatctaaaattttttgaactttttttttttgaagaaaagcgaagcaatatatattaatgatgaaaacagttagacctcgcggtcattacataataggtcgaccggtattgaggaaaccggaataacaccaaat

SEQ ID NO: 36513 - DNA, 2209 bp, Cannabis sativa
aatcaccaagcttgaaattttcaacaagaagatcaaaaccccatttcagaaatattgggattgagctattttgtgaagaggaaaactctccaagttcaactacttcttcaagattttcccaggtgggtttttttggtgtaaattagtttgtttgagattatcttagttttgaagatttacttagtttttttttctatgttttttgatagaaatctgcaccaccattaattagaagatctagttttaagagtgggaaaaggattttagcaagaatgtctagcaagaaattaaagaagaaaagtactgatttgaaccaaatgaagtcatctaatgaagttgaagatgagaagagaagaacatcattagcttactcaaagtcaaagtcaatatctcctggtcagaaatcatcacctaggactttaacaaggaaacttagtttgaaacctttaaggttttccccaacaaaatccaagaaaagtcccttgaaaaatcattctggggtatctcggtttcctgatttgagtgtcgaaagagctacatgttcttcgattcttaaggattctaagtttcatgacaccctgcaagggtttgaatccattggaaattcagctatgaaagtttgtacattttcgtattgctcgcttcatggtcatcgccatgccaatgtaccacctttgaagcgtttcatatcgatgaggaggcgttcgatgaagaatcagaggagtacaagaggcgaaactcgagctgcttgtaaagaaaggagttcgggtaagggaaagaaagaatcactagctcttttagtagaagaagttgatagggaaaacgagttaggtggctatggcgaagaagaggcgaaaatcaatgattttgttgagaagttagttggtgaaacatcaaatccactttcacatattgatgagaatcgaaatcaagtatgcgagtttcccattgttgagcctaattcagcacaggtggagattagtacagcttctcaaagcagtgatgagttgaaaaatgatcaacagttggaaatggattcgggatcagttggtgaaagtaaggagcgaaatgagtgttcgtatgcatccccgagaaagttagaagctaaagatgagaaggaaaatttggagcctgctgatggcttctttcggtttcctcctactaaggattctgaacttaatggtattaaagatatcggggcatcgagaatgcaggtgcagctgaaggatcagaaatatgtaaggatgtggcgtttgatgtataagcatactgtgaaaggagtatctgggacagttgaaaatcaagtccctttcgataatgtggacaaggcagaacaagtaaaagaggctgaagttgtacttgaaccgaacgattctcaagttcttcaagatgcaatggtggaaagtggtaatgctgatgcaggcaagcaacagatggagctttaccagaatgatgctgttaagctggtgcaggaggcttttgatgaaatccttctccccgaaattcaggatgatcggtcagttacaagtggtgttagttcagaccaggaaatcttggaacaaggtaatgatgatggtataagcaaagacgagaagacaccatcgaaatggggaggcaaatctggttctaagagctggagtaatctgaagaagatacttgtgctcaagagatttgttaaggcattggaaaaggtaaagaaaatcaatccaagggaaccgagttatctgcctttgcagcctgatcccgaagcagagaaagttaatcttaggcgtcaaacatcagaagagcgaaaaaatgcagaggaatggatgcttgattatgcacttcaaaaggttatttcaaaactcgatccacctcaacaaagacgagtagcgatgcttgttaaggcttttgaaacagttctaccaccgtcggatcttaaaactagcccgaggctgagtttggccgaacacagtcaagtagataaagtccaatcctgtatcagttcttttgttcaaattggtgagaagtctggtaaagaaagtgatgaaaatgagtatgcagaggagtttccaaagctcgaagatatcgaacgagaagaggatgtttccattgatcaacaagattcttccaactcgagtgatgagctgaattcggttgacattgtgagcacctttcatgaagctctacaagatgaacatgttcaagtggcaccagaacaaatcgatgc

SEQ ID NO: 36514 - DNA, 5106 bp, Cannabis sativa
aaccaagtgatatataacacgttggtaaatggtttttgcagaagaggtctgataaatgaagctttaagagtgaaagatgtcatggaacagaaaggtttgaagatagatatttttacgtacacaagtattgctaatggattacataaactaaaccgaaatgaggaagcaaagaatttattgtttgccatggcagatcaaggtgtgcctcatagtgtggtgagtttcactacattgattgacatatactgcaaggaagggaactttgccgaagcaaggcgcgtatttgaagagatggaaaagaagggagataaaccaaatactgttacttacaatgctctcattgatgggtatagtaaaaagggaaagatggaagaagcttataaggtaaaagatgatatggaagccaatgggatgagcccagattcatatacatacacttcacttattcatggagaatgcattttcggaaacacagacaaggcgctcgaactatttaatgaaatgtctcggacaggtttaactcagaatgttgttacttacacagctataatttcgggtttgtctaaggatgggagaagagatgaagcctttagattgtatgatgagatgaaacaagcagacctcacacctgatgacagggtatatactacgcttgtgagcagtcttcacacagcagagtcatagatttaaaaaagggatcttttactaaagctaccttgggttatcaatctttcaatgataactaagtaaaagacttagtttgtcaatatgaagatgcatatgtttgaggcggtcagttcaccatttgctttgccataaagaatttttgcaacactacaattgagcaaaataagcttaaactgttgaaagacaagaatttccccccatttatgtcattgtgtactcatcacttttaacagccttatgtaaaaacgatgaatttcttagtaataaaatagtaaaaaaaatgttagcttgatatatgaaattgcaaaatatacatcaacaaatagaatattcatcttttagattaaagactataaccatatattgacagaattcacagtgtaaaggcagggttcattttggattcccagcttctctgaactctgaagccacaattcgctgtacatctttggaaactaggctgctgaactccattttccactcaaactagtaaatcagaatatgcatcaagatcatggctgacaaggcactgcttgagcttgtagagtgctctgctctctagttgtcgcaccctctccttggacagaccatacatgttaccgatctctgagagtgattttcgtgtggcaccaccaataccgaatcttagccgaattatctgctgctctctaacattaagacttcttatgagaccatgaaggtgtcgtctcatcatttgcttcgacacactcacatctgggatctcagttcctgagtccgctgtaacttcctgcaattacaatacagaaaaactattgtttgatggagctcaatgctaagcctttttttctaactgaaaactgtctttaagacttctaattcgatttcagctataaatcaggattcatcgtgttacctggaatgtagttttctggtctgcccagacaggttgttgcaatgaaagtggcgttcttgtgatatatagcagtttctgcaacctttctacagtaataccagcatgtcttgctaaatcttctttggatggactgtgatttcctacctcaatgcatgatctttttgcttcagataccttgccaagtaaggtatacatgttctcctgcatacaattcattgttagttttctgtgtcacataataaaggttggtgggaaaaggtacggaaaattaaaagaaaaagaaaatgtgaaaactttaaaaaaaaaaaaaaaaattgtatagaaaaaaacaagattcaacaaaatattccataccatacaatttttttgtttaatctccacactttttctttttttacatttttcttagcaaatccaacttccaaacatagcctaagagataaaagatttaaatgggagaactcacaagcagtttctctaccacagtaacaaattttacaaacattaatgagcattaaaactcaaataatcatgcagaaacttcatatctttcccttttccatttaggaacaggtaatttgtagaaaaatataatcaatgagctgaaacgcaaaaattcatcaaccacagatatctgatcaaaagaaataagctaaatgaaggaagttttcattactggtagacgaatagtcctggaatgttgaaatatggccttcctaattgattgccttatccaccaatatgcataactagcaaatcggcaaccagcttgcggtttgaatttctcaacactcttcataaggcccttacttccttcctgtaagaatataattatgaaaacatattagcacctttttagcagattctacatagtacccttatatattgcatacaaacaaacaaggcatgtttgttctcacaggttgttaatcagcagtaaagatagggagattatgaactgtcaaaatataattaaccaatcaaatagagaggtttttgaagctttcctagtctttccaatgaatttgagtgtttatgtactcactcagactgaaaacatactccaaacttaaggttttagttggtggctttagttgagaagggattgaaattaacacaatctcaaactaaagtatttaatagagtttgagactactccaaaaataaactaaaaatgggacaccttccattaaaatcatactaaacatatgtttggttttatatttccattcccaagaacccaaacccccacataacaaatacccccataatgtgttgacattacctgcatcaagtcttgaaggccaacaccacgcccttgatactgtttagcaatgtgaacaaccatacgtaaatttgaacagataagtttctcccggctgctggtaccagagcaaatttgtgttcgcaagatcctataatgaatcccaactgcttctgcccattcaaccaaagttggctcacggccaaactctgattgaagtctgtccttgacttgctctaatttcattaaatcctgttgcattatttattttagaattatataacacactacacataccatcattcagaaatagttttcattagaagattaacctgtactcgagcaatcaattcgaactcttcttcaaaagtcaaaagctgttttgtctcagagctcgccaagaacaatcgaagggggtcatcagaatcaaagcttgagtttttccgaacatctgcacttctaaaactgtggttctcaccagacagaattttcgacttgggcacatttcgcttcttagaccgtctctctataagtcttgtagacctcacagttttgtcctccttgcctgccaaacttgcagacccagatagaacagaagtttcagacctccttttccaaaacaaacatcttccatgaaaggggaataaacaatagcgaatgtcaatccagaaagataaaactaacctcagagaaaccatatcataagaatcagctcccactaatttggagtcttcgactaacaatgctgcttcttttgaagcttccagagctttcttggctaatgcaattgcatcacagagtccaacattcagagtcttcttgccaccagcagttgtaagctccattgtcaatgctgcagatgaatccatctttgtttgtgaggagggaaatctgaaatggggaatgaactcataagcactatacaacaatgaaaaacagaaatgaaatttgatgttagtataagagaaaaatagttaatctcacacgtgccaaaaactgggccagtggattgatgtgtgctcgaattcccatttctgtctgttagtctctgcatggcttttatcttcatgaaccaaactcccggactcattcttcctcctgtccaacattccctttaatgaacagaaacgtgcagaccatagtacatgaatcagaagtttcaatagaattaagcaaataatgcattcatataactcaaattcttacgaagtaagcatagcaaggtgtattaaacgacatgaaacaaacctgggatgttttctcttccttagttaaacgcaacataggcctcaattcatcacgttgctcttgtaaaagaaccgaggcagaaaaccgttgagcaattgaagtagttggtactgaagtaaccgcaggacctatgtgttcatgaaaaattaacaactcaatcaacacacacaagaaaaaaaaaacgttaaacaacatcctaaaactacccgaactcacttgttttggagctagctagcccaactaagtacattagaaccaatttcattaaaaaaaaactcaaggaattcagcttgaatcccaaccttgtaaaaaccacgtcactaaagtacaaactacctcctactcctacccatttcatcattctctaagttcagtataattccagaaaagtaacttggaaaaaaaaagactataacaggcatataaacaaaaacaacaaccagaactgaagaaaagatacaaaatttacaggtatggcgttacctgaagttgaagcagaagcagaagcaggggaagaagaagaataattattcctgaaatgggttcttggaggaaaggacggcggtgaagaaagcaagttccttccgacctccatggcttcaaagtgttattaaaacaaaaactagtacaatacagtattaatacaaatagagtgtggttcggtgttgttaacaaggacgggttttgtatgtctactatgcatttagctttgtttttcttcttcttcttcttcaacacagcttcagccgaccaatttagacctcaagataagttcaccccattcctgaagtggatcagatatgtatgttctgtaatcctattcctcttcgtctcctcctatgtctgattattttattttattttattttatttttccttcttttgattttgggcctgtggttacttcaattgcttaatgcactattggatctgtccttagctaagtatgtcaagcccaaccaaaggtttgtcagtttgggcttttgctataatatgtagggaatttttcatc

SEQ ID NO: 36515 - DNA, 3918 bp, Cannabis sativa
ctttagaaacatggcaacactatttgtggcccaaagaatttgtgattcacacagatcatgaatcccttaaacatttgaaagggcaacacaagctcaacatgagacatgcacgataggttaagtatattgagacatatccatatgttattcggtataaacaaggtaaggagaatgtggttgttgatgccttttctcggaggtatgccttaatctctactcttgatgctaaattacttggttttgaacatattaaggaactttatcctgatgaccataattttggggagatttatggtgcttgtgtgttgataggaggtagatcacactaattgttggagtttggcagatctaggtgtctgaagtgatcagtttcacttcgcgaattgctttttttagtgtttccacccgttcctagtccttgtctattgaaaattaatctctaagcgcctcgctcccctcaaggaggaagttctgtactttggctagccaagggtgctcctgttggtggctggtcggccataggctgtacaatgggcggtgctgctaagccagagatccttggccaggcccccacactgctagttgtatagatctggttgttcttgccgttagacctttaaggaaatgtctatcctccctttggcagggggagatctgttggtcagcttatcgatagaccctccctgatctatcaactagtctttcttatagtggatctctgatgatatcctttcctcttccattagttctctggttgaactgccttatcagattgttggcctctttgttgcggcgatctaactctgcttggtaagatcgaaggatgtactcctggtcatcaatccatctgaagaattcgcgtctctgttgggccaatacattacaatcaacattgcgtggttcttgagttaggcctgcatggcctacaacttctctgagcttggctaactcaggatcctctccttagtccacagggggcttcccaatcgtaggctcgccaattggtcctatctctctagcataatactagagacaagagctagtttttgttcctggggcctatcgcccattggtccttccttcagtgggaggagacaatggtgggtcttccttcggaggcaagggcctgctcttcagatccaccacgatgcttgtatcagtttggccgattgtagtgcccaggcttgtggtgcatgttgtcaagacattattcaccgcatttgcggtgttcatggggattctagttgtgggtgaaactcgagcatttagatttgtagtttgtgggtcttaagagagaattgaagatgtagatggtgcgagtggggttcttatcgtgttaaccatggcgtttgatcagatacgatattcacgctctcaatgaaagcactaaaatgttgacctcaaaaagtgatcaactgacaacgaggtcgtatagatctaatgcttaccatgtgttacacaaatagaatggataagtaaagaacatacagatttgttatagaggtttggccctctgtgatatcggctaatgatctactccccttttagttgtattaataccaagggccaatactaatcagatcagtgtagatgggatctaatatagcaatctccaggatatatacaaagtatgaatcatgaatggaaaatatcaagtgatgagagtcttgtatgggtgtgtcagagaaagtgaagaagagcggagttatcaaacttaggcttagagcttggaggcgagtgtcagtcttagattgaacttaaattttctagattagagttatgacctttatatagtaagcctaataccctaatttacacttgaaaccctagggtatttgcatagttaataaatcaatcacaaaagaccaaaatgcccttgaacatatacattcttcagctattctattgggcatttagggtctaattcgcagcccagataatgttgtccacgtgtagaagttcacagagaatcctggagagctccttttaaccaactagacccttgtaggaagcaggctagctggccatggtacagtccagaggctggccggccatagggtcgtccaggggtggccagcaaacttatgtgagggactcgtctgtcacttgatgcccgtttgagtgccaagatctctgtttgcttaggtatcaacttggccttcttattggggagctatagtgccatgtgacactgattttgtctacataagcactaccacgtcaggaggaaaaaaatcaggataacactatatatgaaaaaaaaaaagaagtagattttaataataaaaattgtaatttacacaaaattttgatgttagaaaaaaccataggaagcgcttacattgtcggttatataataataaccgtagccataggggcctattgtgtcgattatttcatagtaaccgacgccatagagtccttagacggtcagttattttttccccctttggtatcatttggaacagcgtcagtagcaaatttcgtcgaaattgatgttgtaagccccaaaaaactacctctaaagctcatttttctagtagtgtgaaaatcttatttatcatgagcaaaccaagcaagtggagatagattgccagtggtagacttagaatttaaagtgacggggtcgtaatatattttttggtgagtgaggggagggaggaaaagtaaacttaagaagaaaaaactattgctcttcgtgggattagaactgttgtcctctaacctataagctatctagcttaactattgaaccaatgctaatattatttttataaatatcatctttttttttttacacatatatgttgctaactaaaatacatatatatttttttcctgatttttttttcagggggcgactaccccacttcgcttctatgtggttcgcccctatagactatcatattatttgagaaaaaatcaccaataaaagcatcaagatgaatcatgtcaactccaaatctaagttagcaaacctttattccatttttatttcattacacatgtatccaagattaggagtgtaaatgggttaggttagatctaatccgacgatctgacctgttctagatcatgtaaggatccaccctaccctacttcgcaagatcagatactcggatcggatcagatacgacccgactacttttttaaaaaaaaaaatgaattttaattttatatttgaatttataattttatttccatatcaattttgtattagtattatttaatacaatactatgtctgatattgacatgtattaatagattgtataaagataatatattttcaataaacatgatcccaacaccaactacgggtcgcgtccgggtctcagtctgggtccgggttagggtcctgtgtccgggtttgggtcccgagtccgggtctcgagtacgggtccaagtctgggtctcgggtctgggttcgggttcgagttcgggtccaagtatgggtctgggacctaagtctcgggtcctggtccgtgtctcgagttcgggtctggggtctgggtcctaggtctcggtctttgtctacgtcttgggttagggtccttggtttgggtctggatccgggttcaggtctcgtgtcttaggtcctaggttcgtatccgggtcttaggtcccaagttcggggctcgatgtccgggtttgggtcccaagtttgggtctgggtctaggttcaggtttgggtctcgggtctaagtgcgggttttgtcctggtttcgggtttgggtcttggtctgatccggtttggggtttgggtcccgctctggtttgtgtcggggtttgagtctgctttcaggtctgagtccgagtctcgggttggggctctggtccgggtcctggtgtcaggttcgggtttgggtttggctccgagtctgagtcctgggggtcccggtccgggtccaagtctggg

SEQ ID NO: 36516 - DNA, 6080 bp, Cannabis sativa
  modified_base (5472)..(5486): a, c, t, g, unknown or other
  modified_base (5811)..(5820): a, c, t, g, unknown or other
ttaaataaaactaacactacgtggcttgacacgtaacaattacctagtatatttatactaagtttcaaagtgataacaaattaaagaagacattgaaatttaaaattgatatgtaaaacactatattaaaacatatattatgatagtaataagaaagatcaatactttgtagccaacaactttaatataattataagaacaaatatttagaaaattatatgaaaattatatattggggtcggatatgggacggctagtattattccagattgccccaaacttacctcaagtaaataaaattgtcccccactcccgctccataacccatcaaagcgggtatttcgtgccacattcagggcgagtatcaacaagtacccatcctcacggattaaaatttcatctctaagtatgttgttgtgttttcttattgtttttatattatttacatgttgtctttatgttattttcttattgttttcatgttattattgtaaggctccataaaattgtaactaaaaccaaatagaaaactgtacaaatattttttttggtaaaaatataatataaatatatatattgaccgtataaaattataaatgttaaaaaaatttacataatacacttaaaaatatatatatatatatatttttttacaattttacagatttattttatatttttaggaacctctcttttttatttaaattttttagatttttgtttaaaagttttcacttattttttcaataaaaaatgttactttcctgtagcggctatgtcatttgaaataatggaaaaataatattttgtatagttataaaaataaatcatggtacttacttgtaacaacaacgttaaaataatatttttttttaaaaataaccaaaaaaacaacaattgtatttttgtaaaataaaaataaaaatgtaaaaaatttaatcatttttatatatttatgaaataataactatattcaatattgtccctttcaaaaaaagaaatcaatattgtgaattgatttgtgttggttttaagataaaatgagagtgattgtacgacaagtcgtttgggtgagttgcataattggaataatagaattggttattgtagtgattgatagtgatgaatgagagaaagtgactctgattaattgtcacatgcgtggcatgggcttaaccacgtgcagtaaaattatccgtgacaaccaacttgtcgtagtcgtgtgtgtggccctttcttttaatcttctatcgttttaatttaaagcctcttcacctaacatttccccattttgccacctaaacaacaaactgctttttcattatcatatcctatggatcatatcttggttaaaatagtgataatcatatttccttaactaataaccagtttcattgacaaaacaaaaaatcttatttgtaattatctgaaagaaagaaaacccaaaattatataatctcatatttcagcaatagctccaagaagaggttattatgaaagctttggttacttactccccttgcaacaaaatattaactcattaacacaagaatctaattggcacatttgatgctctttagtactttcttttagatcttagaatatctgaatgctattcatgtcagtgccttggttgccctatagaagaggtgaggctctaaataaggttaggaaaatgcttcatcatgaaaatttatcttgaatgatatcccgtactataattttttattttattaattaatgttttacctttttaaattattttttaataaatatattgtcacatctctaaaaatactaattcataatttgtaaaaatatgtagtattggtcttaaggttatagtagagtaagtcaaaatcctagtgttgaaaatgaaaatgattcaaaatggagctcatgctagtgctaccccaaaatccaaccgagtaagtgaataattgaccatctatgttatcaagtatcttcttccttgtgtctcatatatacgtctcatatatataaatcatatatatatatataaagcaaaaaaagaaacaacacaaactttctctttaattaccaaaagtaccaagagaaaaatagacccaaaagaaaggaaaaacaaaagtccattgaatatactatcccaaaagtttggagatataaattaatttacatgtaaatactttggagtaaaaaaggaaaacattgaaataaaattgagaactataatgtcaatatacctgtcttttttcttcttcttcttcttcttcttttttttttttggtttagcaattaaagataagtaattttagataaataaataaataaataaaaattgcattagtgagaattcttacaagcacaaatgaggagtgaaaactgagctgtttcttcttgatccttcttctggtccaaaatggtatcttccaaccacagcctggtatggaaaccacttcttgtcctgaacatgaaaacggcacaacccgatgtcgtattgaaaaaccagtcatgaacatcccacatcaaatccaccactaaaccatccaagaatattgcatgattcccacgaaaattccacctcaatttcctttcctggaaaatggtttttctatctatacaaacagataaaacagggctaaaaactttagacccttttctctttacttcttcttcttcttcttcacaagaatgatcatcatgatcattacgaccatctttttctttaccacactttactacaatctcatgaatcattccattatcagaaaattgagcttttgttgaataaacacagtaatgactagaaaacttctcactcctagaaaccaataaagattttctctttgaaactctgtctatttcatcaatattggcttgtttgtcaccgaggattaagaccatttctttctcaaccaaaacgacgacgtaaaacccattaacgggctctggtcctattccatatttagcttcacaaatatcccaaaaaacttcaatctttaaaccactggatcgaaacgtttcggtacctttcttcttccatagtcgcttaaactcggagtgtttcaattcctgggttactcttatccctggtgcgaggttgctaaaccaggttagagtaatcaaaacctgtgtttggttagagaggttggctttgtatatacatgtaacttggtttgggattgaagaatggtttaattttggattgagataagacaagtttgatgaacctgaacaatatgaatctgataccttagtggcatgttcgttgtaacaagttgctatgttcctcatctcaatgaaaaataattaaatataaaaataggaatagaaaacagaggaattttctgtttgggaagagaatgtgttttgattttctttctctaagaaaacttggagattgaaggagacaaaagatgaaggcttacttattaatattattatatggtttccaattttcatccatgtgggggtgtcccttctatttcacaatataaattagtgtaaaaaaaaaaaaagaaactagtaaagacaaaattaagatagaaagaaatgaaatccatgtttggatatatctaaattctaagcccaatctatatttatatatgcattaataacgattcctttaaccttaaaaaacaaatatatattatattattttaataatgataagtaaatgaggttaccataagtcatacgtaaaattaattaacataaatagtgattgaatttatggtgatgataaatgttttggtttacttacctattttgagaatgaaaataaaaactatattaaatattagattagtgggaaataaaagcaaaatttgtgtaactgccaaaaatatgagattatatattatatcagttatattatgaatagtttaatgaattaaggctgacatgaaatactattggataacatggggttgggatgatgatgatggtgatggttgggtccatgaaattaaaattaggcaagagattcacctactacaaactcaaattttagattcacatactacaaaatataattataataataattaaaattgtttttattagttcataatcaatactttcagttacaaaagctggctattatgacaatagaattaaacaaattagaagacactattggtcagctttgtgcctgttttgttttgtttgtttgttattagagctcatcaaaacacatttacacctcaaaaaacagttatattgaatcacaatattgaattaactttcttatatcattcttggtgtaaaggatggtgaagggtcattctcatcaataaataagttgataattacaaaagctcaaagacagattactttagttttttaaatattgggttgtgttggaatttttgttgcaacaatggaggcctaatctataggaccacaaaaacattcttaagtttatgaaagtagggatataatttcttttcaccactcattaaaaaaaatctctatgctagatttcccctttgacttttgataatgtatataatatattaaggattttggagtacaatttttttttaatcagagcttgaaaattccaaacagcaatgataagacttgaaaaacaacccaaggagaagcaaagcaatcttgtaaagctatttttgagtggttctatataatttcttttatgcctattgagtaattgacctcaacctcttttttcttgtgtctgaaaacatgtacaaaataataaaaaaagaactcacgggtaaagtcatagttatttcttttcacaaattgaaacattactttttcttgggttgtactactaatcaattcaagcactttcaaattcaataatgcacaaactctatagtccttgagtcaatacatggttctaacagtcaaatgtgaccaatatttaagctagattattagttataccaaaaatttcttccattcggtgaaaatgggcattcgaaaccactctgtgttaacgtgtaagtagttggaaacaagtgattttgcaacctgactaacactctctaagataagatttggctttctaatatgtgaagataaggtcattaattgctgataaactactaagtgttctggaagatatgaaacatttttagaccatttcaaagaagaaaaaaagttaaaaaaaaaaacatttttagacagtgactaacctaattaatagaatttaggacacctgcccattactcctaaattaacagaaggtgacataatttggtggttgaagtttgattagtattgagatgtctctcagttaatgaatttgttttaataaagaaaagtttagtaaactacaaagagcacaatagccactggggatgttcataaaatagccgatctaatccaatccaatccgtacaatctaatccaattcaatccgtaaagttcggatatccgcacttgtgcggattagattggattgaaaaattcaaaatccgcacttgtacagattggatattgattgacatgtaaaagtannnnnnnnnnnnnnntccacacatatttatataaaaaaattatatatacaaataacattttaatgtaaacaaaataataattaaaagtctaatacatataatataattatatttcaaaacttaataaatatattctattcttatatataattttttttatatacaatttatagtaaaattaagcatttctttatagtttatacatacaatttttttttcttttaaatttgttatttattatttttttttattttaattttttgttagagacataaaataacaataatttattttattttattactaattatgtgagaattttttttttcataaatattannnnnnnnnntattaaaaagtaaccaattcaaaataatcgatctaatccgcacatttgcggattggattgaatttcagctattgtgcagattcgattgaatccaaaaactgaaatccacacttaatggatcgaatgcactatgagcgaaatagtgcagattgaattggatgaacactcctaataaccactttctttttctcatcttataaattttaaaattccttttattattattggattaaaggataaaaaggaagaaatgaaaaaga

SEQ ID NO: 36517 - DNA, 8028 bp, Cannabis sativa
acttaaataaaattaaaaataaaaataaaattgaaagttatagaacacacttttgttttctgtttttaaaattgaaaaaagaaaagtcgttatagaacatatttttattttttaaaaacaaaattttaaaaacacaaattttacttttcttttttgtttttaaaattaaaaaacaaaagtgttaccaaacgccccctaaacttcgatatctaatattaatagcaaatcagaaataatctagaaggtagtcaatattatatcattcttgttctttaaaatataaagtataattactagaagtaatttattatatatcgtagcaattacaaagtcaattccaaatatacagagaatgaccattgcccgacactttaaggtggcaattagtgtttatggttcgtattcgtgtcgtgtcgagattcatgtatcagaggtacatgcttgatctgaatacaatccgtttaataatcgtgtcaaaaaataaaatccgaacacgacccgtttataaacaggttgacgcgacactacccgtataacccgtttaaaacatatattttgtttaagcatgtcaaccaataacatacgtttatgaagtattcaacacgtttatagcctatttataacacgtttaagtattaaaataactttaaatagacgggtaaatatcatgttagtcgccgcttattaaacgggttagacgagtcaactcgaacacaacccaaatccatttaagacaaattcaaacccgctaactctcatgagaatttcaaatcgtgttatcgtgtctgacccattttgtgggtccttttaataattttattattttttatagtgctgtcaagtgtctctggtaacattttccatcgtataaaatttaaatataaattattaatatcaattacagcatggaattcagcgcgtggggagagtggagacagtgtggagtctctctcccaattagctatgattccattcgaccttgccttctctgcctcattgtgaatgtggcttctctctctctcataataataagctttttttactctttcttttttctttttaaaaaacaatattgtttattttaaagagtattagtctagctaggtaggaaggactcactgctcactcactcaagtcactcgtgctcttaacttatttctctctgatatatactgaaaaccaaagactgatctgtctctgtgaattaagtgcattatgtcacgtccttatattatatattaatatttggttataataatttttactctcaaattcatttcattcaagcccacacgctctggttcgccattcaaactacaaccagccccatcgaccgatgcagtcaaacccctctcctctcatttatcattaattcttgccctttcgccatctgctctttctaaaacccatcaaccctctttgcttctctgatcatcttatatatatattttatgtattattgcctagttagctacttctctagctaactcaccaagcgggaacatttttcaaaacccaaaaatttagtacttatttattatatagatatgttactcttactcatttatgtacacatgcctatatatattttctcaaatataatatttcatatggcttggtgtaccgtgtatgtgttattggatgtattatatatatgtgatgatctctctctctatctgatcactttaatatttgttatctattactatgatcacaaaatcaattatactttttaatatataatatatgattataattatctaaaatttatattgtaattattctataaaattaaaataattaagctcttggtcttaatatcttatatgaatagtatcatcgatataaataattttaagaaatatataaaaatcacgtgcggaaattgaatatatgtagataaatatgagttatatcaattagttactttgttttttctttcatattaatttatgtgcaacctttcactacatggcttatggaagaaagaatctcatatttacctaattataataattagtagaaaaaagaaataaaagaatcaagtactgccgatgatggctactcttttttatataccttttttttttcaaggagtggactgaactgatagcatatatatatatatatacgaaagaaaaatatattaagcttttgtttattgtatcatattctatgataacaaaaagttagcctattgttgaatttaaaagatgtaaataaaaattgaaaacagaggaaaagtagtataaagcagtgaaacatacttttccatattgggcgtagaacgcgttttgttttgttttatttttcttctaatatatataactttaaacatgacattcatatgcagaaaacttattgtagttaaattataatttaagaaagagacgaagtaccacaattataaaaataataaaataaaattataatgtaaatgtctctatatttgttaattaattaattagtacttctataatatttgcaaaaattatataagttaattaatcattgaattgaaactgtataacattgtcaaatacatatatttaagctaatttagactcaaactatatgtatatacgagctaagtgttttgttttctaatattcagtctctctcaattttgttttacacacacaatatgacacgattcatttatctttatttataacctcgataaatgaaatatcaaataaaaaaagattggttctgattcgggtgtaatatataaaacttggctcaacataaaaaatgataaaatacttatataaataatattaaatttataatttaacttttttcttgaccatagttttcttttctttttttttttattacataatgcgcattcatatgattattgaatctttataaataaataattaattttatttattgattagtatagataaatttttataatatttcctaaataaataaataattatttatctattttttaatgcaatataattaaggaaatatattcaattattattattattattgtatcttctccgaataaattaaaaagtggttaacatataaatagttaaaattatctgaaaaaaacgaaaacagagaggcgtgactttgattcaaagatactttccttgcaatccgggaagtgaccagtaatgatgcttgaatgggaagcaaattgggatttgggagtactgagaaaaattacgtcatcacgtgcaaaaggaaagggagcacgtgcacgtgagttggggttggggtatccattataccaatattaccaattaccattacgtggtcatgagatcgatcgatatttatatatagaatagattagctagaaaaagcatcttcataagcatgcatgcagacaaaatatatatccaactctgtctgaccatatctgcaccctttaaattcttgttcctatggttgtgaccattcatctccactattccaaacaataaccgatccataatatttattaatcctcaatttaattaacaacaatttcacttaaaagaaataaatcaagaaaaaaatgcacggattatcttatataaatataatgcactttttgaatataattattattcctatatattagtagtacttgggaatctttcatgattaatataaacaaatacattagacatgtatatatcataaatttacttcttaaatattgttatactatgtattggacagtactacttaagtggcttatacatacttatattttagttggatattgtttatatatatatataatgtataatatatataaaaacccaatcaaacttatccaaaatgtctcttttaatctaaaaaataggttgtctaaaaagctagtcaattaatattatttgacgaccattacatttttaaaattaattttatgtttttctcttttagaaatcatatataggtatataagttttaggaaggtatataatatatgatgattaatttattaaagaatatatttcaaatcatgtgagtaaaaatcgatgggagagtaatgtaaaattgtaaatatatcatgtcaattaggagtgtttttagaccacatacaatatttttaagtatatccaaatctgatccaattatatattggatattaaattttatcatcctatctaattcaattaatttcagttatataatcaattcaacatttattaaatattggtttagatcggttttattcattaaatagatgtatttcatatatatttattggtttaattgacttttatcaaatattttagatctagtattttttggatcggattagatcaatccaatattttaagttaagtatgtactgaattggattagattcatccaattcaagaaaagtagagtaagtttctaatattaactttcttacaataatataaaatctaattactcattcaaactaagtaaaaataccaaattatttgattagatgttggatgtattgaatttttggacaccttatccaacatgcgattcgattcaattagatattcaaaaataacaccaaatctgatctgatcacgattggatattcactatttgtaactggatcaatcaattactattgaattagatcgatttatatacacctctaatgacaatcatgtaactacttgtggtatctatttaaaaagtaaattaatgtaggatctcttaggcttacctaaactcccacacaggtattcttacctattcttcaaatgtggtattcggatttataccccaacaattctcctctctagcaaaactatcttgtagcgtcgtatgaccattaacaatattgtttggaagactttcgatacaaggcaagacaccaaacacaaatctccatctcaaggtcacatagaaggccctctcacactcacatgaaacacgctcttgaatctttggctctaatactgcttatttgggacttattcatccaacttattgggttgtaaaaaactcacctaaactaccacatacatatattgtcagctggctcgtaccgatttactttttgtaagcaccatcctaaaagattttatacgaatagagtaggttatatttaagacaattcttatatataattttttcaatgtgaaacttgagttaatacttcaacaattaatataataaaataaataaatagtttacataattttctttcgtttcaattcttttttagccttaatatttttttttaaaactactttgactaaaattatatgtaaaattacatatgattaaaattatatgtaaggttatcagttttatctagttgttagttgttacatttttctatactggttttctctgtctttgtaaaactcatcctccataaataagagttctctctctaaggcttgtatcttttacaagcttagttttctttctctcggtttgtattgataagatcattcatggtatcagagccatatctgtagtgggctttcgatccacacctattcagatggttagccagtcgcacgaaatctagatggtgcaaagatgcttgagatccgaataaaaaataagcgagcaaatggcatggcctgtgataaggcgattcaagaataatagccaccatcttgagggaaaatattggagattattgtcccacatggattaaatgtgaaagtattgagccatatatataagaacatggactactctactcatcaccaattaattttaagatggaaccccatgattcttaacgattactaagattgcattgctactgctttacaggtagatttttatgattaatgttttgaggttttatttagggttttttatttcttaaaaaaaatcatatgtaatttaaatgtatatgttttacttaaacttaacctaaacaaattcgcgattttatccctttcaaaaaaataagaaaaaataagcatggtataggatctgaaatagaatattacataagaagtaaagtcctggtcctataattaacggaaatggaaagtaactccaatataaaatctaattattgtaaaattttaattatatgccaaattaattacgtgtcattgaaaattttgtacaaatattgatcagtactatatattatgagagttgtatatgatttgtcacaaattaatgatttgtaaatttaagattgattctcgtagccttttcaaaaaagaaaaaaagagaatgattcttgtagttttgttataagatgtaagaaccattgtattaataacactgtataaaatctagacgtaaatctcttcaaaaaaaaaatctagacgcaaataataaataaaataaaaataaaaagtaagaagagatggcatctgtttgtggaaaaaaaactaaaatgagcggggaagagccacgtcttacgttttaatcctcactgtctaaacagcgcgtgggtcccaaacaaacttcaaaaacatcaacatcccaaaaataaaaacccttaaaacgagagtcgcccttaagacacgccctgactctcttgacccgaattgttcggctgggccccacttttttaccatatttaatttaattttccaaaagtaccccgccaatggcgctagaaatacgaaaaagcccacctctgaaatcgagagagaatatgccttaaaaatgtataagctggtgggtgagtgatggtggagactgagaggaagaagtggttgtggtaacggacacaaacgacatcaacaacaaaagagatgttatatagtaatactattactagtacagtacacatatataacatgttagaaacgcttctctctttttggcttttctgctcattaattatttattcctcggtcaattttgattttttcctttttggtaaactcaaaaaacaaaattaactgatgaaaaaattaattcaacacaaacgttagactatttcaatgataattttgcagttccatttattaaatttaccagataagcattttttttactttgactgctgtaaatgtaagttattttttttttttttacgttttctttttgttcacatctgcatgagtcgtcagtggtgtttggtagtaagataatgagaagtagtgtgacactgttttttcttttaaaaaagataattaatgtctagctatacttgaaatttcggaaataaatgcgcgggagttacagaaatgacatattcaataatttagtacacctgctttgcagtgatgtacatagctataagcctagctacttgcctactggattaaatgaacattattatagaaaataatcagacataattaaattaacccataaaatagctgagatagggactatacatattaaaaaaattggttcctattttttttttcttctcctttccgtattatatgtacatttttccttttaaaacataataaagtactaagttaatttagttgaaagatggaaaatgtagcattggaggaagaaataaatggagaaagaaagtgatgttttagtaagagaaccggacaggatgatcttatatgcaggctttttaatcaatcctattgatatagacacacacatatagaaagagaacatggggtgttgggaccctcaggcctcaagagagggttagacaaaggagagagaaaggggaagggtgtggggtccacacaccgcccatgcgcacgctgtcttaccagaaccaaacccatcatcgatccgattccttagacctaaccctaacccaacaacacattactactactacttctctacagttctacaacccccgataaaaaaaaataaaaaaaataaaaaaataaataaaaatcaactcaacctcttaaaaataaaataaaaacttaataataaaaaatgtgtaagcaagcagtagagagcttcaaaacctccttatacccaatccattcatatatttcttcttactagtagctgctgtctctcgtttttcacttctcttctttctaattcgctctcaaacccaaacttattaagctttcattccatatagttggtgagagagagaaagagagaaactctgaaaaatataaagaaacctctctctgcaaaaagataaaa

SEQ ID NO: 36518 - DNA, 3922 bp, Cannabis sativa
gtgtaagggtcttatggcttcatgattatcgattttttataaaaataaaattaaccaccattcaaaatcacaacttctttattaattgcttgaaatctcacaatgaatatgctaggtttcaaaactcccaccttgtcatcccctttgtctttccaaattctacgagcaaaaccttcaaatggacccaatggagggttcggtcaaaacacatcacaaaccatggctgcctttcaataaaacacttcctcttcaagatcctcaatttcaatttttactgcatcccccttttgaactttcttagactttgtctccccaaattatcattccgatttctaattaatgaagttgatggatgtaaaattaggggggatgttatttctggattgtatttgagcttcacaacatttagttgcttctaggttcaaatttgttttactcttccatttgaattcaatgcagtgaagatcttggggagagaacatcaacaacatcctcaatggttctaacttccacatcaccttgttgtgtcgtcgtctcttcttcatcctcttccttcaaaactaacaaaagtactattccaaggaccgcggccatagatttcatcttgagaaccacatccatagacattacccctattttttcctaaaaacattcttcctcttcccttgtgtagttaatctttccttactggtggagctccaagaagtccccgtttgtggccgtccatgaccttccatcgcatcagtgagaactgggttgaacaaatcctagcagagtaaaacttagggcataaaccctaacactatcttagtcctataaatagaaatactcacattgaagaaaggatctccaatctttgaaatttagagaattcctagcaaactttatcctataagaaaaaaatcaagaaataagagtcactcgttgagtatgtagattttgaatacaaaacaatataaaaaatttgttatcatttataaattagaattaataatctagtatattcccatattttgtttagattataaatcaagattcgtaattatcaagcctcattaatgttaactattatgagttaacaaaatctgcaagggtaaacttgctagaaatgtcgcctacaccttgcacatagaagaacgtgttcttccacttctgagagttacaaggagtctaggctacaaacataaagtacattgttgccttacagaaacagtagaagcccctagctttgggaacaggaactacatcatacataaaatgaatttttgctgggtttaggtctcaccaatgttattgcttgtatgagatgtaaagtttgctcaggatcatccaagttttaggagtcaactataatggggcaaggataaaataacccaagtcctcaacaaagtagggatttagggggcatgtcactactcctcataatgtgaagattgtaagccacaaagtcaagaggaggatgatttgctctatcatcattagcagggaagtgacatataacccttcccttgaggcaatacatactaatcattctagtaagctcaacctcattcatctctaaaatatttgtatgaatcgcaataaccacacttccatcatctccgtagaagtctattctgagataggataaaaaaatggtttcaactggaatcaaacttggaataacaaattaagagtacaaaagtccacaagaacattaaaaaatgcacttatagaattggggcaagtgttcacctcgaaattcgctaagtatttcaaggaaacaaggagaaaagaaagcaaatacacacaaaaatctagcttaagtcctagagagaaggtcaaacttctcctctcagagcacatggtcctaacatgacttgacgagacaagcgcaccaagagaccccgagagggttcccttccttctccccgcgctacgccaagggaccctgagggggttcctttccttgtccccacgcttcaccaagggacccaaagaaggttctcttctttcccccgtgccatgccaagggaccctgagggagttcctctcattcttcctgtgtcgcaccaagggaccctgatggggttccccttcttcttctcacaccacgccaaggtaccctgaaggggttcccctccttttccccacgttgtaccaaggcaccttgatgaagttcaatttcttatccttgcatcgcgccaagagaccccaatggatgtctcctccatcacctcacatcgagagaccccaaagggcggtgtctctctatctctctctctttctctctgacctaaccctctctctctctctctcacctaacccccaacgggggatcctatggccattggaaaacctgcaactcccccttgttacaagtctttcatgctagaccacaagtctcctttgacatgacaaaaagctcctaacataaatgaaatcaaagacatgttaatgcaatgaaaaatcaaaaggaatggccatgatatttgcaaaaggtgaggcagattagaaaacgtacaaggatgtacattttgtacaaggtagtgggagcatgatccatgtgtctgtatcacttgacactcaaccatcactacctaactccactaccctgcagattgtctcttgccattttgttgtagtaattgtgtcattcggacaaatcacattgttttgtattattcttacaatatattcaatattaatctattcggcagcctaacccaagtgttaattataattagttagtttgtgtttcaaaatattttatctctttcccattataaaagtccacaaaaatgatttagcggcacatcactaagccgcaaaacagaaaataattggccgacattgaccaagcaaactcaacctctagtccatttatctattaaattacactccaaatcttatctcgcatttctcttcttcacattataaaatccatttgaagttgttctcttgttcatattgcacatctaacatatagtacgggttttggttgtatttgtcctatatataaaattaatgattagttgattatattacatcttatataaaacctaataaactaaatatttttcatttatacaattaggagaaaacaaattaagcaaccaccatatataaattaaaaaacaaattagtacaaagttagcaagcaccatagataaatggacctataaacataacaaattaaacttggtactaaaacaaaacgtggcagcttttgaaaattattatctgagcttgttagcaattgtctattattatgcatcttaagatattaaataaaaagctgaaataataattttctaaatgataaaatccaaagcatggtgaatatgcaagtgttggccgattgagtaacgagaaaacaaaaatttaagaaattgtttggtatgcagagttttaatttttcatattgttggaaacctgagaaggataatctaatggtttagaatactttatcactgtgtttgattgtgcactggattcttgtcttgatttttaaaaatatcaaatttttgtgtttggttaggcataagaatatattaatttaataaaaaattaactatgtaaaaaattatttttttattatcacattattgactatttataaatatttttaataatgtataatatagcttttaaattattgaataatttattgtattttaatatttcattctaaagaactgttaattataatttttatatatataaaatcaagaaaagtattagttttgtttaatatatgtgaaatataacaagttattaagttttcaaggagataacactatttttcctatattagagaattatattattaattaaaaaatattatctgaattgtataatggattaattagttatttatacatatatgacaaaaaacaaaggaaagtatatattttatgaatatatatacatatatatatat

SEQ ID NO: 36519 - DNA, 1679 bp, Cannabis sativa
  modified_base (844)..(851): a, c, t, g, unknown or other
  modified_base (1619)..(1619): a, c, t, g, unknown or other
tatttcctattttggtatccagagagtttcactgaaatattcggtgggcaagatatcttgacttatcatggtgtggttcataagtatctgaagaacttggttctacaccttattagccctgaaaacataaagtccacattactcccagaaatggaccaaatcactcgccaacatctcacctcttgggctcgctctgcaactgctgtagatatcaaacatgtttcttcagatgtatacatatatattacaaataattaataatatatgctttctttatttccatatatatatatattattttgatgagggagtcatattttcatgcatgcagatggtgttcagatattttgcaatgaagctgattggctatgatgacttggagggcccaagaaaactacgagagaattttacagccataatagatggcatgatttcatttcccctcaacattccaggaactgcttatcatgcatgtttgcaggtatatatcaaatattttaatttttaaattatatataaaaaataaattgtgtataaaataacagttaaaataataattatatatattagggtcggatgaatgcattaaaaataataaaagagaaatttgatgaaagaaaagcatcgagcaagaaatatggtgattatttggatcatttactagatgaagtgaagaaagaagatacaattttgaatgaaacagtcgctgtaaatttggtgtttgggcttctctttgccacttttgagactacttctactgcccttacattggcaatcaagttcatttctgatcatcctcaagttcaagctgaattaacggtttgcattattattattattattnnnnnnnntattattattattatatataattgttttcatgacacaataaaatataagccaaataattggtgaattgattatatcatgagagagagaattaaagaaaggctgaggttgttatactatttaataacatagccaaatatttttttattacagaaagagcacgaggatattattaaaagccgtcagagaaaggactctcagattacatggcaggaatataaatccatgaattttacacatatggtgagtaattaattaagagtatatttttctttttaaagaattaagagtattttaattattatttcaaagttaatgtacgtgtgtgtcttttattatttatgtcgttttaaatatttatttttgtacaagagtttaggtattttttaaaattatttattaattgtattttattttatatactatacaatatatccgttagctcttcacgcagctaacttaatttttttagtattataataatagttaattaaaaatataattctaatatatagtaaaattataaatatattatcttattttatattattattaataattttatttattaaaaactaaatacacaattttattaattattatttagaattatttattgagaggtttaaaatttattatatgtagtattttaaattgttttgttaaaagaaattatttttatgaaataaataaatatggtgcagaaaaaaattacgatgtttatcataatgcattattttcatatttcgatcattcaaaattattgttantattgtatctcacttgttgtctcattgtatctcacctatttttatcaccgtatctcacac

SEQ ID NO: 36520 - DNA, 6377 bp, Cannabis sativa
aagaaaagaatgacctagaacaagggatagggagattgaatcaaaattgtcacaaacttggactagagtcactagacatacacaactcaccagtaatcattaaccatttgtttcagccttgtttcaagccgaataaacagtgatgacctctcaaaatcttgcttgtcatgtgcaggctctataaaatttgcttcaagaactcctgcagtattcatcaataatcatcactaactgaatatagaggaaaaagtataaatgactgaatacttgatcaaaagccctggtatacaaataaaatatagaagggggaaaaaaagagaacaaaaataccaacaacaccactccctttcgaagagccatcagcagtgactttccagaatggctgcaacagtgtggacagatacatagcatcaccattagaaagtccagtaaatcattctcatacgtgtaaagatagataactaaaaacaaccccgaaaatgatattcaatgtaataaatttacagcaaatgcaaaatatcacagttcagattttgagcagcataaaaaggtaacactaccagaacgtaccctgatgaggcgatttttatggtaaacattgaatccacaaactgaaagatcaggtgcctcttttataaacccaagttttgtgtccactgcctaaaacaaaagattgttagttaaatgttagatggcctaaatattatactccctctgtaaattttgcagaattgatattagtaagagatgcaaaatacaaaataacgtttatcccatactaattaatgaaggaaaattgagagtgagacaaataaagatagtgaagaagagataatataggaacttaaagagattaaagacacaaacaagaataaaaaaaggggaatttaaagagattaaaaaaacaaatataatagagaaaaagataaaactaggagaaaggaagagggaataaatcaataattcatccagttttctgtcaaataataaacacaattagccatatttatagataggtaaaaaaagcatactgagacagataagaaatgtaatacaattggaaactaactcaaaaagattataaaatactaaaattttaagaactcaaaattgaataaatctcaaatactaattctgtactatctatgcgataattaaaaccccatttttatttatcatgatatcattgtgttgaaagagcataataaaaaaggcaaaaattaatgcttcgctttgaatcatagaattacctcggccactactgtacccagctggggcctgtatgatacaattattggatattgcaactcgtctgctatattaaattgttctacaggcttcccccttagtattatactgaagttcgaaaattttctgaggtacaggatggaggcatatgcctagaaacaagaaattataaaataacatttgtcaaataagcaaagcagaaccacaacaagaagaccactaaaagttagcaaagagacccttaatgagtaacggatgcggtaagatatatgggattgcatttgagctattcttctccttggttgatttgaacttccatgagtagtttcatctctcaaccgaatatcctggtcaaggaaaaacaagaaccatattcactattaaaatcagacctatgactgctgaaggttttacatcaggaaggttttggaatattgaaatgttacaccataacaaagtaatgctagtttaataaagattgttactcttaccatgttttcttaattcatggttgaaatttctcaataatttaaacacttcacaattagaaagggtagatagaatagatttgtgaatgtaaaacaaattttatgtttttcaaaaaaagtaaaacaaattttatgtgactactaacattccacagttccacttcttaagattgtgtgggtgacagaagatgcttgttataggtaattagtgtttaggtacggcgggcttactgaagtctccacctgtttaaatcatctcctttttttttcattcttataggtataccatctcattagggacatctaatatatatcacattaccataaaacagcacttcctaaaaaattgtgtagattaaaggatttttaagaaaacattacataacagtttcagcaccaccagctgcagcttacctcatcatcatcatcaaaattcagctcatatatgccttcatcattcagccacaaattgtatataattacttttgttccatgagctccaatatcctcaaactgagaaatataacaaaccattcagggattataagagcaagccaaaggtacaaataatctggctatggttgttgaagacttaagttttaacaaaatttaaataaatttcaaatttctttctgcaaattccaaaatgtgaatgtccacaatcacattcacactgactccttgcccaaaaaattgaataagaacaactacagtcagtaatttgtaagcaacagacataaaaaagcatatgttatcttaataataatgtaagagtaagacaagcagaaattcaacaataaattacagttaacaaaacctacagataattctgaacttctgtagagagaatataaccaaattaacctgtagcatgagttcctcctttgatgaaaatggagaccactcaaggattgttttcaagttagaagaccaatcatcatgtgaaccataaattatcggttctgcccagttagaactaatgtcaaaatcaacctgcattgaagcaaattacggtataaataccaaaatatagatgattgcaacactcaaaaaggaaactacaaccctggaagttaaggatttaaataccattggcacaatcacatcgtcctgtcctgtttttcttaaaaatgtatacgatagaagtccaacactctgcgtggcttggctaaatacaatttaaggaaaaaatgtcactgaaaattggaactttattgctcaatctgacaataagaaactatgcattatcatgaaaggaaaaaattgataaataacatcagtgtagaacaaagctactactggtaagtgactatgcaagacaaaagaatgcaaactattttttttttatggaaaaatgcagcctaatataacaaagcatatacatgcaagataaatgactgagtcaaaattcaattatttaaaatatatcactagaaatggagaattcaagctagggcccactttcgtccaagagataatgagtttgctaaaccagtgcctagcaaataattggagtaatgagaaattaaagtacagctccacagacatgtaagtaaagagaatattatgagggaatggaaagactattctttggatgttgacaatatagacaccctcttaagaggttattgcagtaatcaaaccaattattataagacatgggtactcgaatatttaaatatcaagtaaatatgactgaactattttccagacagaatccaataccaacttccatataaagattggaataccttccacgaactgcacgactgagaacaataacatcagcacctaatctcatggtactcgtcttgaatccattaccatctagaaatagacatccttgaaacaatgagaaataaacatactggggttgaaaaggtaaaagatagtcacgtcaaaacaagaatttatgtaactaaagtaccttgaaaaggttttagttacaaataagataaaacaatcatgccacactaaaagctaatgcaatgagaaaaattatgagagttacattgcccaatagttgtgtttgtcttctttgaagaatagcctaagctcatacatttccgaatggattcaggatccattccaccaccatcatctacaagaaaattttaaaactttattatttccttccacgagattaaaaaatctagcataaactagtatcatcacaacaggaaaattttcacacctaattataccttggaagagtaaagctggagtattatccttcatgatatcgatcttatcaaccttcacaaaggttgcaccactgtgtatctaaattatagaaagaaaaaaaaaagtagttacagtactatagtatctcctctgatactatttcaaacatttgactagttgcttatatattaatctttcattttccattgtaaaagccctttcttgaataggttctggaactatgttcaataaaacctttgtaggctgcatcacatattcaccaagtatttaatatggttaattctgttaaaagtccttattgcagtcaggaaatgaacaagtaaccctatatcaacttcaagcaagctcatctcagaacttgcagaggagaacataagaggaaaaaagcacaacaatgacattatatcaagatccaaaaatgagccaattcatacccattaataagtggctgggagcctgggaaataaaccttcatacacaaagcataattacttcactaaactattccataatccataattaggaagtaatccaaatgtagaatttgggaaagaattgttgtcaaaaacaattcattgtcttacacatacagaatttcaagtgaatggaaagaaacttatcacagaaacaccaaagattataagtaaaacctaacccaccacataacacatcaaacattcaacttattaaggtgtatttcaaacattaatgataatgggtgatatcatacctcatcaactgcattgtccaacaattcagctacggctccaaatgcccatttatgagaggtggcattagaatgaagaaacttgggatgaacacgagcatgttccaattgatctgtcaagcaattttgggagtaaaatcagactatacaatttcacagacttcagaagtagtctcctttggacaaaaacagggagcagtcccaagaagttgatgcaaaagaagaaagaaagaaagaaaggcatagaaaggaaaagagtggaccttgggaggaagggggtttgatagtgttgttaacggcataagagcctgctttccagaaactacggtaatccaagtctgaagggtcggaagctgtagtggtggcaatggcattggagggaggttgagtgtcagcgtcgtcttcttcgtcggtagtacaaccatcaaccagagcagcccctttctccgatttgggtgtcattgcctctgaattccacgaattggttctctacgcactacgattactaccttgcactaattatcaacatttcaccaacttaaatgtataataactgaaattaatgagtgaattatataatataccttgctttagggtttatggaaaaatgaaggctaattttttttttttttttttgatttttatttgcaccaaaaaaaaaattataagcgaaactcattttaataatttttattttatataaaaaaatatatttttaattatattattttttttgttaatttttttattctaatttatatttttaaaaattatacctatcaaatttaaatttataagaaaaaaattatacataacttaaaaaatatatgacccttttatgagacaattatgagttatttaatatatttatataatatttaattaacttaatacaatttgtgtgtaaaatattataataaatataattgtatatattttaaataagttattatcgtattatttttgggttaagcgtgtcaatctaaaaataatctatttagtaagcaggttaaccatgtcagctccaaaataactcaaacccatttatgaagaacccaaatctgtttatttcgtgcatatttcgaatcatgttatcgtgtctgactcattttattgctcctagcttgaagcatttcttacacgcatgacgcatgttattttcaagatgaagaacgtcgtttcacttcaacaaatatcaacattcaagatcatggtattaaaacttttactaattttaaactttattttgatgaaaaaaattacaattttattagatatacaaatctttcaaaataattatttaaaaagcagtaaggacaagccccctataataactacaacctgtattagaagaagtagtagtcgctaaacaattagctgcattgtttgcaaattatttaacaaacatacaagatattgttgatcactgaaattagaatacgtcaatcgaaaataattgaacctaaaggcaataacatttgagttgaaatatgaaaagcatcaataacacacttacaatccgactcaaccacaatttgagagtatcattgtcgttttattaattttatacttttaattatcaataaaattaaaaactcagcaaaaaatatcattgaattgaattaacatgtatagtattgcattaaaaaatatagtttattaattgagattgcattgtgtcataatcgttacaaaaaaaaaaaaaaaaa

SEQ ID NO: 36521 - DNA, 19731 bp, Cannabis sativa
  modified_base (27)..(28): a, c, t, g, unknown or other
ttattcataattatctaattagggttnngctaatccatttcttaattctaggatattacacataaggacgtccaaagttgactggaagattgctgcgctcagtaggtttgtttcgaaatcaactgacaaatgcattctgttcttcaacatcctgcatggaagcaaaaaattcgagtggatggaagaatgaaaaaagcctttgagaaactgaatgagcatttaaccaaagccctgattttatccaagctagttgagggagaactgctatatgtaaacttgggtgtgttagatcacactataagtgtcacattagtgcaaaaagaagggaaggtccaacttccagtgtattacataagcaaaatactgatgggcacggagtctaaatatccaatgatagaaaaattgtcctatttcttgataattgcctcatggaagttaagaccctacttttaagcccatgccattaaggtattaacaaaccaccctctctgccaagtactgcagaaactggagtcattcagaagattacaaaaattggctatggagctcagtcaatttgatattctgtattagcccttaatttccattaaaggataggctctagtagatttcatggtgcaatgtactaaaatgaatagtgatttggacaagctagtcctttagtgaaccagaattaagccactctctttccatacctaaagttaatcattcaataagccaggttaattagtttgagaataaaagcatgagctgatatccgcaaggttgaaacgtccagaatcgaaaccccagggcttttaagtaagcatcgcattttacataacttgaaattaataatcgcgaagggttttgatcttatggaaagttcctaagtctggaaagtgtatcaccacccgaaagtggaagtcagaatcaaaggttcaaaccactaatctttggagtcaaaaactcaaagtttaaaaagaagattcacttctcaacacctccaaatatgagaagcatatagaagcacacaaattgggttggtcctaatcaaaacttgaatctcaaagcatacagaagcatatgaatgagctacaacttaggggtgatcaaaatctggacacatttcaagagaacgagtttctcagttggttgaagtcttgagtaagtattattttctactaattttgtcattaaaatacgatttctggtattgtattaattacatttttcactcaatgatagatcaatcaagtccgagcagataaccaacatgttattgttatccttgatgtattgttaacagtgttaaattcctaattgaggtttgggatgacaatcgtaatacccaaaatagtggtatttttatggcttactctaacaagtcgacgagttgacttacttgaaagattatagtgttatcatttttaggtgcaagtggtgggacactaacagtaacaagacaaaaagtgatggttttttcactagtgtctgcgtcacccatcaattgaaccaaaatgaaccattcatacttacatcccaagcaaatttggtatattatattaccgacttaaagaatagatttgattggaagcttgttactgttacaccccttacaatgtctgagatttcccatatgaggatgatgatgagaacacaactatacaagaaagaaactctttgggaatctagttagttgtacaactttcacagctggacaatgtcaaatatgtctgtgatgatgtcgacgcaattgaagtgaagagcaaggaccgtgagcagtctgaccgttaagatttagataatttcatagtttatagtgatgatgaagacactagcgatagtgataatgaaaataacataactgttaatgatgatgttgatgatgatgattttgatgacttttagactttaaagtattgtaatatttaaacacaccgttaattaaattaaatacatgttccttttgttaataggttgattaagtaattatttttatattaacaaatatagatcgtgttatcctttttttgcactatgacgtggcaatgagctggataacatgtgtcttatattttcctacctgggcagaaggaagtactcctagcagcccctgaaggttgatataaatgtaattcgtcagcatatagcaggatgtctgagtagagtaatcaatggacatccgaccaaagtacaatcgcgtgatcaactcacatgcactgggcaggatatgtgagttggaaattttagagacaagccttgttacttccaagacacaaagataatccctacatttgtgggattaggtcagagaataaaggcaatatgccttggtttcccattctttgcattgtaattatagaattaatataatttcttattttattcattatagattaaggaaaaccattcttcatgtaaaagttcataaatagtggtatacattcactatttagtgaaatgaaatttagttcgaaagaacactcaaaagagaaaagaacaatctaaaagagaattactcatagatcaattgtaagagctttagagaggaagaacatttcattcttgttcccaagtcaatacaatataaaggggagtaggctattaccattctcacgacttgaacctctagaaattctagtgttctttttaccttattatttttgttttctattatttatttcatcttatcgctttatcttgactcactgttgttcaaactcgaaggggaggtctgactaatcaaggtgacccaatggtgacaaatcttaacatccaaactcctggaaacatgaaaggaccaccaaggacaatccctagacaaattaatacacaaccaccaacggtaggccatggagtgacttcccctctggctgggttcacaccaagcgtatagggtactgggaagaccagtacggaagttgaccaaaccaacttggcaccgagatcccttctactaataacactcaaaggcctgttggagatgacaatgaacttcaaaatctgcaagatgctcttgggcttatgcaaggccataacaacgctttgcaccatgattagaaagatctccaggcagctattaaccttgcctttgacaagcgaagacatcaattcatagaatggaggggtcgagagatggaagccatgaaaactcagcaagctgccatcgacggccgttcccggaaggccatcgtgctgattagaagggactaccaagttaccagtcaacaatcagtgactgattttaatagcccccctaagccgatcaaaagggtatatagctgatcataccgcatagactcgtaacagtcagtcgtccaatccaaggccacaagtccaaacagtgggccaaaaggtagatagtcagatcatgccagaccgccccttaggaggaggtacaaatttgaacaactatacttagatagaggtatcagaccaacctcttaaccaagaaggtcaaacaccaagaccacttggcgcatctgtgttcaatcggctgggtatcatgcatgacctcagaagcgacctaaatcacggaaggggactggacgggcaaaacattccaccaactattcagccaaataattatgtccaaaatcaagttcaaagagatctcaatgtgacataggtcggtcagtaggctggccaagttcatctacttgtgcatgcacaaatagatcaacttgaaaacatggtacaaggcctgactggcccaaaactcatagatctcaaactcaactgggcacgaggatcacctttctcacttgaaatcaatactcatgacctacccccaaagttcaaaatgccaatatgaaaaatgtacacatgaaaagaagatcctttatcccatttaaagtactttgaaatacaaatggacctataggggtaagaggcaatgttcagtgcagattttttttggccacactagcagagaccacccaataatggtatttcaaattgcctccaaaaaagtttaatttgtggatttctttctcatctgaattctatacacagtttttttcctaccgtcagcttcccttacacctagaagacctggtagaagtgaagcaaatgtcaggagaacctttaagggcctacattagtaggttcatgactgaagcaacaaaagttaaaaggctgactaaagaaggaagattagcagccatattggggggcattgagcctctgggagaactatggaaggatattaagagattaactgtgggatccatggctgagtttctggatcaaatagatggattcattaagctcgaagagacagtacggcgtgtggatatagtaggataaaagaaaaatcagtaatacaccactacagccggtgcatctgcccagaattcacctcatctcaacagttcaaatccaaatggaaagaggtttaacaacgacagtagacatggaaatggaaagaaaatcaagttcactggcaactccgagcagcatcctaaagagaatacttctaagtttactactttctcagtcttaacagatgatatagaaataatttatgcaaccacccagtctattatgtcgtacaagaaaccttttcccatgaaaaaggacatgagcaaaagagatacaactgagttctcttattgcatgcggactacggccatgacacaaatgaatgtaataatttgaagtgagagattgagttcctaataaaaaaaataacccgcacttacaaaaatatgtcaagaccgaccaagaacaaagggccaccgaggcagataataaccaaaaccaaatatgcctccactagtggacgggcatctttaggtaatcattaggggccaacaccttgctggagactcgggcaaagctagagaaaagtatgctcgagccttgcagtacaaacaaaatgatgcaatcctagccttggaggaaagaaaacctaaagtaccatgtgtaggggaaccaacaataacattcaccaaagcagatgctagccatgttatttttgaggttaacaatctctattatatacaacaccttcactttgatgtcatactacattcataatctgaaccgagattacttgcactgaagaataggcatcagtgaactatactagcaaccgttgtttaatgattcccaaactttaatatattattgaatattttattcatagctaagtggtcttagttctctgtagagcttcaagccacaacctcatatatgaataacgaattttctgatatttatatataaattattcaataataaatatcaataatttaacattcaggcatatattaaaatattcaactctttatttaataattagaaatgtctttataggctttttaggtcataaaccctaacaatctaccacttgccctaaaagaaaattaggcatctcccttaatcccatattagttatatgacccataaaagattttgctggtaacatctttgtgaatggatctgtcaggttatgttttgatgcgatcttcaagaccgccacatcacctctctctactatatttcttagtatatggtacttcctctcaatgtgcttgcctctcttgtggctccttggttcttttgagtttgccactgctccactcttgtcacagtagaacactagtagctttttttttacttctggattagtctaagagcactatagaatttcttcaacaaaaatgtttccttagctgcttcacaagctgttaaatatttagcttccatggttgaaactacaatactgattttcttaatgcttctccagactacagctcctccaccaagagtaaatactgatccagatgtctcaactatctttatttgattgaaaatcagaatcaccatagaatcagtatatctagtaggattcaactctctaccggaatatacaagcatgagatctctcattctccaaagatacttgagaatgtgctttatagctatctagtgtttcaaacctggattaaattggtaaagactaataatccctacaacgtagcatatgtcaggccttgtacacaacattgcatacattaagctcccaactattgatgcataaaggtactttctcatgtcctcttcctcttgagtagtctttagacattgatctttacatggagtaatttcatgtcaagacgtaactgtcctttcttggaatttcccattgagaatctttctagcaccttatctatataagttgcttgagaaagtagtaatgctctcctctttctatctctatagattttgatcccaaccaagaacatagcttgcttctcccgaatcctttatttggaatttattggctaaccacttctttacatctaataacctttctatattgtttctaataagtagaatgtaatcaacataaagaactaggagtactactgcaatatatacaataccttcactttgatgttatactacatttgtaatttgaactgaaattacttgtaccgaagaaaggacatcagtgaacagtagtagctaccattgattaaagaatctcaaactttaatatgttgctgagtattttattcatagctaagtagtcttagttctttgtacaactacgagccacatcctcatatatgaataagaaattttctgatatttatatataaattattcaataataaatatcaataatttaacattcaagcatatatcaaaatgttcaactctttatttaataatcaaaaatgtatttataagatttttagggcataaaccctaacaagtaaaatttagatctcgtctaaatttacgcgtaactttctaattctagaattaacacataaaggaaaccaacatttgatccgtcaggaaagtcaggattctataattgtagatcatgttcctagtcatccatattattatatttctaaaatagaagttgtaagaatcatattcttcgagaaacttaaatgagtgtatcaaagaacctaataacatgaacatgagttcatcactacttaggatttaggccaatctaaactgagattacttgcactaaagagcgcgcataactggaccgtactaggaaccattgattaaagattcacaaactttaatatgttgtggactattttatccatggctaagtgatcttaattctctgtacagctacaagtcgcagtctcatatatgaataaaaaaattttatgatatttatatgtaaattaatcaatataaaagattaataatttaccattcatgcaaatatcaaaattctcaacgtttattaataataaaaatatctttataggctgttcaaggcataaactctaacaatctctgacttatcctaaaagaaaattgggcaactcccttaatctcatattagctatacgacccataaatgatttcgctagtagcgtctttgtgaatggatctgtcaggttatgttctgacgcaatctccaacactatcacatcacctctctctactatatttcttagtttatggtatttcctctcaatatgattgcctctcttatggcttcttgattccttacagctgtccaatgttccactattttcacagtagagcaccagtaatttttatacttttggaactacttctagatcagtgttgaatttcttcaaccaaaccacttccttagctgcttcacaagatgctatatatttaacttccatggttgaatctgtaatattggttttcttgatgcttctccagactacagcttctccactaagagtaaatatttacccatatgtcgactttcgactatctttgtctaattgaaaatcaaaatcaatatatcctgtaggatttaactctccaccgaaatatacaagcatgagatctctcgttctctgaagatacttgagaatgtgctttacaactatccagtgtttcgaatctagattagattggtaatgcctaacaatcacttcagcatagcatatgtcagtcctagtacacaacattgcatacatcaagcttcctactgttgatgcataagggtactttctcatatcttccatctcttgagaaatctttgaatattgatccttacatagagtaattccatatttggatggtaattgttctttcttagaattctccattgagaatcttttgagcactttatcgatataagttgcttgagaaagtactaatgttctctgctttctaactctatagattttgatcgcgagaacatggcttgcttctccaaattctttatttggaatttattggctaaccacttctttacatctgataacctttctacattgtttctaataagtagaatgtcatcaacataaagaactaggaataccactacattacctttaatgtatttgtatacacaagctttgtctttattttgttcaaagctgtactctttaatattcttattaaaggtgatattctaagatctagaggcttgcttcaatccataaatggatttgagaaacttgtacacctttcaatcttcccctggtatcacatttccttctggttgttctatataaatgacttcattaagatcgccatttagaagaaaaagtcttgacgtctattttccatatttcatagtcataagcggcagttatggaaagaagaatgtgaatagaaggtttcgtcatagtcgatgccttctcgctgtgtatagcctttggctacaatcctagctttaaaaatctctaccttcccttcaacatttctcttcttcttgaaaatccacttacactctatgggtgtaatgtcctcaggtggaggttcatattccaagactttattagtgcacatggaatctatttcttgatctatggcattgttccacttctctgaattagggtcttccattgcttctttgtaagtcaattgattgtccttgtttgtgtcaaaaactagaacatgtgcttcattttcatagcagacatgttgtctcacaattttttcactacgacgatgtatcgaggtttcctcttcagaaactgtggtaaacgctatcggtcatttaactaatggtgttaaaatcgatgtttcaaaaaactgctcattttttattttctaaataaccacttgactgcgtagtttgtgacttttcatatagtcatgttcaagaaaagtagcttttgttgatataaatactttattatcttgatgactagagaaataggcacctcgagtttcctctgaatatcttaccaacaaacacaattcagttctgggagcaagtttcccagtctttgatttaagaacatgcgcaggacaatgccaaatataaaaatgtttcaaactgggttttttcctattctataattccattggagtgttgattatgctctttgagggtactacattcaaatgtaagtagccgctagaagtgcatatccctaaaagttcagtgccagtgttgagtagcacatcatcgatccaaccatatctaacaaggttcggtcttttctctctacaataccattctgctgaggtgttccaggtgctataagttgagactctctcaaatagcttttagtaggtggactctctcagattttcatttagtttggaaacctagtatccttcacatttatctgatgtctgatcgttgttggcttattggaccattagctgagcttgttgttagggttttctcatattgtactgtagacgacttggtaatcctatttttattaatttatctctatgagctatattttcatgtaatagactttaatcgaattgcatataaatattatttcttttcgttttctctctaaaagacattgaattatgaaatttttatataatacaccaaaatttgaaataaaaaatcacaaaaatacgttaacacagtgttcggtaaattcagtatgcaagtatacgcaatcgaatcaagatatataatgttaatgtagaaaatcattcccacgaggactgattatcaattaattctttgtttctatttgattaataaaaatattagagataagtaaataaaataaaataaataattaaaattagagacataataatgagaaaaatgaggatatttatgattaccagatattctttattttacttaatgcaattacccatcttcctattcaattgacaagttggtctgagtagttcataatttggttaagacttacaaactcaatctatgtgaaaaatccccatatttctatggtaaagtttaatcacaaagaaagcattaaacaaaacaactcataaaatcagacaaataatctagatactttcgtcataaatcaatttgcatccataacaatcaaactgtattcaaatctcacttttcagaattttgattcgaattcatatataacaattataggtgatcagtcaataattgtaaaatcaaatcagattgcatgaaattaaaataagagaagaagataaaattgaataactatatcaatccataaaataaactcaagtggttcacataataaatcttaaagaaaattaattattaaaagtcactctaaaacaataaagattcaattaaaaacaaaagataaacatacatatatatatttatatatatataaaatagtgtttggagtcctggtgtcttatggtcctagccttcctcctatgcaaaattagtctccaagttcgaataaagtcagaacttagctccttaccccctttaaatatgaaattaaaaaggtatcctagaaatttctaatgttgcagtattaccttgaatgtcgcggcattcaaagcgagatttccactttccatgtttttgccaattcttagtttcctttttctttttcttcttccagtgaccaagtgaatgtcgcaacattccctgctgattgcgatcttcgagagcagtttcccgaattttctcatttcttcattttattattggaaagtaacaactcttgactatggaccacgggttttgaagctaaaatacaaactttgatccttattaatcaatgagaatcccaactaagtattatttacatcttgaagtttctttttcctcataattaactatttttatctcaaaaggcttataaaatactaaaataagtaaaaatgaaaatcttccaatatttctcttgaaaaacacacaaaaataaatactaaacataaatccgaataatataataataaagaaaacacattaaaataaactctaaaaatacataaaaataaacctcacaaagagaaatttttatttttacggtttgaacttttttattatattctttagtaaaaacaataaattgttcgatattcttttttggagtttaataatttatttatatttgtcatgattttgattttctcattattctttattgttttatagttaatttatattattgtgaggtttatttctcatttttttagttgttttcttaccttttttttggtgaaaaaaatatatttttataattttaaaattttaaaatcaatattttctaaaaattaaacttgtgtaattataaaaatgtacataagtcctaaaaatataaataaaaaatatatataacctatttcagattaaaaaaaataataaaaaaaaaagaccattaaattttttccaacaacaacatattgaattttattttattttctttttgctaaaatcaattttaagagactattttgaatagtttgataaaacacgaggactatattaaatcgtttggcagaacatgaggcgaataaaaaaattgtcaaagaagatctaaaagcgggtatattataaaacaagtagtccaaaactagtattttttttcaattatttaagacatggttggcttatttgttttgctcctcaatcaacattcaaacaatatactacaaaacttggaatatttatggcaaaatcctcctattatatataattattactaatatgatcttaataaaaaaaataataataaaaattttattttataattttgttgcaatagtatttttttttagccacaactcagaaacacgtaaccactaaattatgtattaaataaattgaaaaaaaatatccttagatatttttaaattagcactaaacaaacttaattaatacttaacaactaaaaaaaattacgataacaacaaaataataaaacaaaatatttttgtcgctacttctataattaatgtattatgtataacaattacaaatattaaatatatctcctaaaattccaaactgtagaagtcgaagacccctgttataataaaatagtgaacattttacatgttcgcaattggatgacatacataatgtctcacatcatgggacaaaaaaagtctttcaaaccaaaagataattaaagagagaaacaaaaataagaaaataataaaatggttaaacaatgcacactctttcatgactattatttaaatttaaacattttttaaagagttaggtcactttatgtatttgcaccatttattgatcattgtctatatcactaaataaaaaagttaaaaaaaaaatgatttgtggtccgtattttatttaaaaaaaaataaataaaataagttgcatttcaattaggtcgatgtcaactaattaaccgcaaggtatttataaattacggagacgaaatgggtcaacaaagactgtacagaaattaatatattctcttcaacctcaataattaccattgaattctttttagtcctcaaaattccactttgatcaaaccaattcactaatggtcatttaaaaaaaaaatattctacatctctacaaaaaaagaaaaaaaaaattattcaacataagagtttccaattcaatgacaccacccaatacggtaataaacattatttttagttaattaatttaataatacagtgattaatataatatttgttatatgtaaattaattattgataattaattattttttttaaaaaaaaaaagaatatatattttttaaattgtaaagtttagtttattacttttgttgacctcgaatttagtcatgtcaattaaacgacaatgaaaatgtttgataattaataataagaaaaaacaataaatgacacaaagtgtttatagaggttcgacctcatttagtaatgacctactctttttatttagtatttttttagatatatcaagatcacaagaacttggtatagcaagtttctttgatatcttttgtaagaagacccaatcagggaccctcacattgcttggtgcatggcaggtcctgaatttaatgatctaaaaattaaacaagcttccgacaagaaagaggaggaagagtctcccaaagaaatagtcggggatttcattatgaaagggatgcttctttctccctctagacaacgcctcaagctaagggtagactatgcaggcgaggaacttacggaggccatgctagtcccttagccaacatccaagctaaaggtgatgtggcagtttgaccaaactaacagttaagcggctgataacatccatgctagtggccttttttgggattccattattttcctttgtctcccatctcaactagccaatcacccaggggagggtctttgtgcgtggtccagacctcatgctgaccagggagccattcttcctctccaccctcactttagaagggtacttaattattatagcatctttttggcccatattagtttgaaggggatgaagtacttatcggcgttatacatcctatacgcccaaagaggttgggggagcttggtaaaacttattttatcaagatcttaatttactaatatgtatgtctgattatcacttaataatctaacatccgaaaaaatgaatatcataaaacgattaaataacatgtattagtttagaaaaccttactttggttgcaagaaaattaaatatctccttccgttcaatcactctaactcttgattctcaatctgtagcggggtattgtcaagtaataaatctcgatctctttgttgaattttaaaactccttttctacaatgtcttccacagatctgagtattacccctaattgagtggagaaacactcaatcactaatggagctgaatttaagatagagagagctcaataattttagagagagagagagagagagagagagagattttatcttattagggttttagtattttttcttcatataaaacaacttataaattatagctccatcatgttatatttataggctctctctaagataggacttggaatagaatgggctttaagaaaagataatagccctaaaaatcaaatccttggctgaattgcattataagcccaataggattgattttttccatgtaaatttcattgatgaaaatatcttatctttttcaaaaaaaaaatattatttatctaatattattatttaagtattaattttatctatgtaataattgttaaaaaaattataattataatatatttattaattagacctacaaagtgtctcaattaataaataaatccttttctactctttttttgtcaaattagtctaactttagtgttatcccaaattttgtctacctaacgtggcatgtccacgtaagccaagactgagtacacatagaatacagccttgccaatagcaggagaaagtctcctcataaggtatggcaaaatcgtcaagccggaagttaaaagagttaagtaagttgtcaagaagttgcacaactgtgtctgggcgaccaaagggggtacataggccagccaggaagagctttatggttgcccagggtttgagcacaagttggttggccaaaaggtgattattagagcaagaaagggcatgttcaaccaagacctgacctctgcaaggaaaagaggtacaaaggttggccatcacctacaaaggctggtaagcacttgatgtgcagcctgcaggctagtaggcacttgatgtgcaacctgcaggccctggcaagcacatggctagccagaccctggcaggcacatgttcggccagaccctagaaggaacatagcagcctagccttttcttggcaagcctttggtgtacagccttcattcgtggacaacaggctaagtggcggtttggaccttaacaatccatgaaaataggaggaaaatatcagcaacttctttatttttaagggataattatcctatttattatttattatttaattatgtaaataaggctttatcttcctatttttaagggatattagtggtaaatattcacgtaatctctactatataaagagcaatagtctaaccctaattctttaagtcactaagtccttagctccccaaaagctctcaagctctaagtctaaaaccttaaccctctctctccctctctcttttgcacgcccaaggctctctctctctcacttgagatttaccgacttttgtttcacattataatcttaagatagccacttcagatcccactattattgtgatctaagtggtattatctttgttaccaatacaaccaaaaaaggagtaggtcattatccggtaactccaagggtcgaacatctataaaatctagtgtctatttcactttattattcttattttctacatgtagcaagcgtaaatattaaattcgattctgctgtcggttggccaaacccaaagtcagtagtttagtgctctcgttgagagtgagttatcaatttatctgatcaaacgccatggttaacaaaaggaaaactctaactaaaacttctgcctcatcaggtcttcttcaagaccctatgactacaaatcttgatgtttgtattccagtcacaactggaatctccacgaacccgacgaatgtggccaaccctaccatctcagcaggcatcacaaacctggcccccatgactggtcaggagggcactaccaacctggttgctcttaatggccaacctctgccacccagggagggccctccactggaacctcatacttaaggaatggccaacatggagtaacccccgagtgccacgactggatctagtcctcagtattatgcttgagagacagggccaagaatcggcaagccagctattggagaacctcacgtagacttgggagaagatctcaagttaactagacttagagaggtcgtctgtcaagtcagccaaactgaagaaccacacgttgttggtgtgatgcattcgcacaatagatatgcaaatttttgagatggatggatgaccaagagtacatcctctgatctcatcaggcagaattagaccgctgtaatagagtagctagtaatctggtaaggcggttcaatgaaaaaactaccagaagaggtcaggtactcatcagagatcctctccaagggagattaatcgacagattagggacggtatacagacaaaatgttcaaccaagttcctctagaactaggaccaaccttccccaacccaaaagaggacaagccttgccacgaagatctggtggcgagaacagccagactttggaagtcattggtttgggggccaggcaggggtctctaacacaacaatacccctgattggccaacctttggtcggccagcacctaagtggagaacctctagccggtcaacaaggtgaactcccatcaaacagcattcaagaacgagtaacccaaaggccaatctttagtcgggaaggttcgggaataggtggaaatactcaagacaacaaaaacttgagaagtgaatctaatcacttcccatacttaggtccacctaactccagcaattggtgtgatctaccccatgtcaatgcagaggctccactagctagtcaaggaagaatgggcggccaggccatgcccaacatagggctggccggcgatgaacagctgctaggcccagggctgactggccttgaacataccctctcccagggtatggctagccaggctctaaccagtctagggatgtagctcaatcaagatgggccaatcaatcaggcccctacaacaacagatccttctatgcaagcacagttggatcaaatacgagacatgctcaagggcttggctagcctaaaaccatcagaccttgagctggataggtcaagggattcacttttcttggcatacatcaatgcctttcgtatgccctaattcaagatgttaacgtggaagatatacacggagaaagaagatcccctagtacacctgaaatactttgagatccaaacagatctccaatatgcatctggagatgtctgttgtcgaatctttctggcaactctggctaaaatagcccaacagttgtatttcaagttgtccccaagaagattcaattcttgggaggaattctcctaagagttctatatctagctttttgcctcaagataaataccttcacgaccggaggatcttatcaagataaagcaaacacaagatgaacccttgaaagaatatatttgaaggttcatagttgaggcccccaaggtcaaaggcttgacagaagaaggctgatatatggccatactcaaaggcatcttaccattgaggaaattttggaaagatattagaagaatctcaacaagcaacatgaaagagttccttgagcgagatgatggcttcataaagttgggagaagctatctgacaagccaagacaagaggccaggtaacgttgaatagacacaaggcatcatattgccccaagtgttatcctatgtgccgaccaacacagacaatctttgtcatttctccaacaatgagaatattggaggtaagtgcaacaacgaaggctctgaccaaaataatggcaaaaaagggaaattcaacgattcccttacgccatgaagtctaagggagtatgaggagaagtgtgcatgcttctttctcttgccaaaactcccaacacaatgcatgccaaccgaccatagcaataagtgtcaccaaaacctgaagcacctggttgaccactcaagtggaccaccgagactcggccaatataaggccgactgtcaacctaccatggccataaaacgccaagctcttgacagctttatggctgaacataaaatcatatctctcaaaatctctcaagattaaggagaaaagcaagaacaagagaagaaacaagggcaagagcaagacaactcaacctaaaaggtacattgaccacctgcctgatacaagcatggccctcatgacacctgggggcaatggctgcacgagacaattaaggtcaattttaaagcttctaacaatgaggttgaacatgaagctctgattgctagcctcaagctagcacacgaaatgcaggctgattacctaaacatacaccatgactttcaactagtcgtaagttatgtcctagatgaatatacagctcaatgcaaaagatgatggcctatttaagataattttaagacttgttaagtcagctcaaaggctatactagaaggaaagtccctaaagatgatgcaacaaccgatgcactcccttaactacccagctgcaccctcacaaccaaggtaaacttggtacccactcagttcttcaaagaaataagcatccctatttcaaaaaaaaaatagacatactggacaaccaacatggatacacctacaggagcatacctccaaacaaagaccttgcaataaagtaggggtaagggggatagatgttgggtgtccaattttgcatagcataatgcacaaatgtggtatcccaataccacctctaagaggtgttaccaaaaaagaagctaaatagttattgacatgagtgcatacaggctttacaataatcatgctgggggaaaagccaaccgagtgtagatgggatcaaatcaaactgtagcatcaacctggcctctaaaaggctggcttaccatggtctcagtaggctggccggccatggaatcaacaacctggtcagtcactacctccataggctggccgaccatagcctcatccaactggccaaataatgctccctcaacatggctagccacctagtttataccctggctagcccaatctcccaaaagtctattctcatacttttggtctacaatgatcaagaagtaaaccacatcttgctagtagaatcccttaatgaagggaaaaaagaagagaccaagccaacttaaagcggcgtgtctgctagcaaaaagttgccaagtgcctcagtaaacaagtcaaggaaatccttcataggagacttagtgttctaaagaatattccttgacagcaaagatcatgtagcaagcatgtttggaccaaactaaaaaagtctacaccaagtttcaagataacaataaaagtgcatacaagcctagcaagtacaacgagaacttggatcttctaccaaaaactagaagagggaacatctcggtaagtgttctgactagccaactttcatagtggttcctctaacatttcaccgtgcaggaatccataaaagagctagtacccatcgcccttcactgatgacctccctcactcttcagtgatggcctttgcacggtaagccctacagaggtagccaaatataaaagagctagtacccattgcttttcagcatggcctcccatctttcttcagtgatggcctctgcctgacatctcaggcaagggtagccaaaacgtgatttcaaaagcgaacattaagctataagcttttgttaaacgtaagaccatttgtgtctaaaccactttctaacaaagataacttcttaaaatatttctttttcagttccacatgcgtacacccagtagcatcccttagaaaattcccaggcaaggtctatgaaactttgtgaattgcaagtgaccaagagactgtaagtctgcgtgctcacttgggg

SEQ ID NO: 36522 - DNA, 4766 bp, Cannabis sativa
tggtaataaataaaagatttggacatccaatttttttttttgaagaaagtaaaatcttatttaataaaagtacgaattgaaatcttatgtggcaagaattagggtcgaagacagaaaggaagaaataataaaaaatagtgaagagagagagagagaaaagagtaagaagaagaagaggaagccatagccgtttctgttgttggggttttatgttttaaacactccaaaccctccttttcacttcacaccaattacgccttcatctatacatattcacagctatatataacgactctgagtctctagtttccaaaatctttagcgattttgggtaaaccatggctcatggaggctacgccaaccgcagggccaaacccccggggcgtcgatccaagtctttggccgctgagaaaaagaaacctaagcccgtctctctcaagaaccagattcgctccgttgagcgcatgcttcgtaaggtatgttttacttattatttactcgtatataatatatattcatattgtagctctctcttgtctggtttcattcaatgacgtttttttgtggctagggttagcttgtacgcacaagggtttaaagacattagagctgttattgtattttatgcatttgagtaatggttctgattatatatagttatgtattactggtttctgttgttatagtgatttggaatttaggtcctgttttactgattcgttatgggcacgagaataagggaagtgttgttccctttgcctctattgtccattttgatcttcttggtgtttttgtgtgattgaatgcaatgaatcattggttgaggggataagtttgcaagtctggttttgtattgatgactctattgatgtcatcaaccatgttactgtatgcttcatttcttaagtgttttattatttattttttgttttgttttgttctttttgggttttctttgaaaaggatcttccggtggaagttagggaagctcagcaaaagaagttagaagggctcagaaaacaacaggaaattcattctcgccttgctattgagcgaaaaatattcttgagggacaggaaaataaagttttttggtaataattgatagcttagtttctttactgttaatttatgattgcattttgttgcatatgctatgtaacttattgttttaaggggtagcggggaggtttttcttctacttgatttatagtaaaatgtatctgtattgttcagagagaagaaagatagaaagaagaataaggcgtttagagaaactccaacgtgcttcatctggtcaagcacaagatgcagaaactgctgagcagctttctaaattgaaagaagatcttgaatatgttcgggtaagctatttgcatattttaaactagattgtattttttgtattgaatattgaatgaacaaggtctttttaagaacattgaatgagcttctactggacttgagaatttgaacacttctcgaaaagctgtgagtgcctaatgttattgattatctatccagctaatgattttgttggttgtggcagttctttccaaagactgagaagtatgtcgcactgtttattggaagtgatgacacagaactgattgctaaaagaaataggctgcgtgagctaattaaagccaatttagttgctgctgcagctagtggaaaggatttagaaggtacttacttttactctggttccatcttttgtatgacatgatgaaacaatgttatttttctctagtttttggatgttctgtgtgattcatccaatgtggggggtaaggtcattcatccaatgtggggggtaaggtaattcatccaatgtggggataaggtagtacttgaggtgataactatattgaaaggaatgttatactgatgcattatggatttgttttatttagtgctggatgttctttagggtatcatctaggatcctgcttttagttttcatcttatttgtatcacctgttggtgatttatgtggattgcccatgcgtacccttgtatttttcgattaattaatataaagcagatttgtttccaaaaaaaaaaatgcatcttggaggtatcactgcctccaattccacttatgtggtcagatgatttttttttttttttttttgaggtaggactgcaatactcttcatttctaaatgcttgataaaactttgtttgacgtcaatgttgactgcgaagagtgctacatttctcttgttcactcattttcactttggatgtgttgactgagaagagtgctacatttttcttgttcactcattttcattttggctgtgcattatcagcatttttttagtttacattacaatataatatattttcacatgtgttttttttttcaaatctcaacagaaactgggagcgaggatgatgggctattggatatgagtgaagatgatttcttcctagctggaagctctagtgacgaagcagatgcagatgatgaatggacagataaaagtacaaggtatttatttttatttgcgaatgatgatatttttcagaattttggtttgttaggatttgtagggttgtattcacccatcgacacgagtaccatataaactattttcaagatttttttttttgggattataatattattttgtgatatatttaaatcattgcaacttacattaaactgtttagctttttctaaattcttttgccatcctttcgtgttaaattttattacactggaaagtattgttctgaacactgtaatgactcggaatatgtaggtagtggatttatttaaaacaagctcatttgtagtatttaaaatacctgaatctatctaaatgatatagttttaagttataaatggatgccaggaacttgtttataacaaaaagctgcatcttttaaatgtgtttgcagggagcaggcttctagtgcttccggaaaagcagcatctgcatctgcatctggcatgtctagtgatgaaagaaaggcttctagtgcctctggaaaagcagcatctgcgtctggtgtgtctagcgatgaaagaaattatcaggtttctcatttatattgattttgttctgctgtttttgtacctaaatctacgacgagacatggcaattgtgtttaatttttttcaccaatctgtttatgtagagacatatctccgcaagagccttaatgcctcctccacgaccatcgactaagtctttctcaaacgaagttcgtggcaagtcaaaatttgctccttcttctagcagaaatttctctacacatagaggcgaggtttctacatccactgctacttcaaatagcctaagcggttcctccttcaagtctaggggctcctcaaactctggaacaactcaaggaagcaatttaagctccaactcagatgcttacaaacctcgaagaaagaggaggccaaagaagaaaaagcagcaggtttgtgttccattacattctaccagagtataataatgcttactattttcaaaatctaaacttggcagccgcaacttggggtgcctctcttaaatttagaaattcttcattgactacagtattcatagatcttttaacaaaattaaaattaaatagccacaaagcagtggagcaaatctaaaattgagtaatagaggtctcaaagaaaagattatgaacctttacatttctgttgaacttaggagcatagcatatagtctacaatttcactttctattgaaattattacctatgctgtaattggttacatctatcctttaattttagcatagatgactgtactatgtttacattccatttttctcttattccccaagtaatggctttttttttttttttgacagggatgatataaccagaatccggatgcccattttgtgaaaccagagatctttatgccccattttacaaatcaattttaacaattcacattgtgttaaattaatttattgggtaacaatcaggaatgtatgcttatattgctcttgtagtgactgaaaaaaatcaatttattttcacacctacaaatagaattgacatctgtaattatgcaaggtatgccaaatcatttaagaatcctacctgggattaaacttggtgctgctagtataatatgatattgtgtaatatacagcatatttcattttttttttcgagaagtgtaatttatattcaaaaatacaaatttattttaatatcatatatactataatggagagaatatgagtcgatcttttttccgaattctccttttattctattttctaaaaaaatatatactaaattattttcaatataaaatttaatttctaactaaaatatgtaacttctccacattgtagccatatcttatataatctataacctttattaagcgtaaatagtttcggcctcccttaattaaattacattaatattttttttttaatgggaatggataattttattaaatcaaatccgcaaccacaatcgatttgagaggggaaatttgaaatttcatgcttaaaataccctataattttttccctaaatgcatagtgattaaaattggtactatatgacaactttcttagttttcctaaactacccctcccatttgaaacccatccctctcatcctctctcttcctctcgctcagccgaaccccacgaaaccctctcacagccaccattttttcaaccgaggctcaaccccgtcccaccgtgctccgtcgacgctcaaccccgaccaaccagaaccggcgaccactctcagccgaaccccacg

SEQ ID NO: 36523 - DNA, 5553 bp, Cannabis sativa
  modified_base (2924)..(2931): a, c, t, g, unknown or other
aaaacccccccccccgcccccgccaccaccgtacagtggattactagtgtagccataagatgaggcactagtagtatacctttcagtttcaggctcctcatagactctggattgtatgttcgtccctgaccttttggcgtaatacatgtaggaattaactccattcccgttatgaatctgagaattccaatcactctgaggaggtggataagttacgggaggaggaaactgagaagaagcccaataattaggagggtaaattccttgaggaggaatctgagaagaagcccaataatcattctgaggatagctttgaggataaggataagggttctgatgggtatgaccctgcccctgaccgtgaccgtgaccgtggctatggctatggctatcctccatatgaatgtgaccggaggcagaatccaattcagaatccaaatccgaaccagaagattccaaatgcaaatgagaatcctcaatatcttcctctagatgagaaatcgaaatcgaagtagtagaagaagaagaattcttactctctcctccaccggcaccggcaccgccaggtttcttcttcttctttctctttttgccttcgtcagaaggcaatgtgagaacaggagaaccaggaacagaggaggaatcggcggcggaagaggcggagacgacgagttcttcgtccacaaatttcctaagagcgtttccaatatcattaagagactgaaaataattaacgtgagcggcagcgagtgcgtaccgatgatccgacgccgttttgattaggtctctccgttcacggcaaagagttactaaaggtaagtcatcaaccttcgaatttccacagcccattcaaacgacgtcgtttcgatacaataaccttttcttcttcttcagagctcttcttcttcttcatagtccttttcttcttctccatgtttgctgtccgtacaatcgaaccatcgtaatcatcatgatcatcataatcgtcaacaattccagatccaatggtgatgaatctgatgatctaaccaccaatccaaaaaataaaaaataaattaatgaatttaatacataaaatcaaatgattcacaatatcatattatatatataataagaaattgaattctaaattggagtaactgacagagagagaagaagaagaagaagaagatgaagatcattgatggtgcgtgaaaataagtgattactggattcaaatctgaccgttgagatggagctggtagaagagtaatgaccgtccatgcagagagagaaacccccgacactgagtcagagaactcaactcgttccgattcgatgtaagaaatatgaatctgagtttcaacaaagagagaaaggaaaaaaaaaactattaaataaaaacagagcaaaacacagtttctttttttattattattttattttatgccaattaaaattgttggatttaatttattgtggccattgtctatttattaaattgttaattttgatatgtactatgtcttcatgagtttcaataattattttattaattttgacacgtattaaattgtatttttataaattttgaaatgtacaaaattgtattttatgagttttaacatttattaaattatatataataaattttgacatgtattaaatcatgctttataaatttttatatatgttagatttttgttaataaaattaaacaaaaattcttaaatataacaattttaataatttcgaaattttatttactgacataaaaaatttaaagagtataatttactacatataaaaattccagaaatgctaaaaagcattcttcttagagttatatcattattaatacaattaaatatcacatattatataatttaagtaaataatttttaaaaaaatattactaattaatcgtaaagtgttacttttaaataatattaagtattattaatatctaataacaatattttataatttagacgcaaaaattctaattagaatttattttattatataatataataataatagtttttgtttccctatttgagaagtgaattaagaaacgagaaacgaggtttgaaaacgcgtggttttggtttttgatacgagttaagttacaaatagtttgtaatttgtgttttgatgtgagaaagagcacaattactcaaatttattattggtgcttaaacactttctaaattatattactatttatatgattaaatattagatttttatataattttaaaaaataatttttaaccaataatgttaattaattataaaaatgccacttattaaaaatatagtttttattatttaaattattaattattattttatttgcacttaattctctaagtttaaattttagtggtgaaacctctaaactgttgaactgatagcaaatttaagatgatatctattttcacaattaactgtcaacatggattgtttatgtatatacttttgtacacgtggcacgtgtatattgatataactaatattattatttaaaaattataaaattatttcaaaatttataatattttttatttgtaatattttattttttatttttataattttctttaattttaaaataaattttaaataataatattatgtgtattaatataaatgtaccacgtatacaagagtgtattcataaacattctagagtgatagttaactaaatgataccttaaatttactaagtgttttgtaatttaaaaagttttacttctaaattttgaatttagttaaatacaagtaaaataatattattaaagggttagccgccaaaaattctaaaacaatattagttaagactaatacataataataagagtattgctaaagggtaccagtggtgcttagtactctactacatgttaatatcgctattggtttaattaagtatcgggtcnnnnnnnntttaatataatagtttttagagaatatcgttaatcaatcgcaacgagacatgtcgctgtttggcagcaataatgccattatgctctaataacaatgttggagaaagaataatagaaaagaatggaatggtctgctctgctctgccaactggacatgtcattattattaccattttcagcctttgcttttatttttccttcttttttttctactttataaactgaaaaagttaaaaaacttcaatttggaaatgtctttaccttttcatttatttacttatttattttctagaatagcttttcaattttttgggtgaaaatcattccacgtgcttataaccagtacaattaaatagaaacccatgacttttgtcttttagcattatatttactgatgcattttttttttttggtatttaaatattttttagtctaatttatatgttataattatttaaaaagatttgtaaaattttaaaaaattaagaataatttacaatatgaaaaatagttttcatacttcccacatttataaaataaaatagtaacgcgtacaataaattatttgaattttatttttagtgtgttaaattttttcaaaaacttataaaatatcttaaataactaccatgtacacaactataaaaatgaaactaattttttttttttcacatggcgaaacaaatagtaatacatcaatacacctctctaaaagaggtgtactgtaaaattcttctatatttatacttcaataaattattaaaaataaaataaaaaacttcgagtaaattgtaataatttttaaaatttgtttctatatttgtttatttgtttatttgtaattgttaggcaattttagtagttttattgtctgtttcaattgtttttattaagcgatctgcgaataaagttggacatgccttgggacgtaactctgttcatatggctgattgtactttcagtgcggctactttgccacctgaattttcatccttggttttggatgacttaatttaatgaagtttgttcttcttttcaaaaaaaattatgcaattttattaatatcaattaattaaaataatagtctgcaattctatcgaaatatcacctcattaaaaacacgatcagaattaaatttagaaaaacaaacaaaataatcaaacctcctatttctaatttggtttgataatgtcaatcttttttttttttttggttaagttgttatacatcaataagattgaattgagttggtagaaggggccacatgatatgattctattgttataatttatataatatcttttcaatgcagtgactatatatataatatataaacattatatcttgtaatgataatcactccatttctttgtcacctaattcaatcaatctctaaactcttattacctctcttttcacttttaacaacttttgaatcaatttttttgaaaaataaaaaacaaatcaattaaatttattagtttagtatttttgtggtattctttgggagcaatctaatttgaatttttatatacacaactataaattatgtaacacttataatttagatagtatttatataatatcaggactcgattatgaaaatttaagattcgtttaaaccacaaaaaatttaagattcgtttaaatcaagagaaatctaatatttattaagttaatttattagataaatatattactaataatcaggacctatcttatattaatttaaattttaaacaaaaataaaattaggaccagtaatgaaaaaagtgagataattaagatttgaactctaaactttttaattgttactctaatcaaattattactgaattgtaatacatatatatttgtagtattatgagtattattatttattttatgactaattatattttaattttttttaataggaaccctaagcggagagcctaagacggccgtctccttgtcttattttaaagccgaccctaataatgtaattatattatgctaataatctcatgaatttttacaccaaaatttattttatttttcagtgataattgacttgaaaataaatgtattagtgtagtgaagactaatgagtgtagtggaagagttccaagcgttcaaaactattttaagttttttaaaaaaagggtttttaaaaaataataataaataattattaacgaaaatagcaaacaagatcctattaaataaaataatatacattaagacagacaaacaatatacaacaatatttgaactataacataaagaaataaataaataaatgatgctaataatagtgtcacgtaaatgtaatatgacatgtgtcaggtgtttcaatatttaattaccatatatgtgatttaaaaaatattgatatatatatagctataatattatttaagtaggatatcacggttttcattaattaattttttaacttaaatgaacataatgtcccattttaaaaatggaaattatattataatgtatgtattatagggaagtttacttttaaaggagtgtttgagtagattgtatttgtttcaacacttaagaaaattttttagtttttttttttattatcgtttacgttgttatgtaagatatcttgtaaaattttgag

SEQ ID NO: 36524 - DNA, 5319 bp, Cannabis sativa
tttcttctgatttgctgtttctaactcttgattttagttgtgagtgtatgacgggctttttcttcaataacttatcaggtattcagtgttttcattgtttactcttgaagctaacgggcatcgaaggatttttgcactaccactccattgtcctgaacaatcaaattgttttggatctggttcactggttagcatggactgtttacatttggtttgtcctcggccaattaattcagtccaggctgatcaacaagtgacgaaaggaagtgtccatgctggtacctattctggaaactctcgtgcccgtaaaacaattctaggttcaaccatgcaatgtcaatctcagaaaaaagttatatcaaacaaaactaaatggaatgaacttccgcagagattttctcaaaaatccttaacatgcactgaatcttcttgtttgatctcaaataactcagtcattaaatcatcaaatatggtgagctctgatgtagatactgtcactaaaaaaaattcaagaaagaagtctagaaagaaggggaaacggggtaagaaacttctacgtaacactggctctaaagaaccagacatattgcctgaggaatgtcctaaagttagtttgacttctggaacttgccatgacaataatatgccagcattgtcttccacttcacttgatgcttccctacaggaaggtagggtgaaaacttgcacctcttaccctaatggggtggatacattggaagaggctatacctgcttttcataaaaattctgagacatgctctggtggtggctttaagaaacagatacaatcatccaaagattctgtactttctgttgatgatgtctcccagatctgctcttacaatgctttgcatcccagatactgtgctgataagtctgactcacttctgatggatccagcttcaacttcttcaaacagtgatgatgggatgaaactttatcatggtcaaaaacagcctgaaaaagaacattgcagaactgatttttctgaatcaccagcttctgattttcaaaaggaatattcctcttgtagaaatttgttaaagaatatcttagattcatctaatcataccaacaaaagtcaaacaacacatggtagtcaggatagaaatggtagtcaagtgcatgtagtaatacctggcaagaagaagaagcaaaataaatcagctccccggatttcaagtgtttccaaatttggagttgctggtaagttgcgtggtggtcgtacagggaaggaaaacagccattctgtttggcagaaggtccaaagaaatggtaatggcgatagtgtggatgacttgaagaagcttcctgtcttctctcagtatgatggtactttggaggcttctctgtgtaagaaaaattgtgattctcccgaagacaacaagcagttgaaagatactagaagttggagaagtaaaacttctgcaggtttaaatcatgaacggatgtcttcttctagaaagggatctcatgctgatagggccaagccagatagatgtgcaaaggttactgtgccacgcaaggagaaggagatggcgtgcatctcctctaacgtgagtgatcagaagataactagtagtgtttcaagatctccaactcaaactagctgtccaaaatctgtgctccagcctaatggagcaaagcacataacacctgaatcggtaacctttgtccaagcttgtccgaatgtgattggtggcctggataacatgtctaatgccaattcttgcacgaagagtaaaaccattgaagatctgaatcactcgttgccaaagtcacgcaactcgaatgatcaatcaaaactggtccaagtgcagtcttctttcggaaattcagctgaacaagggcagagaaatgtccttgctgatgattgtttgcaaacccacacctctggatctgttatgcagaaatggttaccaattgggttgaaggattgtggattgactacttctggtgatggttcatctctggaacattctgatgatccagctgctgaaattcagactacagaaaacactgtacaagataaagtgaattgtgattctgaaaatccagttcctaaagcaggtgttgtgtgtatggctcaaagttctgagggtttttctgatttctcccctgatgatgagtgcaggactccaaatgcaaaggatcaggacacaagcatgcttgaagagaagaaagacagaccgattgcagcacacactttagatatggaatctggaggtttaaatgcattcaagcctgttcaagacaaagtagcagaagccgtggatgatgcctatagggctcaaaaggcatctgaagctgttgagctgaccgctggtcatccagttgcagagtttgaaagagttcttaaatattcatgtccagttatttcttgtccaccccatttatcatgtcactcttgttcaagagatcagttatgtggtgtgtcattctgtctacatgagatgcgtaatatttctttgggaggcctatggaagtggtatgagaaacatgggaattatgggttagaaataaaggcaaatgattatggaaattcaaggagtttgggggctaatggttctttttgtgcttattttgtcccttatttgtcagcggtccaacttttcagaaacgatgttgaaaacttagatacaagcagcacaaaatcttgttctgaggttgtagacctgtgcaaatttaatgatacatctgaaggctcctctaatttggaccatcttccaatattttcagtactctttcctcaacctcgaaaggagtttgaaagcttttctcatcaagaatctagttcagaatcatcttcagcttctgcaaaagatgtttttcgtcttcaattagaggaaagaaaactgcagagtgatccggaactactttttgaatattttgaatctgaacagcctcagaagagacaacctttgtatgagaagtgagtattttctttctgtgtgatgtactaaaagtcgcatattaatctagttcactgcttattcatattactgcaccatgacaaaatgcttatattaatggacttcttgagaaagctcatcaaacagctatcacccttgcacttcttgttaactttaaaaacaatgttgtaaggtttcttttgtggctgataatatatagatacttatattgaacttgttcagatgcatcattttctgaaatttattatgattgatatgttcagctccttattttgaaagaatgaaactaaaggattatgttagtctcattattgaataacaaaatcaatcacttacttggcaattactaattcagttgaaagtttaaacctttaagataatctttcttcaggaagatcttaattatattctctttctgtatcaggataaatgagttgattaggggtgatggtccggtgcagtaccaaggctatggagatccaacaactctcaaatctgttaaactgaatgacctgcatcctagatcttggttagtagaagaatactttttacagcctgcactcgaggatgcaaaaatagtcttaatttctttctggtttcagatcaaaattgttatgtgaaacttgcttcagatattaatttacagcatcttgttttcaggtatgctgtagcgtggtatcctatttatcggataccggaaggtaatttgcgcgcatcatttttgacattccattcgctgggtcacttggttcatcgacctggtgtgcaaccccatatagtagctcctgtagtgggtcttcaaacttacaatgctcaggtagttatgttatgctctatttctgatcgagctcatgtaacttgttctactttatgttcctttcaatatgattatagcagtttttatgttttaacactaaggatacgtttggtaaaacatatgaatatgaatgagaataggaaaaaggataggagtaaaatggaataaaattgcatgtaaaaaatagataaaattttcacccatttcgaaatggaatagttttccaccaaaatggtgtaaaaatcattccatttggaatgacattccaatactttggaatgaaaccaaataaaaaaatggaatgaaatttgattcttttacattcaattcatttctgtcttcattcactagtttgtttcttaccgagggccaccctatagcttatttaatagtgttttaagttttaacttattattatgattttttacatgatgtttaaaggacagtggttgtattattatgataaacctggttgtttaatgtgaaactttatatcttagactcaaatgtagattatctcctacatgtttaggtagcataaaaaaagagagacttaacttgtcactgttagctgaaatatttttatattttgctgaacttttatccgtgaagcatgttttgattctttaatctcctcaacatatgaacgtctctgttttgcttttgcaaatattatctgttacaacttctctaaaccttaacacatttcctttgatccccgaacagagtgaatgctggttccgcatgaatccctcactactgaacccaaaagaaggagcaccagacctagaccctagtggaattcttaaggagcggttaaggacgctagaggagacagcttctcttatggcaagagcagttgtgaagaaagataatttgacgtcagtaaacaggcatccagattacgagttcttctgctcaaggaatcgctgttgaacgttttcggtccatcagcaatgttcatggtagcacttaaccacttaagttagatgagaaatagtggtgaatgtaagtctcattttccttttgtacatttcaatctctcttgctttcccagtggaatttaattccatgcttgtatagatccatctgcgagtagcgagccttctctttctttccttggaagtaaaataaacttttcggagaaaaatttagtggccccttccccttgatgtaaatatgtgcaatctggggttagtagttaaagggttctagcttagaagctttgaactttgttggatatctaatgcacctgcatacaatgctagttttttgttcatccttatgctgagttttaaacatgttattctgagtttttcctttgtaccaaaatagcaatggatatagttttctagtcccaaaatattataggattaaaagaagaaaaaaaaagaaagtaaaaactaaaaaagtttggttcaattgatgacaagtcttttttttttattttttggtgttacattgtgtgattttaattattgttcttgttgttatagcttctcgaatcactacttcttgactttagatttcattttaactaagaatcgaa

SEQ ID NO: 36525 - DNA, 5341 bp, Cannabis sativa
  modified_base (62)..(69): a, c, t, g, unknown or other
cacatcacaagtaaattctattttaccagcgcaataccaacttttgccagcacaaaaatgtnnnnnnnnaagtgacatttcttgtagtgcgaccaggaaatgagattatgaccctagaaaacacaataggcgctggtgatacgacgatcatcaggacacgaagcccaatcaacattagtgtgacaatggaggtcaagattgtcatttggttgaagaagaatgcctaaatgagcggtgcctttgaggtaacgaagaacacgcttagcaacagtggtcggggcatgaaggaattgacagagcttgttgacattgaatgtcaggacgagtaagtgtgcagtattgtaaatccccgcccatctaggctgcgataagcagtaacatcttggagagggttcccatcgtaaagagataaaggtgtgagagagatcagtgtagagaccgatttagagtctataagctcagtcttggtaagtaaatcacgaacatattttgtctgagaaaggtgaagaccagaggaggatcgatgaacttggacgccaagaaagaaatgtagtggactaagtctttaacatcaaactgtgtgttgaggtaggtgagtaagttagcaatctgcgaagaggaggaccccatgacaatgatgtcgtccacatatataagaagaacaatgatgccagtggaagactgataaatgaaaaaaaatgtatcggctttagaagctatgaacccccaggcaataagagtagtacttaactttagaaactagacgtggggtgactgttttaagccatatagagatttagtaacttgcaaacatggtgtggatgatcgggatcaacaaagccctcaagttgagacatatatactgtttcaagaagattaccatgaaagaaggcattttgaatgtcaaactgtgtgataacccaatcataagagacaactagagaaaggaccaatcgaatggagttcggtttgataacggggctgaatttctcatgatagtcaaggccatgggtttgatggaagcctttgggaacgagagacaccttgtactgcccaacggagccataagcatttaactttatatggtagacccatttgcaaccaattatcgtgcagtccggaggtgggggaacaagaaccaagtcctttgtttcttcaaggaattaacctcagtgcccattgctaaattccacttgggatcacgactgacctctttaaaagtagatggttcaactggagtacctgcaggcacaacaaatgaatgcccgatttagctcaagaaatcatgggatgtaaattaaaatgggcaataattgtttcatgtgggctatccaaatctaccatcaaaggattagggaaatagtcatgagagtgggaagaagaactaggggaggtcgagaagggtacatgaagagttagaggtgttgatgattggaaagaggaataaaggataggtgatttagaagacacaaagggtgaggacaaaaaagtggttggataaggggaagcaggaatgctcgggatgggagcgggagaggaaacaggaaagggtaatgatgtaatgacagcatgaggtgtcgcaggtggaggggagggtggtatagcattggagaaagggaaatgagattcgttgaaaataacataacaggtaacaaatatgcggtcagtggaaggatgaaggcataaatagcctttatgtttaccgttgtaatcgagaaaggtgcaacaggaagaacaaaactcgagtttgtgagtattgaaaggacgaagaaaaggaaaacattgacagccaaagacacgaagaatagaatacttagaaagtttgcaatagagaaggtgataagggctggaataacagagggtgcaggtaggtaagtggttaatgagtgagatgtatggcagtggagaagcaagcgtaaggccaaaaatgaagaggcatttgagcttgggcccacaaagtcaagccggtttcaacgacatgatgtttcttacgttcaacacgaccattttcctgcggcgtgtgaggacaagagagatcatgacgaatgccatgttaagtaaagaatgtagagagggttcggtatttgctgccctaatcagtccaaactgtttggatgtgactttgaaattatgtggataccaaattcttaaaagtgagaaaagtttggaatgcttcatcttttgtgtgaagtaaataaaaccaagaaaaacgagtataatcagcaatgaataataaaaaaaaaatacttgactccagtgatagtcgtgatgggggcaggaccctaaatgtcagaatgtattaatttaaaaggctttgaagcccgagatacaaaattaggaaacactagtctatgagatttgcctaattgacaagcagtacagaaatgtaggaaatcttttcttggaaaggtaaaattacaaagagaaaaaatgcgagtaagaacatcgtaagacggatgacccaagcgagagtgccaaacatcgatagaggacttggaggataatagcagctgtggagatgaagtggagttagaagcgggcagaagatgcgagacacgatagataccctagtcaagaaggcctttgaggaggattttgtgactgacctgatttttgacaaaaaaaaaatgagtgggatgaaattcaacatatgcattgttatcatgaaaaagctgagagacacttaagagatttttggacaatgatggtgaataataaacttgatataatttgagaagacaaaaagaggaagatggtaaaaggcagaactcacatgtgaaatagaagcaaacttaccatttctcatagtaatttgatcattaccatggtactgagttggtgattccaagaggttgaaatctgtggtgaaatgatgagaggcacccgagtccatatacaacgtgggattagtaacaaccatggaaggagagggagtgggtaacaggggtgggtttgggtttgaggttgttgttgggtaaagtaagcattgaactgacggggaggaggctaaaactgaagattggttcaatggtagcacgaggaggcagtatgatccaatttgaaacaaatttggcacttgggagggcgtgtgggtggacgaggagctgaaggaatccatggggcaagtgatcgaggagggtgggaatatggttgtcggggttgttgttaggaatgggtagatggtggttgagaagttgaagaggaatgttgatgcaaattcgggtaggtttgattgggagatcgagaagagaactgagatgatgaaggggttttggggcattgtttggggaaagataggtttgcaaaattggcttaaagggagcttatagatgcagcagttgtttggcgatttatacgagctttgtagctcaaaagtagagcatgaacttcctcaatggtgggtttgatgggtcgagccaagatcggagtaacaaacgcatcgtactccagacccaaaccgttgagaaggtaagttaagtgatcttggtctgagatgggttctccgacagaagcaagcgtgttgcagagagattgaagcttttggaggtaagaaaaagcagtgagaccttccttttaaggttttgcaacgccgtttgaaagtcatagctccgattaaacaaagtggcggtgtaggtgcgttctagagaaacccagatcttggtagcggtggagaagctcacgatctgaccaagcattgaatcagaaagtgaagcatagagccaactcataagaagtcgattatacctgtgccatgaagtgaactcagggtagacctgggttggatttgaatcaatgaactgtggagggcgaaaactgagccatcaatatacccttcaagttcattagcaatgatgatgttttgcatttgcatccttcaaacaagatagttggtatcatcaagttttattgagattgtttgatgaagatatgagatatttgagggtaaagaagaagaagatggaataacagaggtagaagaaatgttaaggccggctgtatgaggagggttaatatcagtagggtttgtgtatttaccccttccatttttggggtagaagatgtactaactattgatgacatggggagccgttaaagctctgataccatgtgagaaggaagataaaaatgtgtattcatttccttagaaaagttggtacaatgtacagagtttatataacccactgaatgaagaaaggacacttgtccaataaagagagaaacatgaaaaaccttattaagaaaagtaaatccaaattaaaaaaacaactcttaatttaattacagtttatgaaaaacattcaatacaagttacatataattcacacatttggaatacaactattccaaataatctctttctctagtcctaatactctcgttaacaaataatgagcaactatatttaaatttttaggtgcataaatgttgaattaattcttcataaaagccaacctgttacaacataaacaactttttattatgagtcaaaccactacaacttaaatcagtctttaactaactaatttcctaataaaattaccaacaaactaattctcaattaaccacgagcttcaacaaataacagaaattaaactaactcaaggagttaaagatctcacctaaaaatagtttggatgttgaaaatggatttgaaggtttgaagagagagattttggagaataaaattttagagagatgagaagatggatttgaataatgaaatcgaaaaaaaaaagatgaaatgaaggaggaggaagaggaattaggtaggtttggggttaaaatgatgaaatgggaagggttggggtttttattgtttgacaagcgatggaaggctttaacggcgacaaaaaaataataatactgacgacaaagttgtcattgaatttattatcaataacgacaatgtcgtttgtacaaataatgttgttattgattaaaatttttacaaaaaataattaaataactaaataccaacgacactcaaatgtcgttattgagtcatttttaatgagaatttttaagcgttagtaatagtggtgttggtgataattctcttaatgacgtaccatattggaagagctaggggattcagatagtaaggatctggccttggatgcctatggagcagaatatctttaagattgtgagctcggatggcaggaagtacttcagaccagtaaaaaaaaatacttgctccaatctaaccttagtggtggcaagaacatggtgattggaatcaccataaagctcatgaaattacttgcagaggtcgccattgtcgactgctctaataccaagttgagtttagatcacaagatcaaaagcaaagaaaataggg

SEQ ID NO: 36526 - DNA, 3909 bp, Cannabis sativa
atttttgaaaatcggaaaaaattgaggtggtgagcacccttccctacgcacgcggaaatcatgcaaggggacccttgcgccgttgaactacccagtagacttttgacttctgtaaaggaaggctaagtcatactaaaattcaagtaaaggcttcactctcgaaactaatggtgaaaaccaagtgggcattcaatagacttcaattagtttctcattttggagggagggttgaagatgtgtttgaatgccaagaggtattttcaaccaaaagctttagaaatttctaccagtgaaatgaagactgcacgacgagagcaaacgcgcttgtgagaaccacatttgatcatgcaacaatcttcagcttctatgaaggagggctgaagtcacccttaagttcaagtagcaatttcatgttcaaggctggaggcgaagaccacagtgggtcttcaacagacttcaagcaatcctttcctcgagggaagaacgttgaagacgtgtcgaacccccagcggtcttccgtggacggtagagatacacctcctcatgagaattgtgttgaactatgcgctgaactttgactttcgtgaaggaaggttgaagtcatgtttaagttcaagccatggtttcacgttcaagaaaaaggtgtgaaaccccactagacgtgtgatagacttcaagcaatctttctctttgagaaggaggcttgaagatgtctcaaaaccccattgatctttcaggcacagtgaaaagacacatgcacgtgagaaccatattgagttatgtggcaaacttaagcttccgtgaaggaaggctaaagtcgcactaaaattcaaggaaaggtttcatgtttaagaccaaaagtgtaaaaccccaataggtgtgtgatagacttcaagcaatccttctctccaggaaagatggttgaagacgaatcaaacgcccattgatctttcacgcatagtaaaaacatatgtgtctgtgagaaccatgttgagttatgtggaaatctttggctttcatgtaggaaggctgaaattgcactaaaactcaagcaatggtttcacgttcaagactaaaggtgtgaaactccactgagtgtgtgatagacttcaagaaatccttctctcaaggaaggagggttgaagacattttagacccccagtgatctttcacgcaatgtaaaaacacacatgcccatgagaaccatgttgatttatgtgtcagactttggcttcagtgaagaaaggctgaagtttcactaagcaatggtttcacgttcaagaccaaagatgtgaaaccccactggacgtgtgatagacttcaagcaatctttctctacagaaaggaatgtagaagacatatcggattcccagtgatctctaatgcacggtaaaaacacacatgcccatgagaaccctgttgagttatgtgggggactttgcctttcaagaagcaaggttgaagtccactaaaattcaagcaatcatttcacattccagaccaaaggtgtgaaaccccactgggcgtgtgatagacttcaagcaatctttctccctatgaaggtgggttgaagatgtatcaagcccctagcgatatttcacgcatggtaaaaacagacgtgcctgtgagaactatgttgatttatatggaggactttggctttctgtgaaagaatggtaaagtcgaactaaaatccaagcaatggtttcaagtttaaggccaaatgtgtggagccccattgggcgtgtgatagactttaagtagttcttctctccttgaaggagggttgaagaagtatcagacccctagtgatctttcacacacggtaaaaacacatgtgcttgtgagaaccatgttatgttatgtggcggactttggcttccttgaaggaaggctaaagtcaaactaaaattcaagaaatggtttcacgtgcaagaccagtggtgtgaagccccacgaggcgtgtgatagagttgaagaaatccttttctcttggaaagagggttaaagatgtatcgaactcccagtgatcttttaggcacggtaaaatcacaagtgcccgtgagaaccatattaagttatgtggtggactttggcttccgtaaaggaaggctaaggtcgcactaaaattcaagcaatagtttcacgtttaagacaaaaggtgtgaaaccccactgggcttgtgatagacttcaagcaatccttctctccgggaagcaggttggaggacgtatcagacccccaatgatctttcacccgtggtaaaaatacacgtacctgtgagaagacaaagcaatcgtggaatcctcgcccaaaaggttctccgcaatccagcatgggacttcgtgcaatggccctgacccacttgttggaacctccttcctttttaggggatgtttaagcatttcccggatgaccttcacctctcacgaaccgaccttttagaattcctatgtgatccgggatcagtactccaggctaaataggcccaccttggctttatgttcaggtgattgggtttctatcccaagtgatcaatcagatggctgatgtaattccccacagattgccatttccacagggtccactaacggagctcttgtccgtgactactaagtagtgctaagtttttggtccgacaactctttgcatggttccatcttaagccagcagatctgggaaaaccaaaagatgcattctaggagcttgaagctgacctaatccttagggagacttcacggtaccctgctatataggagcatgcatccttccaagtgcagccttcggtctgatgcacaagataagacctcaggcatctgtctctgtgacaattactttagattcactttacaagatgtccgcactttgaacaacattctgtctcccatgttatttccatagtccttttcagggatcttactactttgatatcttctgccggcagactttcttataccttttggaaactcatcttgacctttgcctatctctcattttttaagagtttctcaaattttgttctaggaaccctacttttaactttttgggaactgttttccatcccttccctgtcgcactgtacctaaagaaacatgtatgcataggcactgccactggatgcaggaatatccttgatagtctgagtgctcaaggttttgggaacaagtactaacaaagcaaacatgatatcgtaggtggaatcggcctcttgaacaagggaggctccagtagactgtcggcgcatatacttcgtacagagctcctacccctattctacgtttagcggcgtgaccttttaggtagccttccataagctgctcgtttctaataatgtttcctgaaggtggcttattttcacctttcctgccgaggagaatgcaccgacccttgcatagccattcctgttatctttaataagtcttcgacacgtcctcctctggctggatctaggaagatagtcaagccatgatttttctccatttcctggactagctgtcattttgtaacttgggattcgttatgaaaaacacaatgcatgtttaaatctttcctcagctctcaatgaaaacaccaaaatatttactgagattttcaaaaattgattaattagagattaagaaagaagtaaaacaataaacaataaataataaatataaggttttttacgtgattcaggcgttaactatccttagtccgcgagtccatttattagccttattggcaagtaatgaatattacaagtatttacattaagaacttgaacattgtattcctcttgtccctcttgaagaagaagaagctctttaagaatttttagcatagttttaataattgaaaatagtttttcagactcccaagagtcatcccctatctcatgaaaggcatgggtatttataggcaatctcttca

SEQ ID NO: 36527 - DNA, 4182 bp, Cannabis sativa
tgttgaatcgtgacctaaggcttgtttgcagatcagttttgggatacctagacaggtcgattgccggagccatgggttgtttcatcgcttgctttagggtcagggacgatcgccaaagccacaatcatcatcgtcagaggtcacagcctcatcttgtttctgaatcttctcatcccaaactaacggtgtgtgtatgtgtgtgtgatttcgtttttgtttggttgctgagaaaatttagttatgtacaagaagctgattctttcgaggaaaaagaaaaaagtttgatttgcgaattttgaggtggagatgataattgtgatgaatttaacgatgtttctaattttattttgtgttttttcatgtgtgatgatcaggaggttgtagtttctcaaaatcgactttcgtctctgtttatgtccgaaggtatgtccttttacacttaaatgagctttaattttatattgtaaaatctaatgttaaccatggctgaccgttgtgtgtgtttaatttgaagataaacaagattctccttgtaagaataggggcggtagtagtgctggtactccagaaattgataaggctcttaaggacgaggtatgcttatgatttgaacatttcacctcttctcctagatgttgattcaatttgaatgcacaattatagacttcaaagtatcatagttggttcagattgttgacacaatttgtttacagtcgtgtgattaaagattatgttgggtcttaatttgtttttgttgctttatgaaagtgaaagtaaagttagtcttttatcatgctgaaagtctagtattttagtagatttaactaagcataatagtgattataaagagctagtaaaaggttactttggctgtcagtgtacctattttctgttgcactggctgaaagtggacatgcttttatgattttctctttctcttttaaattgaattttaaaagagctttgcagtctaaagctagtctttttgggtgatcttttggctatctagattggagtttgacattcttctttaaaggtcatcacttgttttgatgggctctttttttcaggccaagtttcttaaagcgtgtggtaccttagcacagactcctattgaaattcgcaaagcttcttccaagtggaacagctcacctcttcaggatggagattcagagacttcgaaattccattcatggcttcccaatacatccattgagaaacttcagttggaaaatcaaattgaccaaccctctactccagttaaactctctgaagagagggctcatacctcaggttctttggagtgtacacctagcaggtagaaatttaaaaattgtgctgaaaattctgattttgtgacattcttgtcaactggtttttaatgttgttccatagtcggggttttctaatttattttctctttgtcacagttagcagcatttagaagaaaagatatgatatttgatctttgtatttttctcttgtcttttccttagttgtgtatcaaatgttcagaactcgggaatagtctcagtaggctctactgaaggcagtggcgcaggtggtagttacacagcagctactagccatgcttatcagactgaacatgttacaactttagaaacacctcaactttcagccacaaatgttcaacgcaggaacaaatctgtgcgttttgaatgtgattcagatttatcttcttctgggggttcgtcatctgaaaatggtcgccagaattttaagagagctgaatcaccaggtaatcagagcatatcaaagcgctcaccctatccaacccccctaaagatttctgatgagatgcaaacgcctggaactgtttttccttcaaacatggatacttttccaaatgggaagattcgagttaggtcgcaatatgtgtatccagttttgaacccagttgaaaatgtctcccagtggaatgcactgaaggaagaggatcctaactttgaccaaatttcaggtgagttaagaaaatctcttgatcagcctgaaaatgcgtcgcctaagtccaaagagtcaatcaaagaaactttgtcggaggagctaaacccagaagctagtctgtcaacctggttgaagccaattccatcgactcaggacagcaacaataacaactttgttggtcctgcccgtcctcgaggagctagaacccctatggacagacctattattgggatggttgctgctcattggaatgaggatgatcctgctcgtatctcacccaaatggtgggatgggaatggaattccaaattcaaccaataagtacaaggaggtatatcatacttttccattttcattgtttctcactttcatctaatcttgatagtaatatttatcaacaacaaaactaccaattgctatgatttcaggatcagaaggtcagttggcatgcaacaccatttgaagagaggttagaaaaggcattgtctgaagaaagtatcatctcccagaggtatgaatttggatgctcatcactttatatttaaaaattaccatgcctatgatatttggaagatacgtatttgttgaatcatcatcaatgggccatttctaattacgttagttattttctatatcagtatttagtatgtgtatacaaatttaattatcttttttgattgatatgcaggcagccaattcaagcaaagcctataaattttgatgagaatgatgaaagtgatacagccctttctcagttacaatcttcaccccatccgaaatctctcgtttcgttctgatgagtatgcattgtatttcgagtttgttgttacatctgctgtcttattgatgtagttgaacttcataaatgatcaaaatctcatggattgaatcaagccattgagatttgattgggaaatcaattttctgtgtgtacataaacaatgaaagctcttctcacatctaaggttttggttaattggctcattgcttttgtttggtttttcatggttatgtgatggaccacattctaagacaaacccgttaaaaagtagaacatttctttaaccttactcagccattattttctcatatttttttcaaattaaagctatgcttaaaagttgaattttggtcaggaaaaaaattgttggaaaaataaaagtacagagaataactttgaaaaatttggttggattgagtgtttttttatataatttttctttctacttaaatttataaatcttttcaacaaaatattctcattagcttagaaaatttttatttagaagttctatgttggagaacttcaaaataatttacattgtgaaactttaaataatatgttgtagataaaaataattgtattaaaaaatagttaagaaaaaaacttatattaaataagaagaaattttcaaaaatatcttatttataattttatggtctataatttttaattataaaagtaagtttatataaatttaaaattataaaaatatattttgctcaagaaaaattaaaaaaaaaaacactaaaaacaatgaaaaatcaaacaataattataaataaattataaaataaataaaaataataaaaaaaacttacaaaatactaaaatttaatttaatttttacaaaaatactgtcaaattttttaaaaaatattgttaaaacttaatatagtacactgaataaaatttacgcagtattttttgaaaaaatctaccccagtataaaagtaaaaaaattaaaaatttcatgtgaaaaactaaaaataaaaatttgttctatttctataatttttgttttaaaattttatgtatattatatataaaaaaattgaattgaaatggtaattatttcacacaggacacgtaaaaatacaaatttttatttattttttgaacaaaagaaaacaataagaaaccctaagtacaggggttatataaatataagaggaagaagctttagggttagtgggagggaggaaattgaagggaaagaatggaggcgtttaggtcaggagagaaagagagagatactagaagcagcaactgtatgtatatatatatatatatgatccatgtggacaagaaaatcatctgagaggggatcatgatgtccctctttatttcatttatagttttcaatctgaaaaaacatcattatatatataaatcttgctgctcgtatcctcgtcttctttctttctcagattcact

SEQ ID NO: 36528 - DNA, 5374 bp, Cannabis sativa
acaaaagtaagtggaggcctatcatgacgaagtccttagtaattcttaaacttttatttttgcttattaagtcggtaaactttctatgatcaaaactattctgaactgtgtacgttaaacttttacatttgctttgcaggacatgcacatgttgctgaagctctcggtgtgcctcttcacatcttcttcacaatgccttggacgtgagttccatgaaaactttttgtccgtcttatttttcattttttacttttatcgggggagggggggagtctattatggtacttagctttaattctattaaatttttgggtcgaaatctcacatctatttcaataggcaggccaacgtatgaatttcctcatccactagctcgtgtatctcagagtgctggctactgggtatgttctcaattagtcttacgcttattctagtattctttttatatgatattactctgatgccataattaactttctgaattgcttttgcctcgtacagctttcgtatattgttgtggatttactaatatggtggagcattaggggatacattaatgacttcagaaaaagaaagttgaagcttgctccaattgcctactttagtacttaccatggatcaatatcccatttgccaacaggctatatgtggagtccccatgttgtaccaaagcctagtggtaagaccttccttatagtttctctcttgcttttgagaaccggtctctataattatcataaccatattctaccaattggagtttccatatgtgtatcaactgttgcgaaatagaaagctgacagaagcattcagttggttgcttgaaatgcgcccaatatgttttgtgtttgtgcatgcgcgttgttgtttccccaactcgactattgctagcaaacagagataatgatgttttccttctcagaaacgtttatttcagtatgaaattgctggagagtaacacaagcatcaatacttgtagttttttttttctttcaactctgaaaatccgttttacactgtttatctgatatgtgcagatgtatatatacattatgcttatggttataagatctttcaatggtcatgtatttgtttttgactttatttcaaccatgtgcagactggggatctttagttgatgtcgtcggatattgttttttgaatcttgggtcgaagtatcaaccaccagagaagtttgtccagtggattaaaaaggggcccaaacctgtatatattgggtttggaagtatggtacgattaattactaaatataatgttgaagttaataactaggctctatttatttgttctctatgcacaaaaaactatttacaaacaccaatccatatccaatttactgacttttttactaccaacatccctttttatatccttaattacattcatgaccactggagttttggaactccataaaacttcattccgagccctccaaatatgatacacactagcacataaagccctcacgtaaatgcttcttctacatcttgagtgcccacaccgcctaacccaattcaaaattccatgaaggttataagaatgagagccaatgcccaaccaatgaagtacctcttccatgcaccgagtactaacattgcatccgaaaaacaaatgctcatgtgtttcattaagctggccacacgaaagacagcaagaatcaataaattgttaattttctcgttattagtttcttccacaattgtagaagttcataccataccatgatttttgtttagaagttttctatttatgcgaggacttctcaagcattcaaaatgaagaatgtgagactagaaatatttatccttttattcgaatattaacacattttggtgacaaagaacaacactgcatgtgacataaagatccatgtttgagaatataaacaaagttagctctcatcataaaggaaaatgattttggagtgacattgaagctaagtggaggcattaaaatcaaatcctttcaatcaccctccttaagatttctgagagtttatatttttaccaattgtaatccatgtatcattagctaagatattctttctagtcatgggcacgttataagacaaatatcttttgagtacatgaatgatgatatatacttttatgtatattgattaagatcaaatgtattgtgtttgttcttcatttagaaagactaatttatcatatgcttcttgttaagcctctggacgattctcttcaaacaacggatatcatattggaggcattgaaggacacaggacagagaggcattatcgatcgtggttggggggatcttggcaattgtaagtctttttttcattataactttgtgttttttccatcttggatttgattatccatttgtttttcacaaaaataaaaagaaagaactgaaaatactgtgaaaatgccctttggttttaccaatcttttccatcgagaagccatttagccatggaaaatatgtttcatataactaagataatgcacaacataacttatttgatatgctgtgtatttcatatataattgaattaaccttgtgatggatatataggtgatataatgtttaaatatttttagagacaatctcgtaacgattattcttttaagcgagccctgctgctgtagactgcgtttagtaactagaacttatttttacctttcagtaaaagatgttccggttgatgtttaccgtttggaggattgccctcatgattggctgtttcctcaatgttcagcagtggtaagtttcataatctgttttttcatggaaactggattaagaaagaaatggaaatggaagtacatgccattaaacaactgggaattatggattgttactttcttgagacttgttgaatcgcaaagctttttaccgaggaaggagtacaggataatttgtaaagacttacgctgtgtgaattttatgttgtgtacatgtaggttcatcatggcggtgcagggaccacagctacaggactaaaagccggggtaataatcttttcactcgattattttttctctcctttgattattttgagtgtggctatgttcttgtacatgggatattgaatttgttaaagaaattgtttatccattttcacttttgttcttaagtttaattcttttgtttatacagtgtccaaccaccatagtcccattttttggagatcaattcttttggggtgataggatacatcaaaaaggattggggcctgcacctataccgatatctcagctcaatgtcgagaacctttcgaatgctattcggtttatgctccagccagaggtaggttcaatatatcttataccatttgaaggctatgaatttgtggcaacctacaatgatatgacatgttttattattcattatggctaggatgaatcacttgtttaaaatcttatagcagaaaggatgatttgagaatttttcttcgaatttgatgggattcgtgtttgccaactaaactcggttattctttatttcttagattaaagctcaggcactagagctagcaaagctgttagagaatgaagatggtgttgcagctgcggtcgatgcatttcatcgacatttaccacccgagttaccgataccgtcttcatcatcagacgacgaggaatatcccaaccctttggattggctcttcgctaaaattggaaagttgtgctgccgaccatgtggtggttcgggttcgtagggttactccatgcatgtcatggttgtacattagttttttttattttccctttgatttatttatttatttattatcattttgatctcgtatttcattcattctattagagggcctttcatgtttgtggttggtaggtttttttttagtatttacatttttctctttttactcaaaaaataaataaattaggttgcatagaactatagtgcatttttttattgaagaaaacatagtgaattgtttcaaataaatattgggattaataattatcattacattttctttgtaatgatttatggcttctttttttgctcaatttttcttttctatagcaccatataatcaaagggttatattagtatgttttcaagtaaaacatgggtatggttataatttctattctataatttactacaatagggtatgagaaaacttgtttaaatcattatgattatacttcgaaataattttactaaataatatattacttgaatatgatatttttctattaatttattgtttagaaaacatgtacaaatcatatactataataaccaaagaaaatacaaatattagtaataacattacaaggaaacattttcaaactaatctactttttgtaaagcttgacatctttccacttagattccatgtaaccacttgaatcataggtagcatagacaccaaatttgaagtagatgtcgccctgacaggctgaccatgaccattgacgatgaacttgttggcaccgtcgataaagacgctatcttgcctttgtcgacgttgtggattatgttgactcgaaaccacctgccgtatagatcggcagctactacttgtagtattttttgttgccatcatactctttagttgcaaagtggtagctccctcatacccttcaaaatccctttacacctatcatgatggtagggatgtctctattttagtgctgtattataactaaaatgttcttatatgattatgtatattatagttatagtagatattttacctattttaaaaaaaaaatataataatttatagtgtattgaaaacaaaacaaagttcaaacattcatctgtactcgtgctattgaatctttaaactctgtttttaacatcataaattatttgaatttttaaaaaatgaatgagatgcctagtgcctactataatcataatgtaaatagatcttcatataaaaaatataaattataatttcttgaaacaccaaaagcataaaaacataaatatttttattgatagaaacaaaagtgatatcctactataatcgtagtgcccaacatcactacgatatttctcactattgttaatgcaaataggtaccaaggtcccacatatattaggttcataaccattgtggaaaattactaatcctttacaaaatgttgtatttaatagcaaagctctaaaaaaaaatgagagaaaagatatactaattcgaaataagagagaacctattagtaggatcatcaactgaattgcaatatatatatatatatatatatatacatatatatatggaacactttttaatgggtaatagccattgatgggaactaaaaaaattaataaggtaataatttaataatggcaagtttttaaaatttaaaaaaaaaattatatttattttttataaaat

SEQ ID NO: 36529 - DNA, 5448 bp, Cannabis sativa
ttaattaattaataaaagaggcatttttcaacttacccacctaaacttgtacttagggccggccttatttaatgaaaaaaaaaaaaacatatttttaccattttttttgtcaatacaagaaggagactaacctgaaggatgctaagaacaagaataaagatgccaatgcctctatgtgttggaaaatgagctccaatcttgttataaagttgttgtccaagtacaacagcagcaagaccaaacacaaatccaactaattgaatcactgaatgcaaatagtaccaaacaggatccttgtgcttgaagtatcttgggataatcgccccgaaaggaagaattaaaccccatcctagtatggccaatatcccatgattcttcttcattttgccaagatcactaggtgcatcacttgctgagcctatgacaaaaaacattaagcaaaaaagttagaaaccaaaaaagaactcgaacctcagactttgagaaaatgacaacatagtttttattactagttacctgcattgaagtcaaacattatggttgttttgtcatcgtgatgagacaaatgcaagtgattcggatatgaaaatccgaaagcaagaataaggggttggtgatggagaggttgtttttcgaattttaactgaaaagctaagtaaattcttggtccatgaagaacaacagaagaaggtataccagttagtggtaattcacctttgtctgctatgacttgtgattttcttgaaccttgtaagtaaaattgtttaactcttgcttggcctttttttgtaacccaaccaacaatggcacttgaaccaaccatcattccatcttttgaaaatcctattccaacccatccagttgtgtatacagctgataacacaatgttcatcacattgtcttcattttgagtgtactgtgatttatcaatccaaatacataatcagcatcaataaatcaaaattttgtgatcccaaatttttagaaaataccattttatatataaatactataaacatgtcatattttgtattgagtcacacactcatattttaaaaatatagaagcaaagatatttcacatggattgaatgtaaattttttgagccatttttaacaacatagattacttcacactcatttttaattggttttgagataaaaccttataattcatgtcctatttaatcttggaatttcacacaaaaagtttgacaatttttgtaaccaagtaaaaacagagatgagagttaagacataaaccctcaaaacaaatactaaatattatatttcagtgttgaccccaaatttttataaaagtaacactatcccaattcagaaaaataccattttatatataaatactataaatatcagcaagtcactctgttaatcatgaattaaatataagtattatccctcattaattaaatattaaaatattgagtcatttataagaacatgagttactcatctattcatcatcagttgattttgagataaaaaaaaaaacaaaatagagatgagagtttaagacatattaccctcaaaacaaaagtgttccaaattggtttgcaaacaacattagtaaggttaccaaaaggtggtggcagaaaattactcaaatcattattacaaagctctaattctccaccaccaccaccaccataaccaacttcagctccaccatcagctgccaccaagctaagaaaaccgagtgcccataacaactgaataacaagcctagaagaaggagagaccggattttgaaacacccgaatcgccatattggaaggagaagtgagtgaaagagtagaaagaaaggaagtaatgggtgaaagtgaagaacaaggagaaagtggttgagaggctttagtcacttgtattgggtttgaaggctcattttctaattcttctagggtgttattggtggtggggttagggagttcctcctttggtttggtgcatggttacatatcatgattctcctcctcactaccaaaccataaatatatgtatatgatgtatctctctcttaacagctcttcttctgactcataccaaacgacaagaatattgaaaacgacatcatatcaacagcaacaagcaattattaattattatttttcaagctatcatagcaaaaaacaattaagttttgtagttagaacaaagtaaaaaaaggtttggaggaataatcatattgatgtgaagttacttggttttgaagtaatattcatttaggtagagagatgcttatgatttgaacttcctaacttgctgtataaggggaaaaaaatctaaagagaaaagaaatcgatgttcttcattttcctacctttctttatagatattggcactcctctaaaattgataatctcaaagggtattttagtttcattcaaaattactttgattttgaactttttttttaatttttacaaaacacaaaaatctaaaataatagaccaccaagtttatgagaaagcattcatttataatatgtctaataatttaatactattagtttgcttgtattattagccacaatcattcatcttacaattatatgtattatatattgttgttgagattaaaaaagaataaataaaaaatcactgcagatcttaaaaaaccaatatgtataatttacattcattgtgaaaatttgcaaaataaaaactaaaaattttcgtatttgaaacaattaatttaagagaaaaatttagtaggtgaaaacaccctctccctcaagtgtttagaatttttttaaaaaataaaaaaactaaacacatcctaaaactataaagaagagttcagtttgatgataaggcctcttctgctcattgggtcaacaaccttattttgtagctaccaattcttggttgcactaagtttctcaacaatgcttctcaaaagaaaatacatctggaaatggaaaacaacatcacagaaaatcaagtcaaaagttacacaacaaaagataatttctctcatttaagattgagatcttatgctggaaagtagaagaagcaaataataaaattgatagatgagacaacaactagaccaagtacaatgcaaattctcttttcttagaggtggaaagaagaaaagagcagtgagatttcaacgatggtgattcggtcacttgggtttggggatttttcggatattaaagcttcaaaagcaatagagatgcatatggacaatgcattaagaggcagcaaattctttgttcaaaatgttattaagaactaattataagggaagtgagaatttcaatgatggcgattcgaccagttgggttcggggattccttaaatattaaagcttaaaaagcaatataaatgcatggacaatgcattaagaggaagcaactttctttgttcaaaatgttggttagaactaatataccttacttctcttccagaagaagtgatgtgcaggaaagaagggatgctaactcgtcttcggttgccaatccatagccttgccatcttattctaccgaatttgtcaatgaggaatatatatctgcagtgaagacaccattgacaatggtatttcttaatataatgattttctcttagattaaaattgctaaagtgagaaacaagagaatggtgttctacccggttagaaggttaagtatatgaagttcttttcgaaagtaatagtgatcgccaaaagaatacacaatatgcctcttaagtggatcgtcacttccatcatcattcgatttcttcataatccgaaggagaagctgcttaattggagtctggcataatagccacgagtctatgaacgatacctaaataccaaaatgattagacaacattcaccgccgaatggagaaatttgaattgggagccaaatatgcttaaacaaaagtacatgagctgcaactaagcgtggaaaagtactttacctcgtacagattgacaccctttgagctacgaaaagtaccgagaaaaggtaaactccaagaactaatcatagactgttcagaaaaagaagagcattacattattcaaaggtttttttatctttctaatatgctgcaatgaatgtaacaaaaatagatagcacatactactttctttcctataatctgttcaaatatagtttcaaaaatctgtttacctgagcgtttgcccgaaacgaaacgcatattaaagatgccttagggataggagaagacttagcagcatcagctgcactttccttctccttcaaatcaatgggaagcttcaaagctttcccattagagaaattcacttcaatactagggaacttcacagctttcatttcaggaatgataatcttacttgccaaagcaatctacagatacaaacattaaaaagttaaagaatgccatccaccattttaaaaaggtcaacataacttaatatcagcccaaaacaaattcaaatgttctttattcgaattacatgggataattgtggtataattacccaaaattttgagtttgtcaaactataattttcgtcgtgtttatcagtaaaagaagatttaaaagtaattgatactacatattttcgtctagacccaataatttagaatacgaacttatatgtgtcctatttaacatattaatggagttttacatatttattcagtttatggtacttaaaaacataaaactttggttacttatactgccaccgtttacccgaattacattcaatcaatcccattgtgagcaagcaacacatatcatacataaacaaaattcacaaaagggttattgaatttgacaaaaaaaaagtgttaccttgccaccatgtttcttaagctcagaaatatcagcaaagtatcctctgttcatttcgtctgcactgccatagatatatcttaatacatgtcatttatataaacaaacaaaagggttttgagctaaatagaagataactcacagccgagctcgttctttatcgattgcatctttgctcccaagctgataatgagtaaacaaaaagattagcagaaaatattttctgggtaatcaaacaaagagagtaaagtttaattctttaccttgtaaaaatcgaagaagcgaattgaggtcgtttgaggaaagaaatggtgggaaaaatgaggagaagtgtagtaagagatgagctcgttcttgtctttgagcttcaataggcggtgggaagccattagagaagatcgagtcactcgcttgaagcttaacatcttcttcttcttcttcttcgatttgatttgaatctttcggaagatcagtagattttcatatacggagggaggagtctcatactacattgatgacgattaacaaagatgggccttgccccaacgaggcccaaacaatctccttacatgaggcccacctgttaagattatgtcatttctgggtttagaatggaaacttaccaaaatattagaatttgagttaattttta

SEQ ID NO: 36530 - DNA, 6248 bp, Cannabis sativa
  modified_base (4554)..(4555): a, c, t, g, unknown or other
gaatgatagagatccagaatatacgaagaacaaatttatttttccaaaaaaataaaaataaagaacgtgatggaacaatacttgaatgtttcggaggatgtggagctcaaatatgaactccattagtcgttcatcgcgagaaaaagttacttggctgccggacgaagatataaaagcggagaggaaggagaaggagtggcggaagagagagaacatatgtgagaaaatatatcagacctaaaataaaaccgtaaaggggttaaaaaagggtgaaattttgattttttggtgatcagtcaaataaggcccttgctccaaagtgtgataaaagacctatcaggggcgtgtttggctagtgagtaaaaaagcaatctttaacttttttttactgtaattttttatttttttagtgctaaaccaaacatggcccttgtgccttatacaaaagtggggtaaaaactatcaacatagtttttatcccactttttatttttttaagtataaaaagtgggataaaatgtccagtttctagtagtgatcattcttctcattgaattgctcatgtaactctgtccaaattttagttgcattgtcatgatacattatgctatttgtaatttcatcaaaaatggcatgtagaatctaagagataacaatgttcttgcatctgcaccagttatcataatcttcatgatcgtcattggattgagggagcttcccattgatgaatttaaccttgttttgagcaaccagatcaatcaacattgctcttcttcaggtatactattctcactacctttgagaattttcggaacaagaacaacgcctggattatcaccattggaaagaaaatatggattcaagagatcgttggcgttaatcgatcgtgaattttcaccaaaaacatagaacatgttcgaatcattataagtatttttagattcacgatttctttgagtctgtactcctccacctcaagtctgggctcctccaccacgttccatgaacaacaaacagaccagaacaacgagaagagaaaggagaaggagaaggagcgggagctcacaacagtggcggctctgataccatattagctcataagagcaaaaataagaaaaagagagaacaatcaattgtatttaatgaattgaattagttacaaaagtgtataatacttttagtagccgagattacaaacaaactcattcaataataacttggacaactcactacacataactaactattcaataccaagctatcttgataatataacagaaaataaattttagttaatcaaacaaacataaataacagaacaaccagaaccataacacccaactaacttagccacatgtgaactttctacattactacgatatattcaaacttattataaataaaaaattcttaaactctacataaatcggtactctctgatctaatttcataatttgtgtttatatataatttaaacaattaatatatcattcctcaccaaaataataataataataataataataataataaaatactacccaaaataaaatgcgatattaattttgtaactttatctattaaaatcagagaacacgttaattaatatatatgataataaacataacgaaacaaatcaaccttcaaaattatatgatatatttgtagtctccatcttcaaacttaattaattacacgtgctttccactataatgacactatttaataatttctaacttgccttcttattcgatcaacagtactccttttaagccaaatcatcgaatatcaaatgttaatatactatcaaatcattattatataaagaccgctaaaaataatttttcatgaactctaatatagttttcaaaggacattttcaattaaatatggaagcctattctaccaatttaatacgtacacaagtaattatctgtaccaatagttatgttatataacaacctctttataaacccatctcatatacctgatctccctaccaccgaataaagctagataaccttatcagttattatatgatttacatattttgtcttcacaaatattctgaaaagaccttcatcaacatcaaccatgaaatctaaacccactggtacttccaggcgtagcggccgccgatgcctcataatctgctgcatggcagcggtggcctcgattctgatcatcgcggccgtgttcaccgccttgtgcctcactgtcttcaagccaagagaggccgaaatatctacccatttcgaagacattaacaactctttctcaccaaatataacatcattgaatgttagtatagatgtgatcataacaatcgataatcgaaagaactacggaagctttaagttcaacaacgccatagcttatgtttattaccatggagacgttgttgctgaagctcaaatacagcataacctcgtccctgcacgtggcaaaattaatatgacttcttctgcagattttatgatgggaaaattaatatccaatccgaattttgtggacgacgtcgtttctgggagcttgcatttgacgtccacatctagtttgcatggaaaagtgattttgtttaagattcttaggatgcatgctacaacatttagctcttgtaatatctcgtttaacgttaatgatagagatattcaaactacgtgcaactccaaaatcaaattgtagtgttagatttttttttttcttcatattatctataggaagaaaatgagatttttttttttccatattttgtttaattaatattatttagctacaaactcttgagtaataaaggaatactatttttaatgatagatttatatgtataagtatatttttcttcttactttacttttagtgtcacaaatatttgttatgattaaaattaagatttatcaatacaaagaaagctataacctttgatggcgagacgaaacactggcaaacacgattaccagcggaaaaagatgcctgtcataaggatgtactatatttagttttacagtttgacagtgagcaatcttacaacaatcatgagataaacgaaatatgagatgaatggtcaatttttgtgaagtctaatatattgaaggaatgagtacatggttattactttacttttttttatgatacatgtaggatatagttatatattttttttgttatgacgtgtaggatacaatttttttatcgctacttttggctatattagttttagtggtatactttatagttatattaattttttttggttacatgaaaattgtcattgttattatattacaaactttaatgttagtgcataaaaatattgttatacaaattaattctaaaatctaaaattttaggtggagaaaattatagagaaatttgcaaggaaaactctgtaattttctcttacctacaactatgcattattttgtaaccaacacaaaaagtagaaagaacacatatttttgtgtatatatgcgtcaaactgcaactgacgcaataaatcaattagcgtcagttatagtttgaagcaaatatttttacttgagcttagaactaacgccaatagtgttgtactatatgcatcggttctgaactgaagtacaaaagtttttgcttcagctagcaagtgaagcaaaaaataagactatttgcatctatagatattacgtcagttttaccaaccgacataaattcttaatgtgtcactttaaaattaaagcaaaaatgcatttttgtaatagcgttgtttaacaatgatatttgtggagggtgactctaaaattgttattgattgtttgaaagaattatctgagttgtgggaaatctatgcttgtgttttgaacattaaaagcttttttttttctaagtttactcgctttaattttagttttattcctaaagattataatttttgtgctcataatgtcgtaaaatgggaccttgttaattgttgttcatgggagctaaagctggataatatttcgggggatgtgcactataatgatagactgatagtgattggtattcttctttgtaacatgttgaatttttttgtttccatcaaataataattataataatgatattatgattggtagaattaaaaatatttttgtaatttgctattttgaaaatatataaattatttcatattattgatttaaattatttataatttagtatttttttttaaaaaaaaattgagacatgttcaacaaaactgaactaaaaaaggattctcattgtgggtcccaatagcacgtccatcaatattggaatagaaaaataccacttttatgtccttggataacatgtccaacgcaaaataaatcggaaaaacttatctaatcaactttgatggacataaaaagagatttttataatagtgatttatgaatatgctaattaatgttatataatggcactacaaaaagttgctatttttagtgataattttttagtcataacattatttttttgtgactaaatgtgacttttagccacagcaaaatgttattggtaaaataacatagtatttagttacaagttgtcactaanntagttttagtcacaacaagtattgtgactaaaaatatattgattttgactaaaaatacatttagtcacaataattgtaatttttatgactatacctttagccacagactttttagtcataacatagaaataataatttataattagttacaattttttttacttttagtcacaaggtttgttgtgactaaaagtaaaaaaaattgttgtatgaatatccaatctcaaatccatatattttttcttaaacaaagattaaacaaatataaccataactttaaatttttgtatattcatttgacattattgatttcttaaaaaaaaaaacaaaaagaaaaaaattaacataattgatcactctacttctggtttataggctaacaagaataagatgtctgtttattgtttgggcttgactaaggtggatgagtagtttattttggagagcttaattaggttttattaaaagtagtgtcccttttaagcatctcagaatctcaatttacttaaaaaattcaaaattagagtgtgataccatatcattgatcagaagatgattgctagaattatagtgtggagctctagacacatctcttatatatgttgggctatgcactctaactaattataactctgttttgatggctattcatacttattaggcacaattactaattattctgaaatatatttttaaaatagattagtagtatttgtatagctttcttctgaaaaatgcttatacttcagatgctcctgacttattgcttggaatgagctatgtttaccaaaagacttgggaggtttgagcattagcaataagcaataaaatattggtgctttgggtaggtatttgtgggacattgcttcaaatacagattgtttgtgggtgagatggatacactaattaagtttatcttaaaaatgaggattagtggagttataatgctccaccaggagtaactgttacttgaaaaagatttttaaggtcaaaatatcattaaatataaaatagagttgatggagttttgcagaaaatacactatctttcaactttgtttgaagctttggccgaaatgatccttacctaatgtgtagtttaagtatatttggaatcgctatagttatccaaaatacaagttcataatatggttggcttgtcttcaaagattacataacatggttgtaatatataagcgcttaaataaaaaaaaaaagtcttcaaagattacatactagagatcgaatggtttgttttagagtcttaacagaggatttctgtttgttttgttaggaggaaccacaattatatttttttaattgcagatattgcaataggatggctgatgttattttcagatagctttgttttcagaaaaaacatagatctcttgaagtgtgtttaaagaggactaaaagagccaatcttactaaattctgggtaaatttatgtgtaaagtataaatgctttagtgtaatatatttgggaggctagaaatatttgtttgtgggaccaaaaaatgtatatatactataaaaagattaaaagagaagtgtattataggttttctcattttaaaaaagagaaaaaaaaaattaggaaacatttaaaactctctctctctcaagggttaataatatggagaaaaattagagtttctcgttcctaaatttatagctatcgaccgagattg

SEQ ID NO: 36531 - DNA, 6474 bp, Cannabis sativa
aagaagtaaaaatgatagactttaaaaaaaagagtaaaaataaaagaggacaatataaaaagggtatagaatgtaatttcctcactaaaaaataagtgccacagtaaaaataacaaaaaatggttatttttttgtaagattttctttatttttcgatttttatgtaaatagcccattttctttaacaaaatttgtgttgtttgattgttaaaacccaattaattaattttgggctaagcccaatgagacttcctagtttgcagagagagccctttttgagtgaggcacatatatggacctgggactgggcctgggcctattttggaagcccaaatattttgtaaaattatttattttattttatatttaaaaatgattttcttttcttttcttgtcgtcgaggttactggaggagactcgtggtgcttttaggaggaacccaactgatcttcttctcttcactctgatctctccatttcttcttctcaaatcgattagggtttcctcttccaactctctcaggtaattctcttctcttatattcctcattttctttacattttcccttctttattacctgattttctttctttgcgctttaggtttttaatttttgttccatttcgtgtttgcagctcacaatgtcgtcgaagtttgatcttccacccaaaggtggcttcagttttgatctttgcagaagaaacgctatgcttttggagaaaggtttccgcccaccaacttatcgaaagactggtactactattgttggtctagtttttcaggtacactcatttttattgcattttttttggtattgtctttctcaattagggttaatttcatttaaatgtgtaacttaagaactgttttcgaaatcggctactttaagaattttggatcgatatattcgtggttattcagatttttagtgtaatagatttgtaaatatattattgaattataaaaaattcaaactatatataagcccaatttttaagacaattggttttgatttgtagcctagggtttatcatttcaagaagatacagttgtttatgtttgaacttgcatgccattgttatttttgtgcttctgaatgataattttactatatatattctatgtatttgcaaactacatcttaggccgcttcaataatttcgaagttgacagctttgacgctttatgcacttatagttttgtcttttccatcttttcttcaggatggtgtcattcttggagcagatacaagggccactgaaggacccatagtttgtgataagaattgtgaaaaaattcattatatggctcccaatatctactgttgtggtgccggaactgctgctgatactgaggcagtaacaggtatatatgtgactgtatgaagaacatcttacaaggcaatttgtgatttaatacgttacatgtgttatgtgtaatagttttctcacattagaaaatgttaagttcataacctattccccagtattgtaactttggggatccacttggtggtaagacaaacaagtggtaaatttcatgctttgttccttgtttcataactctaggtttgataataatagagtttctttgtcttctaaagattagtgtttagtggtataacaattattgaagggggaaattactttgggaatcattgtttatgtgtttgtgtttatgtagatttggtcagttcccaactacagcttcatcgctatcacactgggcgagaatcaagagttattactgctcttaccctacttaagaaacatcttttcaagttgagtttttttcattaacattttcaaaatcaaatgttctcctgtttgtgctatttttctaactgctaatagtaatatgtttttttagctatcaaggtcatgtctcagcagctttggtcctcggcggtgttgatgtcactgggcctcatttacataccgtaagttatagttttcagactcttaaacagattgttatagttgtgcttcacacactatgaagttatgaaaatgtttgcatactttggcagatctatcctcacggttctaccgatacattgccatttgctacaatgggctctggttcacttgcagcaatgtcagtatttgagactaaatacaaagaagggctcactgtaagttagtcttttatatttgaaaccttgtgtgtgtatattgctggtattcccttgatactgttagaacataaaattttattaacagcagtgattatcaatggaaatctattaatctaatatacttacagatgctttagtgagtttaacatatctttgttcttgttggtatgtgaaataacttctatgggggtaggcataaatggtgtaaaccttttattttattttattttatttttaacctgcttgctctaatggtgcagagggatgaaggagtgaagatcgtgactgaggcaatatgctctggtatttttaacgacttgggcagtggaagcaatgtcgatgtttgtgtaataaccaaggtttgttgttttcatcagtctatcatcatttaaaacgaagtattatcacgatgctataagcttgacttcttgtcacatgttcagggacacaaggagtatttgaggaaccatttgacgcccaatcctcgcacctttgtcagtgaaaaggaatataaattctccgagaagactggttagtgacacaaacttgaattggtgtgtttatgacctaaagtccctgttagctaatattcaacaattgattgaattttgcagaggttcttttaacaaagattactccattaaaagagaaggttgaaataattgaagtaggggattcaatggaagagtgaaaggtgtggagaagcaaatgagcatttcttgcaaattctaaagatggaatatatgaactcgtatttctttccttttgtgttcctcatcattttatctagcatttacatggtcttttcttaatctggatctctcagtacttgtgggcaaagaaactgttgaattggttaatggtactttgttttgtagtgtcaaaactcaaaatcaatagaatgccacctataatctgcctattttttttttttattgatgcttaaattggcctacatttgaaatgttttaggtaaaaagtttgcttgcttttgtttttgttgttgtagtgataaaattagaagttgaagccttgttctcactgagaattgtttcacatggttggttgtagaaatgggccattgattgcttgtgttttgtccattgcttccaatggctttttaaagaaacttgaaaaagctaagatggtaattgcaacgtttaattttcttctccaccatcacactgattttttttttctttcgttattactatttcaattatatggataaattatacatgaaaaagagaaaagttaataagttctataaaattaagtgaaatgtgtttttatgatattttattttctttgctgttttatgtatccttttgttttgttttttttaatttgttaataaagaaactttataatttttaattttgtcatcattaaaaaataaatatcaattttactgttttgaccaatcaattattattcaaagtaaattcgggtttattgatatgttcattattaaaaaataaaataaaggtaaatttttggccaattcaatttcacttaattttcaatgctctatgcactacaaaccatagaaaaaaaaataacaaacacgtaacataataacatataaacaaataaaaaattatctttctttaattttttttacagtttctaaagaaagaagaaaaattcacaattatggattacaaaaatatttgttatgttttttaattgaaaaaaaaaaaaaataacaaacacgtaacatatatttttttttttgacattgggagaaagatattcaaatttattaaagtgtgaaaccactaagctatatgtatggccacataaaattataaacttttgctagtagaaaaactgttacctcttaatcttttaaaaaatctagatattttagataatttgccaatgtaaaaaagtaaaaataatctatattatcgataattaatcatacatataaaccattatttaaattttaatcaccaaattgtatcatttaaaaaaaaaaatcaccaaattatgtagctctaagctatataatattaaataaactacatacattgatgaaaatagatgaatactataaaatttacttaaatgtgtcaaaataataaaataaaaacaatgggctacacctcaaatattttaggaaaatctaaagaagaaaaggtgatataagagattaaactttttctaaaaattgaaaaatactaatgacaaaaccaaggaatgaaaaatctttaggttggatgaaaatttagactgattctcccatattaattgacttattctatcttttgttgctcccttattcgtcatatttcattacctgaaaaataataactcaaataatttagttatatattgcaacacaaaaaaaaattaaaaaagaaaatataaagaagaaattgattataagcaatacccgattacaaattgggcatcgatcgcttctttgctcccattcatatatacatgataaatgaaaatggtgaaaacactttgttctaattcggggattttcatctgtgtattctgtaaaaataaaaatggcttgtcacttttttttagtattgttaaaacatatgaatatgttattatgttagtaattatttttaatcatacttacaagaaatattcattaaatttttaaaaaatttcgaataaatttaagatgttaaaataaacattcaaacttactaaattttaattttgatatataaaaaaaaatgattgcaatttatacatttactaaaagtatgtagtgtagatagtgactaaaaacaatcattacacaacaatttttatgtgatttattgtagaaataaatgagttccatgaaattttaccttcaagacatgttggacattcttcatctcctttttcttgttgtacttcatattcataaatattggtctctgcaactacttcagtcataggcttgctctcatttttcctagaatcttggtcatttgtattagtagtatgtttatttttgtcaaataagggtgagccctatagattatatacagatttaaattaatatatttttcattaataataataatgataataataagcaatttctcaaaattaactttgtcatataatttttaggttaagatatgtgaaaataaaggattaattttatattaataaaaagaagcataattttgcaaacctccaaattgattgccagatcatcatcatcatcatcaaaacaaccaaagcaacataaaaatgcacccatgactttaatctacaaatcaaatgaaatcagagttattctacaatataagttatgaaggggttaatatttcgattgattaaacttaaaaagaaaaactcatttaaaaacacaaattccttaattattaaaatttaatttactatatttaaattgaatttgacctagagtgagacaaagtcagccatgaatatgtgtataactagaagatagatttataacttaggtggaagaaattactcgtgtttagaaaatttaacaaaattaaaaattattatctctaaacttcttaccaaattaaatgagaatgagaaatattgcaggaaacgtatgaagaacaaagaaggataaaattattattataaatataaatgacaaattcaattgtaaagagtagttttatttgatgatatggtaaaaattaattagataaatctttctgaaaatcaacattacgataatgaaagtatgagaaaaatgtatatttataaaggaagacattattaattaatatatagaaaacttaacaaaaatgaaactacttaccaaattgaacaatgtttacacctcaatatcaaagaaggagaaattaacaactattgcagcagcaactcgatgatgaagaaaaaaaaaagagaattgttagatacttgtgggagtttcttcatcaatatgtatatatatatggtaagtaaaaatagaaataaaaataaaaagaaatcagtattaaaatatttctattcaaactaggattagttgcccaaaagatattataaattaaaaaaagatttgttatttaagaatgaaaaataaaacacttattttattaaattaaatttaaaattcggtgttttgcaaaaaatgagtgatatcacaccttaatttaagctaatgctaaaaagttactactccattactttttttttttcttttaaaaaagtgttatattgttattaatacaattaaatatttatcacatatggtgtcaaaaaaaatatttatcacatatattttaatataataattttcaaaaaatatcattaactaattatagaattacacttttagggctcgtttggaacgccgtattaagtagtattgtattgtattgtat

SEQ ID NO: 36532 - DNA, 5429 bp, Cannabis sativa
tattatatttgtgtatttgttttgcgtacacacatatatacaggacaatatatataatatatgatatataaaaatgttaaaagagactagttcaaagagtagctgaggaagaagtgtagaataatatgaagtgggccgaagccattgatgcacatgcagtggcagaagaacctacatgattggaactgcacgtctgcctgtctctctcctctctctctcacataggaaaagatagattcttttggagccaaagggcaacaagaacaagaggtatggaaggtggagcacatggagtgtttggagattttcagaaatacaaagaaaaaataaaaataaaagtttaagagggagagagagagatatgagataaggactaaaaacaaaagccaaaccaaaagaaaaagttcaagagagagctttaagtaactttggaatgtctttttttttcttaatgatttctacattcatggatgaaaaataccgaagagtaacatgttaggtaacaaatgatcgtaagtgccaaaatattgtaattttttttaaagggtattaaaaaaagaaacatagaactaaatttagattcttcacatcgattttgatttttttttttttactgaatataaattctgatctaataagttgtcgttattgttggtttatgactgcatgattaatatactatgaattagatcaatcataataatgttgtgtaactaatgatattaacctgagtcaaaattctcttttatcctgccattgttttcgagtggacaaaagaggtctacccaaacaagctcacaagaaggaccccaaatcacgtgcttagaagaagtcattaggcttggccactagaaaacaccccaagatggccaagtgtgtctaaatttcattgcttttaaagggcggtggacctaattctgtaaaggcagttcggaatacttattcaccatttctatttgtctttaggcatcaatttcgtatttttaaagcacaaaccaaattagcctatttgtttagtactcattaattttggagcctttctgtgtaaagttcacatgcttaacgaatatacatgtgtagtagttatagatagtaaagaaatttgatcaacaaactgataatgatacaatacaagaaaatcatgttagtggtaatgtgtgcacaggtgaaaagtaacataatcgtttggtttcatacgaacacgtggtttacattaatgcatggaaatggccaacataaattatccatcaatacatgaccttgtaatactagataatgaatgacatgtagtgtgtgtagtatttaggatgctaaatgctaccatttaaagaaaaataataaaaaggaatcaaaagtataaagtaactttaagaacaaagaaagaaatataaagggtgaaaattcaataattatagccataactttattaacactcattattactgccaactaataagtctaaagaaagcataagagggaaaggcacagcaaaactcaactaagagattgtggtgtttactgtacataataagcccttagtttgtaggctcaccactgtgtcccttacagcatcttctacaggggtaaatactagacccaaatctattagcctctttgctgcatctttgctatcctttaagcctggttgggtttcatcagtaaacctgcaagtggatgcaagtaaagacataataactgtttttaaacccaaataattcaagaaaaaccctgctgttttaaaaatgtatttttggatccatatgatgttgtattatgcagagagtttgacaaaaactgaatacaataaattatgcatgtatataatattgtatacggtccaaataactgtactgacagaagttccaaaactgataataccaatgataacttctactttgtttttaatgtatagtactgtatgtctttggtaccttcaaatttagacctccagcttgtcctgttcccttgttacatgccttgccagctaagttttctctaatttgcctagaagatttttaaaatctaaaacttttgctagtaaaatctacgatatattgaggattggaagcattgttttttttttcccttgaaatcaatagggcatcactagaaagttaaagaagtactcttgtgattattgaaaatcattatggaaaaacaatgtcatgatatatacatattatataaattatttatatccatattatgattgttatgttgggaccttcaaaagggcccatcaaaattaagtagatggacaattagtgtagagagtctgcaatctaggaggcaaaaactcatgggatctttaaactagttgaatgagtcatttcaagatctacatgtagttctctgattcaggtaactatgatgtgtaaatattttaccttatcgatggtcaaatcaaccacaggatgccaactagttgaattttgtaactccagttctatgtgcactaaaaaatttgtgtcatatttttaattactatctatagatattttttatattttcctatggctaaataataattctaatttttgttcacatgacggtttataatttaattaagttactgatttttcataattttttagaaaattctgaatgtttggtgtgattttatcgaaagaaagaaaaaaaaaaacttgtgtgtattcatacctcattattcatgtgtgagtaattttttgtgtttatattatacttgtgtgtctcaaatgctatgtttggtgtaattgttttgaccaataatattcaaaatatttgtaagtcagcaaaattaatctactcaattcaaatccttcgaaggaaatgcaatcataataaggaccaaaaatgtaataagtgaagccaccatcattgagttaacaaaaactaaacaatgatggtgggattgggcggcatcatttatatatgaataaagatcataaagattttcattcattgtgaagacataatggatctttaaaacccaccggtgcaccacatgaagtgcgatcatcacagtcacctggtataatcatacctcagaatggagagtggacctcaaactatttatgtgccacaataaatctccaacttgctttttcaagaagactagactacaagtttatttactaatttagttggaacccaagtctcaaagtttgggaggtcagtttatccatgttgtaagtgcttaggcaagtggaatatatggcagagttggagtccaatttccacgcatccacatttttttttcttttttacttcctactgtagcgaagagtgtataagaatcatcaattcattcttagactacaaggcaggattgtcattcccctcatctacataattaacttaagattttggaaattgaagtaccaaaatgatatcataactttcccttaaacacccccaccacccccatcattattacatctttttaaggctcatcaacagccaatggtgacaaaatagattcaagtttcagcaacttcatgatagaaacgcacgtggactagcatgaaatacactacagtaccagctagttggtatatcattcattaacagagcacagcagcacatactaaaacttccacacaaaatttgggcagcagaagaaactaacctgtgaacaggaaactgagggaagagtttggagacactctgggcgaaatcacggaattgaaagataccattggtgcataggtatctaccagaagcctcaggcgtctcgaagagcagaacttgtgccttagccacatctcgaacatgaacagctccaagccagtgatactcttgagtgtcttttgagccctgcagcaactgaaccaacactgcacagcttgcgttcagattcggctgcagcaatgggcctaggcacgtggccgggtggatcgccaccacgtccataccgtgctcctgcgagaatttccacgctgctttctctgccagcgtcttcgataccggataccatttctgaaaaagataagaagaaagggctcaacccatcaacaatgtaggttaatataaaataaagtttctgaaaactctacacaaaaacgatatcagaccttaataagagccaccctttaagaagaagaaaaaagaaagacattgattttgtcgaaggcttaacaattgagtcgaagaagaaaatagtgaataactgaataaatcattaaaagaaagaagctaaaattgaagaaaccaaacacctgacgcgacttgcagtagtcgagatcggtccaggaagactcgtcaaagggcttctcagaaggccaagatggattaggaaccatggctgatattgaagacgtgataaccacgcgcttcacattggcgtccaacgccgctcgcaggacattgattgtgccctgtacagcgggtttgaggagatcagcatcagggtcacgtgggtcttcgagggtacaaggggatgccacgtggaatacgcctgagcagccacgcacggctgcggagatggcatcggaatctagaagatcaactgggaagattctgaggctgtctgcggcggcgccggggagagagaagaggtgggacgcatcggagccgggaaatgtggtggcgtggatttgggagtagccgtgttggagaagggttttgacgagccatgagccgatgaaaccgtttgctccggtgacacagacggcgggcttctcctgcttagggtcgattggcattggatcactcaaaagtgtgaacttgatgacgtggattgttatctgatgtgatcaaagattttttattttttttttagtaaaaactgttattattaaaaatgagctattaataacaagaggtagattggagagggtttctcctaactaaatatcttcctccaatctaaaagcaaatctaactaaagcatggggagcatctcttttaatatgagatacttttactctacaaaagagaataaaccataagtaatatcatctttttttttttgagaaaaagcgtttatatccataagtaatatcatctactaaattatgaaaatgtattataaatctaatagaagacatgtgattaatagtgattgcaacgaaaagggaatctgtctcaatggaatttatttgtagctggtgctcagttgcccatttcacactatagaacatagcagcagcctccatttctttgggagaaaaacatccacggataggcttagaaaaatcagtaatgatagagccttagtggtcacggatgagagttccaacacctatgatagcacctgcttgattgatgtgatcaaaaattaatactacataattgaaggattttttgaaaactataaatgtttttgtaagttagttctcaaattttatttttttttggataaattagttcttaaattatataaaagggaaatttacatgtggcaccttaattcacattaattcacatgtaatttacaaatttaacgt

SEQ ID NO: 36533 - DNA, 5297 bp, Cannabis sativa
tataatttttattttcctaaactagccgaatatcgtatttggcccacaaagatagtaaagtacattagaaatatatctatttatttatagaaaaaaaaaaataaagcattaaaaaaaagggcggagaaagtgaaatatggaaaattatataaaaagacaaacggaaaagtcataggatcagacgcaactctagctctgaaatttgtctaaatctgggtttgtgagctaagataagtattgcttggttgaagttcgattatcactcgctataatcttgatttcttgctaagtttctgcattttcggattatctgataaggtttctgattttgacgtttatttatttactttatttaattatgattttttaagatttaatttgctcggagagtatgtgacatgtattcccattgaaaatttgaaactctttcatttttttttttcatttgaaccaatactaaatcaggtatatttcggtttctgatcaggtatttaagtgtaattggaagatccgtttatgaattctttactttcagctggtgataatattgtgtagttggtttttattttaagttctctcactcgatttgtagctgagattatataggaaagtgatttagtgatacagagaatatggttgtaatcggtttatttgttgttaaagatgagagaagagacccatcactcgattatctatgttatttagtaattaaaacttgggggagtttgaaaatatgatcattttttgtttcctctttcgaggtttgagtagcaatgaacaaacatttgttcttttgtttttcttcccgttgacatttttattatggaattttaagtatgtttttctatgctgattctctgggattattggttggtttcacagtgatcagataaaaatggtggaggagaagtctaatattgcaaaagatgtcactgaagtaagacgctaccgaaatttcattactaactctgctccatgttgatgcttaaatacaataataagttgataattgtctagctcacaatggaaaatatttgtttttctttttttgaattttttagttgatcggtaatacaccattggtttacctcaaccatgttactgctggttgtgttggtcgagttgctgcgaagttggagatgatggagccttgttctagtgtcaaggacaggtactgtatcgagttttatttggtcttcctagatttttgtagcgtgctttatgatccttccagcgtaatcttgtttgggatgatttgatttactgagcaagttggattttgatttgaagatacgaaatgatgaaattcctatttagtactattgtttcactcactaatgttttcagaagttaaaaggttactaaaaatcaaagggacaaccaggccacagattgaattaacaatggaattgaatataaccttagaattatgcacggattaagttaattaaattattactattctatctccattgcaggatagggtatagtatgattaaagatgcagaggagaagggtctcattacgcccggtgtggtaagtatctactttgtcattataattgtgctctataaattttgacatgacaagagattccatttatatgctgcagagtgttcttgttgaaccaacaagtggcaatactggtattggattggcatttatggctgctgcgaagggctataaattaataattacaatgcctgcttccatgagtcttgaaagaagaactattctccgtgcttttggagctgagctagttctcacagatccagccaggggtatgaaaggagctctttcaaaggcagaagagatagtaaacaagacaccaaatgcatacatgcttcagcaatttgagaaccctgccaaccctaaggtttacttattgttaatgttcattcatatatgacaagctgactgcatagcttttctcactgattttttctctgtttagattcactacgagactactggaccagagatttggaaagcctcgggtgggaaagttgatgcttttgtttcagggattgggactggaggtacaatatcaggggctggaaagtatctcaaagagcaaaaccctgatgttaaggttggtttgtttgcatttagaaaataccagttattcaaatttaagctttttcttgcttttctggtattctttcatatcatgtcactgataagcttcttgctccttatgtttagctaattggtgtagagcctgttgaaagtgctattttgtccggaggaaaacctggtgagccatgattccagttaatttattctacaaaactcttctttgtttgtcatagctctagcagatcgggaatcaaatgtattcaatattttgttcttttattgtgaatacatggtgatcccaagtctctctaggggaagtaaaaaatacatctattatcctgaaggcaaaagcaaatagcaggaaaaaatgggatgtgttatctaaaataacttgtattatttcttctttcaaaaaatctgctgttaggatcccacattgactaagtatgggattggttggtggtaataactacttgggcactcttctctcctagcgtagctttttggagtgtgttctacccaagtggttgtgtcattccccttccgattgtggcaaacaactttataatccttgctgaattcattcgatttccagccctgattttttcataatagctataactattactcttatattcgcttttgcctaaattatgaaatgaatatatgtgtatgtcaaaggtccgcataagatccaaggaattggagctggattcatccctggagttctggaggtcaatctaattgatgaagttgttcaagtatgtctcagtgcttctatttgaataaatttattttgaagtcatggaatgctatattttgttaagtttgattttggtacataacgccttggcaaaaatgttacaaaattagtatttgattgtaaaccaggcatccagtacacagttgaacaaagatatgcattttctcaaaatttcatatgttactgcattctattttgacctggcccctttcaagatagatagatgtagttttcaaattaaagtgattacttctgtttggagtaaattacattgaaatcatgcattatcacatttaaataggttgaattatacattatgcaaaaaatgtgaaaaagtagtagttgatgataaaccatcaaatttactattgatcaatagaagaatattcattttccgttacaaattttatctgtcatagtttggtttttctacttggatccctttcaagttgatatagtgtactttttataaggaagcaagcaattacttgaacaagtgcatgtgttaaatactgtaacgggttatgatatgagtatcttttgtgtccttgttgtcatttttgtgctgaacatggcattgccacgttgaatttgattttggtagagtttgcatgctgacctttaaagttccccagtgaacatcaagtttgactagttttttttccccctagattttaggtcatttcttaagcctttgttattcctttcatgtatcattttgactatacttttgatggatttttcggctcttctatgcatctctttcaactgcaagctaatttgttattttgtagatgagactgattcttcaatttctttatactgcaggtatcaagtgatgaagctatagaaactgctaagcttcttgcattgaaagaaggcttgttggtaagtttagtgatctgttggaggaaatgactatatatctgtatatataaaatgtagtttaatttagctctttattctacttgtactgcaggtagggatatcatctggtgctgctgctgctgctgccgttaagatagcacagaggccagaaaatgctggaaagctcattgttgtaagttaatgttgccttatatttcctgtatattcagagacaattcatcttaaaaacttggaattccaagcaagcccaactagttttttctttttctttgagtaactaagaaaataaaaagaatgtttgtttttgtattacatctcatgtggtgtgcagtatatacatcattcatacatttttattatgaccttggactcctggtttttctgctgttcctgtttcatatttaatcacttgttataagctcttaacatttcattctaacacatgaacaggctgtctttcccagctttggggagcgttatctctccactgtgctgtttgacgatgttaagagggaagccgagagtatggttttcgagccctgaggaagtgttctctatattcaatagaaatcatgaatgtttgtgcgcatgaggcaaataagggttgcgaaattgcgttggggatttgagtttgggtgtttttacttctagatagttcttaataaacacgcaataaacaatcggatgagttctttgatgttgtaaagcttggtatcagctgttagagatgacagctgtgtacatgtgaacagtgttaatcgttgctatgaatattaaagaatggttgtttctccttgaaaaatagtttaaatggtttattggaagactagttaactggctaataatattgagccaaacattgccaaactaaattttggaagacatataaaaaaaatggaaaatattggaagactggtaataactggctaatgatattacccaaacattgcataactgtcatgtgtgatgtttgggtgtataaatatcattgctctagttaataattcagtactaattgactagacacaccgctcttctgttatttatttcaactaaataaagatatggcaaacgagaaaaagctgaagacggcagctagtttctttttttccaagagggatgacttaaaacgtctaatttcaatagttatttcgacagaacattttcacagatatattgattaaacaaaccattttcacaaaaagtagtatgttcaaaacgatattagttttccttacaaaaacagtttaataaaattaattatttaatgtacattttccctttttactcccatcccatacatgttttcatcaactttattatggatgagtacaaacggccaggttaaatttactttaggttaaatttacttgcataaagttattaaataacgcctcagaaggagttgaaaaacagctcttctatcaatttcctaaacttttttagatcaacttaagctgtacacaagaataaaataacttgcaatcagctacaatttacatccaagtacaacataattagagacgtgcaataaaatttgaatctacattagagaggggccgcgcga

SEQ ID NO: 36534 - DNA, 7254 bp, Cannabis sativa
gtcgcggcatggcttttgcatgccgcggcccgccctcgtgttttcgggtagattcatgtgcgaactttgaaaatgcataactttgtgattccaactccattttgggagttgtatataccgttataaatcttattccgagctctatgtgattatctgtattttgaatgccatctgtatactttataaatgtgaaatcaggggttaaccctatttgtgtaaaccttggaattgtgactaggattaccggcacttggtcaggagcagccggggatttggaatctctgttattacgagacatcaagtaagacagtagttagcaggtagagttatgtgttgtggaacttatactagaaatgatatatgtgagtaaatagtaactgggattagggttattatccttacctgagcggtttaataggctagggttattaccctagtaatacatgttgtgaaaatgctacgccatgttaaatatatgattatattgagattcagggttatgtgttcaaggcataacttggttggactcggtaactagaaccgagatgaatcgttctaaggccttattgtatttagacgtgtgagggcaacacgtaggtctatgttacatagacaaatgggcatgtgagcgtaacatgcaggtctgtgtcatacaaacatatcagaatgacattaatgtttgtgataaatatgtttattaatatgttatactctcttgctgcgcttggctcacaggtgctctactatgcaggaaagggtaaatctgtttctaatcagccatgagtatgggagctggacggtgtatgtacatgattgggccacactagaccaagagggttggggtctaccattgatgaattttatgactctgttttgccgcttaggtcggctagtggaaacgaacttatagtaatattttgtaaaatatttttgggatcccgacacctgtaacttttgtttgtaaagtttaaattattacaagttattttcattctattgtatttaaagttttatttccgtgctaattttattagtaatcccgttgaggggattagggtttcctaagtatcttgggtagcttgcctaatgaattagggcgtgacaactgctcagtttgaggaccagctgaacgtctggggagacaagtgattgagggtgaagaaaaagaaactgttgatgtcgctttttatgatggcttatgttttgatgccatttatcgtgcttggtcatccaatggaagagcacgatcattcaattgggaagcctttatagagacagaaatcccattctttgaagagtgttgcgattagcgtttcaatgttgatgctcttcaaacaattgactttaacttgaatggtgatgaaccagtggtggaagaagctgtgagggtcgaaggctacaacccgagcatcctgacattcttccttaatgcgccattaaaagagaatgaagaacaagctaaagttgttattgacatagagagcttcttggcttcataggaccttgtcttagtttttttattattctttttagctttttagctttagggtgttagttggttatcctaggcggcctttcaatgtgaataggccttagtaaaattttactagacttgtttaaattaaattagaaatgattcaaacttaatgaagactttattctgatgtttgcttctttgttttcacattatccattactgcttgaccttttaacacttgcacaatattccatgtcttaagaaactcagtcattgggagtaacatcaatatttcttattgttatctttacatggaaatacttataacacaggcatgcaaaattttttgaatgctcatataacatatggctcttgtgtaccataacataacttatatgaacctttcattggtcactttccataccaaatccccctgtgctttcttgatcacgactcttaggaaactgttacacgtgtgagaatccaactacttatattgagattcatgggttggcagcgttgaactgactaaagaaataactaaaattatctcaacaccaactctacaagctttacataacgcttgagagcattgttaagtcagtgagttgtaattgattaatgttaatgaagtaccaaaaaaaatttgttcagcatttatattcatcaaaattaaatacaactacattactatgagctaggttgacaaaaaaagaactagtagttttagattttattttttcatcaaagcttagctgaagtgatccccactgcactaattccctgttcgactagtagaataggggccataccttagcgatggaactcttaacctaaatatgactttgtcgcatcttgtcaatttaagaggtgatcaattcacttgcacaaggtaaagtgaatctcactgtcaagcaagttattttgaagatagttgcttcattggtaccgttgtagatgcacctcgttccagcacgttggtacgagcactagattcaagttgtagtgatagggtgtcaacttatttgtttcaggttctagtgctaaagtaacgacatatgttccttcccaattagatccagtaccctcgctaatttctcattcatgtttaggaatactcgtcgtaacaccatgtctccaggctttagttttctatctataaccttggcgttatagtgtcttgcaattctttactaatatggtgcctttgtgagctcaaatcattctcttatttcttcaattccatccaaggactcagtgaatagttatttattggtttgtttgtcatatgcaagtctctgatgtgatagtggtgtaaggtctatgggtatcatggcttcgtacctatatgttagagcaaaaggagtatggtcggtcactattatttctttagtgtggtaagaccacagtacttcaactagttcttcaagctagttccctttggcttgctcaaggcatttctttgacgtatccttaagagtttggttaacaacttctacttgcctatttgataatgggtaaacgactggtgaaaaactcttaatgcttccgtttccgtcacacaaatcaatataaagatcactgtcaaattgcgttgcattgtctgacaccatcttctatgggagtctgaagtgacaaatgatgttcttgaccacaaaatcaagaaccttctttgatgtgatagttgctaagggctctacttcagcccatttggtgaagtaatctaccactactacttcatattgagctccacctttcccattaggtagtgaacctatgaggtcgattccctagacagtaaatggctagggagattacatacttttgagtacattcaaggcagctctaggtatttttgagatctctgacacttgtcacactttctgacatagtccatcgagtattcagttattgtcggccaaaaatacccttatttcagtatcttctttgagaggctttgcccaccaatttggttgccacaaaaaccctcatttacctcaaccatgaggagcttggcgtcttcttttatgacacaccttacaagtggcatggaatagcctcttttgtacattactttgtccatgatgatgaaatgagttgcttttatcatcaacttcttagcttcattctggtctatttgaagaataccttgttctaagcattgtgcaatcagggtcatccatgatggactactgtcgatcatgaggataggctccaagtcttcattgatgctttgtttgactagtttatgtagggaatccacgtttgcattatgctcacatagtacttgttcgatggagtattatttgagctgggctaatagatctttagctttgcttaagtatgctatcatttttggacgtcgagcttggtattcatcaagaatctaattgacaactagttgtgagtcattatagatctcgagtgattcaacttgctaggagtgcctcttactctgcttcattgtttgttacggtgaactcaaatcaaagtgcacaacaggttcgaaatcttttgggagttactaagaagagtcttgcaccagagccatgctcattggaggatccctccacataaagtttccaagaaggcccattgtccttctaagctgcagcctcagtcacgtggacctagttttcacagaccattgggtcatcttcttcaaggctagtgctttcatcaattaaatctaataattcctgccctttgattgttgtgtgaggtggtaggttatcttaaatcgacctagttctactgctcatttgagtagacatcctgatgcttttgatttcatcaaaacttgtcttagcggttagttagttaaaacctttatcaaaggagcgtggaagtatggtcgtagttttcctgagaccaatacatatctgtaagcaagcttccaaatagggggatagctagactgaatcctaatgagatgcttgctaatgtagtacacggaatgttgtatcccttcttccacatgaatcagagcatcattggctgcaagctcattgatagccaaacagatgaataattcttctccatctatgtgtttgtataggatgggatgtctggctagctgatatttgaaagcttagaaagcttgcttgcattcatcaatccattcaagcatcttgtttcttcctttaagtagattaaaaaagggaacacaattgttggtagacttggagaccaacctactaagtgcagcaatctgtctagtgaggctttgtatgcctttaattcgtgacagtgccctcatatcttgacatgccttgatcttttctagattcgcttcaatacctcttgagctaacaatgaatccaagaaactttcttgattggacaccaaagttataattagaggattaagtttcatttaatattcctataggatgttgaagcattcctctaagtctttgatgtggtcttcagatttctttgacattactagcatgttgtcgacacagacttccatattgtttcctattaattaataaaacatacggttcactagtctctggtatgtaacacctgcattcttgactctaaagggcattactttgtaacaataaagcctaatgtctatttggaaactagtatgctctttgtctggtgcgtgcatgctaatttgattgtagccataataggcatccatgaatgtgatgagttcaaggcctgctattacgtccactagttgatctatttgtggtaggggaaaatagtcttgagggcaagatttatttaggttagtgtagtcgatgcaagtcctccacttaccattcgatttaggcactagaacagggttggatacccaaacttggtagaaagcttccctaattaagtttttatttcgtagcctttcaacttcttccttgaaaggtttggagcactctttgtcaaggaacatgtgtttctttttgtacaagtctaaatttttctttgtctatgttaagggcatgacagattacctgggggtcaatccaaatcatgtcctcatgcgaccaagtgaaaatgtcttgatttctcctgaggcaatccatgagcttctcgctcaaagcctccatcaagtttgttccaatattgacaaccttggtcggatctttcatgttgaggggaagtttcctcgatcggaaaaactcctcagtcaatttccctacaatggaggtgaatgtcatcctcgccttgggtgcacctttaagtggctttaagtgtcatctctgtcttctctatattttcaaccctagaggtctttgttgcttttccagcttttgcagtagaggcctttctcatccccctggtgccaaagcattagatgaagtcttcttggcaagatttaaaaagttttataacacttgctgacaatcccttaatttccaaggagacaagtggtatactgacgagatagctcaaaggtcatataaggctggccttccgaccatcacaatgtatggagacttcacatccaccactatgaatgttgccatgatggtaatttcgagcagtaccgaataagagtggtagttcgatcttaccacaaggagctatgcttgctccactgaagccataaattagttgtttgcatggctctaggtctttaagttacaaacccatccatattagggttttcttgaataagatgttttaagatgctttgtcagcgatcatcaccctttccaccatcatgctttatatttttaccttaacaagtaagggatcgctgtgagggtagctgacatgatatgagtcaaaatctctgaatgtgattagatcacactcgtagcgttgagtctttggaggatgctctgcaacctccaaaacttctcctctttccttatgtcgtaaagacctttcatttctttctaaggcctttctcaaattcccagccaagcttggcctccaatcacgatgttgagcctttctacaactagcgcagactggagaggtacattgcccccaactgtagcttcaggtcgtacatacagtttaagagtagaatgctttttttctgattaggaattttatcttgtctcgcagctgattacacttatttgtatcatgactataatcattgtgataacgacataacttgttcacgtccttcttccccaactctttaaagggaagagatttgcgatgcatcgccattgactggttcgtcgtatagatctcttctcttggaactaagagaataaattaggtggtgaaacaaggctcatattctctcatggacctggctccaattttagctttctttccaccaagggagttaccttgtttcccatcatttttagctctttttcctccactcaaagctccttttttcccattatcctgtgctccagtgtcaagggttggggagtctaggatcccttcttgttatttttgagccctttccttttgtgacaagtttttcaagctttataaagtcataggccctattaaaaagccatttatagtgtaaaatgaattgagacgaaggtcaaaccacaagggactcatctctttaagtctggctacaaattccataacccttctgtcctcgctaagtatttttttcttagcagctgtctcaaagaactgatgaatgtagtccttgaggggtttatcttcttgtttcttcacatcgacccaatcattaagttcaatttggctctatcgtgatggagctaattaatttccaaaagcatccactagatctttccaggaatctcttgatccagggggaagcttaaggtaccaccatggagctaaacctgtcagtgtggcagggaaaattct

SEQ ID NO: 36535 - DNA, 4976 bp, Cannabis sativa
aaaattccgtgaaaccgtatttttattattttttttgttatttttgtacatttgtgaaattaaccaaaagaaaaaagagctacaggccaattaatggattgttgaacaaaatgtaaagaaaaattgctaaaattattcaaaagactcctataattacgaaccaacaaatcgaattctaaaaacatatacaaattactctcaattgcttatacacaaacatgcgtgatagcacgttaaatggtaaaagaaacggtttattattagcgccctaaaactactaagagcattccagtggtagtatttttaaagaagttaaaaatttacacattatttaaaaatataatattttattttatttctctttcgtattatttttggtactcttacttctaaaaacactcaaatatataacactttttaaaaatactataattgtgatttcacatattattatttaatatatttcttaattttataactataataattttttattaaaaaataatgaatagtattatgcaaatttttagaatgacattctcttccctctaagggtataacatttcaatgttttgtcacataatatgttcagctcaccaagtattctctgaagttttaccattagagatgcgccaattaatcatatcaaagaaatccacgtctatataggacaccaaagaagtctcataattaataagtatatatatatacaaaagaagaaagtaatgatgataataatacacatataaattgtactactaaaacaaacaattacgtggttgaaataatcatgacaatatgtagtagtgtgtgaagaaagaaaccagtactagttccggccagtagtagtagtgcctacatacatagatgctactctctcagtctcagccaaaaagcctgtgtgtgtccttgttttgaccgttggaggcatcttgtctatcaattgctgtacaagtacttgaagataaggtacgtacttagaatccaacataagataagatcaattctatatatcaactcttagattctctcctatagcaagctggtgtggtggttaaaataatttctcacccaagatcagtaaaaaaaaaaagttataaacactatgttcggtaggagagacacaatatggggtggagggagagtgacatcttgtttggtacgagagagatgagtgaatatttcccttcaaaatttaaaaatttaatctctccatatttgggaggagatggtagaaaaacacaaatcaaaatttataaaatataataaaattcaaacgaattattttataattttactaattttttttttaattcttcaaacattacacctaacatcaaacaatcaactattatttctatgcttcctactttccgtcctctctaaaactttccaatccatggaagaattattacactactcaatatggttttaatttttttctacttaaattaaccttttttaatgacatttctttttttttttccaattattttaaggtatttatcatgccatgtatatgtaaatttaaaatttaaaattaatatttaatctttagataaattactcaccaaagaactttcatcaagatagttttttcataaaaaaacggattttgattatataaaagtaaaatttatatacaaccttttaagtatttacctattcgacgacaattggttagaacaaaattcaccaaagattttttatgaagaaactaattttttcatcaaaaactaatttttcattaagaaaaagtttttaagtatttttatgatatttttttttttatgtataatgatttatccaatatttttaaggatttttattttcatttgtatatgcccttcattttactcactgttttccctaccaacagagccttaaaagtggcagttgtttgtgtgtatctattgcagcccctatatgcacggtgtcggtggctcataaaaacaacaatcaataataatgaaaatcattattcctctttatcttaattgtctttccactctattatttcttttacttttgggcgtttcatcatcaaatcatgcgaaaccctttattaaatattttcattctgttttttctattttctacaacaaaacatcaaatgactctctctctctctttctgtgggatagaaaaatgaaatgattataagttggtgaagttatttgtttttgctgcattataatttatatatgtttccaagaaaatccaattgcttgtagtgactattttcaagtacttaattatatatatatagagagagaaagaataaagactccatcatatatatcatgtgggtgcaattaaaacaaagatacataataatggtaggacatgatgatgagccgtctcatttaatttgaaagctacatattatcatttccattattaatttctgaattatatatatatagtttttgatagttagttgatcataataaatttacattgaaagaatattaactctcattttggatcccaacttttattccactctttatattattacactaaaaacaaaactctgatctttacatactcttccaaaaaaacgcaagtacgtagcaacttctcctatatatatcgtacgttcagaggattaggtatgcaatggttatggcacccttcatttctctctctatatatatactgtttgacacgtggagtatagtgcatgtatgttgaacctgaaataatcaacataaattaatttaataactataacaaaatatcactaaatatttatacatggcagtactaagtactattgccctataatgcttcgtattggacaaacattgctaaagcatcaacaaaatttactgtgttgggttggcattggtgccaagttgacacatcaattgttaacaaatattttctgacgtgcctaatatacccatttaatcaaaatttatgaaattacactaataatattacatcaacttttattgtttttgacaccttagcaactcttaaggtctagtcttaattcccctttttaacatcccatttcaagctacaattaataacgaacgaaatgagctacaatttattgtcgagagaaaacactacgatttatttatttagcattttatgagctggaataattacttaattaaaactttccttatctaatttttacgtctataagtttacctctacaggcataaagttgaccaaagtctagtctagtgaataattcacacaattgaatttttctcagtaactgtaattgaccaaataaaacatacactgttctctaatttgaagtttattattactatttaaaatgttagtgacaatagaatagagccaaagggctggattgaccatgccagagcagactaggcctagctagtggggtctacactaactgagcttgctcgtacatgtgacacatcacattagctttactacttaaatgagaaattcatcaaaatcttgtcccataccacatcaaacttcatcatcatcatcatctcttataatacttttttcattctcttttctcttctctgcccatgaagaatcttctctgttgctaaaataaggtactctcagatctctagaaacagtgtttgtgtggaattgtttagattttttgcttgctttttatggagaaaaaattgtgtacttggctcatttatatgttggagttcttacttggattattttttgtcaaaccaaaagaaccattttttcagctttcagtttgtgacatgacatgatttatttgatcaaatattaaccatgcatgcagggttaagaaaaagaaggaagaacacataattcttgcaatgggaaaatctccaggaaagtggctcaagagtctgctttttgggaagaaattaccatctaaatccaaacttccaaaggaaatctcatttaatagtagtgtcaagaaagcaacattattaccagagaaagagatttcccctgcatccaaaacggtatcgtttagtgacatgccaagttccatcagaaagggagagaagccaaatgagttacaaacagagaataataagctaaagcaagctgctacaacggcacaatcaattatcagaggctatttggtaataataatatacctacccctttattctgtatgctcatttatctttaacaaaagtaattttgaagtgcttttttttcactttatgcttaaaaaaaaagaacataattagataaatcataacttttaaattttatatgactcttcccttttagttggtgtgtgtggctttggtatttgtttgtgagtgtgtgtgtgtgtggtgtcggtaagaatttaatgtggtttggggcctttatttgtagtgatgtcttgtatatctaggaccacattctgtcttgtcaaacatctaaaattgaacataacgtaattgggtttctgattagttattttcacttgctggattctatttactgttttgtacaacaataacatgatctttatataaaaagaacggtcatttaactaaagagtgtcaaattatttatgtatgtacattgtaaatattattaaagtactagtaggggcctcattatttagtattaaagaaaatataatttatttttttctttcatatataacactttcattgtctatgaggatctagaaataagtttcaaaacagtttctagcgattattcaaaaaaaaaaaaaaattaaaaaaaattgtgataaattctgatataatataactatatcacacacaatcgaaaatgtcatattacagtctagttattgatatttcagttatttaattaattatactgtgtatgattcgatatttaattacaataataataaaatgacacgttaagttgtactaaaatcaatataattcttattgatttgcaaagccgtcttaaacattttggaggccctgttctaattttgaaaattgggcccctacaaaaaaaaaatacaatttataaataatatttttaaatattattat

SEQ ID NO: 36536 - DNA, 2230 bp, Cannabis sativa
attttcccaaccaccagtagcctcacacaataaagacaccttgcttgaagcataaaaaacacatggagataatacaagggaagacgacacagacagaatccaaagatcaaaataaattgcaacatcgattccattccccaatagcccttaaataaaaaagttccttgccccacaagatatttttccaaacaaaagagcctttttagatcgaataatatcaccacaatttttgtttctgaaatacaaaccttttaaaacccaagaagccaaggaataaagacattgtaaattcgagaagtctgtttagctagaagagcctgattaaacaaacgcggacaacgaaaccccatgcctccatctttctaacaaccttaatcaaaatctcacgattcaccacaaaaaaaatcttagacttccagccattaagtttttttttcaaatatgatcacgaagagaattgaataaaccatctttactatgtcctgaaaaacgaggtcaaggtacttctcatgacattccaccccactcacctcaacagctcaacaactcagtcacatgtgtcaaatacatctggtaaaattcccactgtcagtaacccttacactgctgaatttttgtttcctcataacactatcaattatccctttgttactgcttgtactgacccttttgtttctcatattagtggagaataaactttacaggatccaagttttgctgcttctccagggattcatgctcctcctacagctataatctcccatgaaactcaaataccagtgtcatcttcagggtctgttcctattgcccaagttactgaatcaatacaaaccaatgcatcacctgctgctgtccccactccagttgttgctcctgcatcaccctctagattccatctgagattcctgcagctcccacacctgttcctggtaatacacacattatgaaaactcgtggtaaaagtggcatcaaaaagcctaaagtttatctagctactcaagttcctacatctcttcaacatgcccttcaatagaataatggaacaatgctatggctgaggaaattcttgccttgaaagaaacaaaacatataccctagtcaaactacccctggcaaaactgcaattggaagcaataggtatacaaaatcaaagaagattctgatggcagtgtcatcatgttcaaagccagattagttgccaaaggtttccatcaacaacctggcttttactacatagagaccttcagcctagttgttaagcctgtcaccataagagttttccttactcttgctttatctaaaggttgggacatcaaacaactcgatgttaacaatgcatttttcagtggtgaattgcgggaagaaatctacatgctgcaacctctaggttttgaacaacctggctcaccaaacctggtatgcaagctgcataaagctttgtatggcttgaagcaagcccctcgagcatgatttgagaagctacgtcattgtttgctgtcattgggttttgtttcctccaaatctgaccatagtctcttcatcaagcacactcctctttcaatgacattcattttggtgtatgttgatgttattatcatcacaagcaatgatctcaaacttatttcccattatacatatgctctaagtgccaagttttctctcaaagaactcgggcctcttcatttctttcttggtattgaggtgacaactaccccaacaggtcttcatctatttcaaactaaatatgtttgagttcttctccacaaagctgacatggctgaatctaaaccatccaatacccccatgattagtggattcaaactctcagcttttgggagtcctcctgttgataatcctcagcaatatagatccatagttggagctttacaatatctagttatcaccaaacttgaaatctcattcaatgtcaacaaagtatgtcaattcatagccatttctctccaagttcactgacttgctgttaagagaatcctaagatacctaagtggcaccatggactatggcattcatcagaaaatcaaaaacctatgagctcattgcattctgtgatgcagattaggctagtgatccccatgacaggtgatctacttttggatatgcaatcttttttggccccaacatcattgcatggcaatgcaaaaaacagcatactatctctcgaagcaacactgaagctgagtttcgcagcctggctaacactgtcactgaa

SEQ ID NO: 36537 - DNA, 2949 bp, Cannabis sativa
atttacagagacacatgtacaataatcctgggaatcactccaccaaaaacactataaatactccctcaaagctcattaaatggggtcgagaatttggtgttgcataaggcaagaagagaaaatactcaccaagaatattctctgtatttaatacactcataaatacactgactcgtggactaaggctcattaacgccctaaccacgtaaaaatccttctcttaatttcttacagttctctaatcttatattattttattggttgccgaaaacctagatcaacaaatattatataattacattttgaaaatgtaatgaaacataacactaaattattgttaactatttataacatataacatacaaaataatgttataatatactatttaataacatgtaaaaaatgtaatcaaaatcaatacttttaattatatgagttgtcttaagcgttgttaaaatattataaaatgcatttcattatactttttgagtgttatcgtaaatgttttttctgcttataattagtctggataacaatcaatccaattacatagtaattttccaaacacgccaaggtatcatatttatccattatatatgctttgcctcttgcccagcttaattaactgataagttgatcttggtatctgattcccaggaatgaatcgtccactttataaccatatactttcaggtttttaattgagattctaaaataattgaaggttgacaatgtttactgttgctttctggttttgcagtagttttaaaagacgagatcagtgtctaatagcatgcatgttgccaaagtcagcttataacattttaatattaatactgggaatcatttctaaatgtattctattaatatttgtatattcttcagtattcaacttatcatgtaatgactatcttcctcctccgttcatttgctaaaataataggctactcaatcgaacgcggctggctggactaatttttttgtatacctagttaaatgctttctatcttagccaaaaataaaataaaaaacaagagttgtgttgtgttgtatgtttgtatattgtatattttcaggtggcctataaattgtactcatccctttatatataggaaaagaacatatataaatatcgtttgttaagatattccaaagcaaaaagcaaccccacagggagggtactggtccatgacagagaatgcatgtgaatagtcatctataataatgtaaatatgccaaagggttaaagtgacatttattttagagacgtgatcagactaaagagagaaaagaaataaaataataattattaattaaattgagagaggtaggtaagtaattaaatgggtttttaaaagagataaaggcatcaacttggaagcattcccatctcatccacaagtgtgccatcgccacagctgtagtgctcaaatcaaacccaacggtcaatccctttgttttatttcccatgattttgaagtaccgttagtctcaccatatggaaaggcacttggtccttcgagggaagaaaaagagcatcattgaagagaaaaccaaggtgcaatactttaatcatgacagaagcaaaaaaggcaatggtaaggaaggaaaagcatcccgctcaggtagtcctactgatcaaacatctaatttatgctgtaaggcaacggaatttctatgcagtatttgcatgctgtgtgtcctttgcccagtagccatcgcgtggtgctgcatcaagttgccgtgtaagctcggtttggcggttgctcggcgagcaagcgaccgagcttgttgtggatgtggatcagagaatagggttgcagctaattactcttccttttctgatagggattcggatgttataccagaagaatttgaaaagaagatttggctaatttcctcatcaaaatagagttgccgtggttactgagtactttttgagaagaaaaactctccctgaacttgattattcaattgttgtcggccgtttgttccaattcaagtttgtaatgtcaattttatttttagtttagttgtgtgtactaatgatgaatatgttgtttctactctctatctcggtatgttatattgtattagttgaatgtgttgaatattagttgttgagtttgattatcgtaaacaacttttttttttttttaagtggaatgttaataatgatgttgttgtttagtttagtatacatttgggacactttgttaaatgattacttagttacttggttggattgtgagtaataaagtcgattggaaattttccttttttttttcttttatttttgctacgtgaatttcttgagtcatataatagatgatgtctttcaattggaaaaacaaagaaaagtaatgagaagggctatttataaaaatatgaagaagaaaaaaaggataactttgatatatgtatcgcatgcaattttttttacgtggtgaatagagttacacatgattaataaagcagcaaactacaattgatagtgaaacctcctcaaaccaggatagctcatcgtctaatcgaagagcatgttttgccaaactatgaactgcataaatctaatcgcgaactacaagggacaaaactgtccccaaaaatttagacaataaaatttgattgtactaaaaataatattttttttttaaaaaaaaaaacctgaaaaatacgggataaatcatggacatttttctataatagacagtttaggcccaaattttatatttttaccatggtaagggaaattaaacaaaaaaaggaaatgtaaaactttctgtttaaaaaaatgtagacataacaaacagtcctcatcttcttcctccttcgttcctagtcccaccagaacattctcttctctatttttcttctcaaccgagacacgatttcagctaaaaaaaatcatccaagttgtgtaataccaagatcaacaacaaagtgat

SEQ ID NO: 36538 - DNA, 6727 bp, Cannabis sativa
tttagccgccaaaaattcagtttttgtggttaagtgttacaaactgtaaagttcaggtggtttaaccgccaatatccctaattttattgtaaattttatagctcataatcttatttaacttgctttatccttgaataagtttagagtgtgatgaccgagtttaccgaacattatttgagcctttgtgacttggtattggtttttttctctcttaataaaaaataaattctattccccaaaaataaaaagtaggaccgatcatcaaagttgaaaacaagaagagcccaaaaataggcccagactgtccaacgtggccttcgaggtagctcactcagtctaaacaaatcactttcatatctcacccccaaccacctcacgacaaacctacctacgtatatctgaccaaactctttctactatcccctgcttctaccctataataaatttctatgctcctccttttataaccgttaaaattaacgatgcaaagcatcaacggcttatattttaagcttagtgtaagctctaatgcagcagatttacaccctctacagacctgagaacagcctgagtttcatagctacatacaatcgcataacagagagtgtcattacagaactccataagaaactccgctcccctctatacactactcgatattattatattaataattttttaattactccatcctttaaaataataattaattaattaattaattattattaaaaaataaaataataaaaaaaagaaaaagaaaatttgcatttctgacttgtgccggtttcgaagaggcacataaaggcaggaagttttttttagggttgttgagaaagaagaagaagaagagaaaagagaaagctccgtacacacagtcaacaatggcgttctcttctctgctcagatctaccaccggagctgttctgattgaagcttctagacctgaaatctttgcgcctcttgcttcttccaatccttctaaggtatttttccctttctctttctctcatcttgataatctattgcttaaactgtttgatcaatgttagcaatcaactgtctcgttgctcatttgatcgaccgtttattgttatttcgtctagtcgagcttaacgtgttaatttatatatttatatgtgtgtatattcgtgctgtgtgcgattttcttttatttttctcaaagaaactcctatcggttatatattgttttgaattttgttcttctattttgcgatgtgagcttttttagtttttcgattattgttattatattatacacaccgtttgatgtttgatttttgaacaaaaaaaacgaggataaatgaaagtaacacatatctgtactgttaagctcaaaatgtttagttaatttgctcatgtaaatttcaatcaatttattttttccatacataaattttgcatttgttctaattcctctcatgttaaaatgtttttgtcttattatgatatgtgttagaaaaacctttttattaatttgttagaaattcgtatttaatcttttcaactttttttctgttttggctttacacggacttcattatcctccacacacatataaatatttaatatttattggtaatattttccttctaattttttttcttttcaggcatcgagcatttgtttcaatcgcaacccaaactctgcaagatttcaatcaagtttatttggcactgctgtcccaagtggatcatctgttttacagttgagtaacgtaatatattaagtttatataggtttaagcatattttctgttctaatttactgacccaagaagatgacacattgttcagggtatgcaatgtcaagagtgtccaacccattaaagcaacggccactgaagtaccaccaactgttcagagtaaggactggacacttcatatgttgtagtgtgaatttcgaaattccaaaatattttgatgttcactcactcataattaattttgtttagaattgaagaccagtgggaacacaaaggttgggatcaatggtaagttcatcatagctcctactttgaaatgacgacttaatcatgaatgtaagcagtaagccaagcgattgatttcttactttttcattgcttgactcatataggttttggtcggattggaagattggttttacgagtagcaacattcagggatgatattgacgtagtggcagtgaatgatcctttcattgatgctaaatacatggtaaggatgtcaagctaactgcagcttgacagatttcagctactggtgttattgctattctcgtcattatcatctatctgttaattaaatgatgcaaaaatcaagcatagtattttactgacatttctctgcttaaataatgctgctcagatgatgcaaataggtttcttatgcctgtaagactgcattgagcttataatttggttgacatgtctgcttaaataaagccctgttggctgttcgctctatattgtagaatgccttgatatatgtctattttttgtgccatgcttgatttcttcttgttttgctagtatgtttttgttgaatcttgtgattttttatggtctaaattgggtataaggattattctacataaatagattagggaaaccgtggtatttagaatatggtaggacatttatattgcattttgtataagtagctattaaatttgcaaacacctcaaaggaattcagtgctaatgctagcagtttggattttgttgtattttgtgttagctttttttttttattattattattatatatgttaaagttgaatgtatggcagtttgttaacttgccacttattctcacattttttggattatatactcttgagggctgagtgtgagctgtagtgatgaactatggtcatttataggcttatgatactagcttgaaggacctttatttatattcatgcaatcaatgtgtctgaatgaaatgagcattttcagattttttttattaaattgctgtcgttcgcattagttttacaacttagtaacagactaacaattactcttaattgtcttctatggtcatcccattatgcgaaactgattatgatatctcttttctctatgcaggcctacatgttcaaatatgattctactcatggattattcaaaggaagcattagggttgtagatgattcaaccttagaaatcaatgggaagcagataaaggttctgagcaaaaggtaattttcatcagatcttagcctgaaagtgtgcatgtgttccttttttctaaacttattgtactttgagctgacaagtacaatctaaacctttaatcagggaccctgctgagattccttggggtgattatggagctgagtatgtcgttgaatcttccggtgttttcacaacaattgacaaggcttcagcacataaaaaggtttgttttattaatttattttgttctctgtctcagtcattcatatgagttgcacacaaatccgtattcatttgcatgaaattcgttgtaacattgagcttttctgtctttgtagggtggagccaagaaagtagttatatcagctccatcagctgatgcacctatgttcgtggttggagtaaatgagcagacatacaagccaaacatggacattgtttccaatgcaagctgtactactaactgtcttgctcctctagctaaggtttggtggctacttgtcttttttttcatttttttagaaaaaaaagaaataaataaataaaagaagagagtccaaacgaaaaagcaaaagagagtgacagcccttttaaaaacagtaagatgaacagtgttagaaatttcttttaaaaagtaacagatgagttgtcatttttgaaatatgattaatgaaatttttcaaactttattttgaatttatgaatgcatctagttaaatacccttgtgcttttgttgttagctaaaatgtttttggttattctctgagcaattctcttaatgctttacctaggtggttcatgaggaatttggtattcttgaaggtttaatgacaacggttcatgcaactacaggtttgtttttcactgtttctttttatttttgataaaataggagaaagtggtgtacaagctagttacttaattattgtttccaatattcagcaacacagaagaccgttgatggcccatcaatgaaggattggagaggaggccgtggagctggacaaaatatcattcctagttctactggtgcagcaaaggtagtaacagtaactaattcataggaaattctaaaaacaatgctggttttattattgtttttgattatttttattattatgcttttggaactgtaggctgttggtaaggttctcccagaactgaatggaaagcttactggaatggccttccgtgttcctactcctaatgtctcagtggtagacttaacttgtcgacttgagaagagtgcttcttatgaagatgtcaaggcagccattaagtatgttcttgcattctttgtgaagtatctaaccattgtactattcctctcgtgctcgtctgtgtatttttcatgtttttaattctttgttctgtgattggttatataggtatgcgtcagagggaccacttaaaggcattcttgggtacacagatgaagatgttgtctccaatgatttcgttggtgacacaaggtataatttctctaccagcatattggcagtgtagtgccctggaaataccatttaactaaaattagattgggaaaaataaccgtagttatgctgtcatttgtttcaaatacaaaatatttgttttcttcaccattgaatttgtgggtctttacctataaactctcaccctattgcatcgttagcccttgtcaattcatctcaacagaagctgaaagtgtcttttatgaatattcatcttacttggacatgtcttcactgcaggtcaagtattttcgatgccaaggctggaatagggcttagcacatccttcatgaagcttgtgtcatggtacgataacgaatggggatacaggtaaagatcttttcacactaccaagttccaatttccttgtgctatgtagttttctcaaatctgcgagttttgtagagggtgacaaatcatgtttttcctttttccctaacagcaaccgtgttttggaccttattgagcacatggcgttggtagcggctacctactaagtattgttgctgctgcaacaacaattttttttagagctcttgctatgagtttggttggagagtagttaatacattttgatagggtttcgggtttttcctcatctcatttggtgcgatttaaagatttcgcatggttcagtttgaaaataatgaaaattctgagatgtatgggctttgataatcattgtctcattggagttgatgccattaatatacatattgagaagggtttcttctgcttctcttgtatggcttttctttctagtaacttttgacatgaatctttcatctcttgataaaaatggtttcatttcctatgttgatcaatgctagtatcaactaccaaatacatctgaatatgggtacagctcaagttataggcataataaataatttttaaccacattataaatgcaaatggcatcaaattaattgtctaccacccctcaccatcttcaaagtagtgcttagcacttttaagacatgtatcgtaattggttagcaatgctttataaaagtaattacatttaattatatgagatcagatacttagttggacacatagtgattttgacacataaaaaagtgaggaattacttagtgtcttttagcatttttctcttcaaaatagttattcgggtaattgcttgtttaatcttcatattaactttagtcaatttcaatgcacattaatgtctgaaaatatatattaaacatatataataaggctctttcaagaaaaaacatatataataagggaggatatggtcaaatgaacaatgatattttctgcattggttggtgacaatagctttagaggaagttggtggtggctaccccatttatactaaactattgttctagctgaatttattcatctcttttttccttttaagattctcataatgaagccaaattttctaaaaaataaaacaatgataattatgctactgaataaattaacgaatattaattttatttatttatttattataggagaaatgaacatcaatttgggaatagaaaaatgtaataatgataatgaatgaatagtgataattagcaacagtgctattgcacaagagataccaaccagaccaaaataaaaaataaaaaaatatatcaatttgtaaacacagacaaatcctatggacacttgtagaagttttaaaaacgtttattccatcatctatctccttattttcatataataataacaaatttatttattaaaaaaataaaaaaaattcctaacatgatggtgactagtgagtatgtttgtataattttttattttttttataatttgatcaattcactattagtttattttatttatatatttcaaaatatataataaatttttttgatgtttttgacagtagtttattttgggttaatcactttgttgatatctactttatttttgtagtgaggttgatatcatactgttttttcttgttattatttaactttttttttttgcagtaataatggtggcgtttggtaacatttttttaatcagttttctgtttttaaaagtagaaaagtga

SEQ ID NO: 36539 - DNA, 3264 bp, Cannabis sativa
aaactaaaaggaagattttgaatgatatcactaattagaagaacaggggattagttgatgctgagaatttgcaacttgtgttcttatgactcaaaagggtcaccatcaagcaaatcatcagggtggggaagcatttttcttatccaaacaaatatctaaagtgacattctctttcttatccattatatgttattttattgtattaatttttatataatatacacaaaaaaaatatatttctttttttctttattttttctaatcaatatttttctcttattcttaattaaacaatgaaatctaaccaacctttccagccccttataaatagagtgatgcaacacagaatcaaccagaaccaaagcctcaaagcctaatcatcactacacacatatacaaaagaccttgttttggttacatatcatctatacatacatatctctcctttatttatatagtaagtactgttatattaaatctatacacaaacacacacactaaaagaagaagaaaaaacacaagagttttaggtgaaatatggacaaagtaagagacttggcatcacaaagagctgctgtgatcttcaccaggagctcatgttacatgtgtcacacagtgaaggcactcttctatgagctcggggctagcccggcgatccatgagctcgatcgcaatgccaatgggaaggagatggagtgggctctgcgtgaacagatggggtgtaaccctgctgtcccagctgtgtttataggaggaaagtttgttgggtcagctaaagatattatatctctccatgttgatggctctctcaaacaaatgctcattgatgctagagccatctggttttagctagttaacaaaattatgtacttataaggaaaccaaagaaaacaaaaaagattactaagttaatcttatatatatatgcttaatagttaattatataatgagggctgtgttttttggctcaattatctggtgactgtatttgaaatgaagccagactacatatagtatgtgatgaaaaaaaaaacatacatatacaaaaaatgtagccttctgttttctgagatgagagtctcaacatggaaatatatagtttttctttttgttataatctttttaagagttttatgaaataagctagttatgtataactttttcatggcaactcattaaggcatgcacaatgctaaaaggtaaaagacatgtcaactaatttactaaaataagttacctgcattgaactatatagaatttcatgataagagagaattctcttatggggtattttttttttttctctctttcatttgagagtaatgaaaaagattgtttgttcctatacaaagccttaaccacaaaaagaataaagaaccccatgaagctttggtgctttagttttttaatcagtgaacagaaatgttccaaacatgaaaacttatcctatccaccaccttattgaaacaggtcactatttgtatgaattgacattcacatgagtctgaggaactatccctttaccactaacaaagtggtataaagtgttcatagcataatgtgcattgatactgccttttagttttaaaattttgagttttatttttttctcttctatagggggatcaatggcaagaatccaacccacacctatgaatcacttattaacttaaatagttttttcttttctttttttttttacaaataaaaaacccaacaaaagttctctctctctctctctcttgaaaacttctaagaaaacttgggccagaaatgttgtcacggccctcttgcatggatatattggatcaatcaatacaaccaggcccttttgtccagcctgctgtgctattcttttgaaaaaattaaagaaaagaaaaagttacaaacaaagtatatgaataatgctagtgtaaaaatacacatagaaagagcataatatgcatgcagaagaatacatgatgaaattgattcattcacacgttctagtgtgtgagaactgagaagggaatcttccaagttgatggatgcaacataaaagaatttgcacccaccgaaagccacctatctcgttggctatgcttctgcagaaggattcaaaagaaggtgattgtgagaatctggtataaattgaccacagcccttcaagaattttagcacacttttgctatgtagacagtgagtgtgtgattattattgccataaaatcttcaatataaggctttacacgtatgtagcataattgcattgatctcaccacatgatcatgttgtccatccaatatctagggaaagatccacatatcatatggttataaatctaagtaagtctatttatatttgaaagttaatttttgccaacttgttcagcctaataaaatactagtctttatcttagaaagtagcctttttatgttctctttttatagtttgattatctaaataaagctacaacctcttttgaatgttcttcttcaaagaaagcagtccaacttattctgtccctataaatagtctaccaccatagctcaactacaaacaacttaaagctatagctagtttcacaacaaactctttcccctcttgtttagcttccatttttgaagtttaaacctcagttttcaaaccataggatcgaactcaattcgggattcgatcctattggttttaacaagtttttttactaaacaaacatccaacaactaagatggacaaggtaatgagattggcctcagagaaaggagtagtgatctttagcaagagctcatgttgtctgtgctatgcagtcaacattttgttccaagaactgagagtccatccaattgttcatgagattgatcaagatcctgaaggccgcgaaatggagaaggccctttcgaggctcgggtgcaacgcgccagtgcctgctgtattcattgatgggaagcttgttggctcaaccaatgaagtcatgtctcttcacctaagtggctccctgattcctctgctcaagccttaccaggctctatcttaaattaacacttatctccaataatatgttggaaaaacaaaaaacaaaaaaaaaacaaataataagatggctcagaataattagtttgttgtggttggtagtgagagagaaagagagagagctttgtatttgaaagtatatatactactgtatcatctgtcaagtgatctgtattgtagcatttaattagctggtgtagcttgtgatctgtttcctattcttattaatgaaaaattagcttttattatatatctt

SEQ ID NO: 36540 - DNA, 9297 bp, Cannabis sativa
  modified_base (5568)..(5583): a, c, t, g, unknown or other
  modified_base (8348)..(8351): a, c, t, g, unknown or other
gtcaacctaattggtggtgtatcagaatcatgaagaaattccttgattccagaaacttcaactttcatagcgtcacaatcttcttcctaaacaatggaagaatcacctgcttatttcttaggcgtcatgtctgcagtcacctcaccaaattgattgaactttcttggttagaaactttttatcttagaaattaaacacaaacaatgaattccctcaaggaaaatattttattgataaaagtggcaaggaattcagctagcatttgagaggctagactctccaaagtacaacctttcgagagggttgttctctccttagaccaagtttattctatttccaagctagctaaaatgaatccctcaactttatattagtcgacaaagtacaataattttcaatatattatttctaataaacaaatcatgtattaaacatgtacaaggttccctaaaaagggaaagaaaatcgtactgtaatatcagaataaaactcttaaccctaaaaatatggaacaataaatgacaatagctaacttacagctacacaaggataatgctacaaatagaatagattttcctacaatatttacaaggttcagtcatagtacaaaaagacaacccagcccctcaacttagaacagtcactaatacaaaaatagggaatagttactaaaacgcttgaatactaaataacccccttgcccaaagctattccgctattccctcagtctcctagagtaaataaattgtattgaggcttatcagatatgcgcactcaaaatatgcactaaaaacttacacagtgacgtggcaggttttttaatcaatcacatttatctaaattgggacacactattttaaaaaacagtaccacatcactaggtgaaatgttttggtgcatattttgggtggacatatcattacttttttttttaaatcaatattgaaaatttagaaagagaccactggtcttgccacccccgttatgttttggtacaacctatttgccttttagatttattttattttattttatttttttgcagttaggaagacataaagaagctctagattttgcttgtgctgctcaaaatttggctccttctaattctgatgtagaagaaagagttgagagagttaagaaggacattgctgcaggtttctgattttatctgtcttcatgttcatttgtttgctacaatatttattcacgttggccaggctttgaattttattgtctacttgttcttgtcacaatttccaagaccaaatttcatgcatgcctcttcggttttcttatgcgaatttgtagttcattgtattctctttgcttatgaagaatgatttctgtgatagaatattatattaatcctgaagagagagggagcaacaaaaaaactcattccatttttttccctttttcgtaagtgatatatatgttccggtgtctttctgtctgaattggataaaggtgtggatgagtataaatatctagtttgaaaataaagggatgtgcatgtgcttcatttctgcttttcttttttattttttgattattattttcttttaattaaaaaaagcctcccttgaattaactgtttttccttaacctcttagcaagcacaattttgaactggagcccacttaggctgacaactttggggatgtatatttgtgggggcaaattgcaggcctttttggaaaaaaatcttatttcttttttattgcattggctaggcgaagcagaaagaaataagaaagaaaatgaaggaattttgaggtctgaacctcgaggtgaagcaatgccttcattaagtgacatattttaccgggtagaggctaatagtgatgatagcccaagatctgaaagagaagattctgattatgaagaggaattggaactggactttgacacatcaatgtcaggtgatgaggagcatgatgttgaacccaatattctgcatggaagtttaaatttaagaatccatcgaaaaaatgattcatctagggaaagtggtggtgcaaatggctcgtgtggatctccctcatcatcatcctgcaatgacagagcaccatatcaggtttcttattttctctcgcatcaagctgttttcagatttatgttattgttacagatatcatgtatggaagtttaattgttttaagttaattaagtctaaaacacttgttctgaagatgcgatacttttttggaagttcgtagctttatatatgcttatgtatgccaaacacacgtctaaaatttacagcaaatttattaactattttccccaaacttgtgggaacatgtttggagaatcatctgttgagacttgaaacatgattgtagaaattagaaaatctacaactgcaaaggtttgtgcttgatctcctaacttaaaacaatacatgtatatattccagcaacaccatgtaatagcacttgatggtaaaaaactataattcttatcatttaattgctgattgcaattgtgcatatttgttttcctatatatgtgcagcctgggatagctattgatatgaaacaaagatatgttggccactgtaacgtggggactgacataaagcaggctaattttctgggtcaaagaggtaatttcattttgtccatttgttctcttaatttcaaggatcgtactgcaggttgagtggtttagttggtgagattgtgtttaacattcagtattctaattctttactggtatgtgttgagggagatgtatatttctcgtaaattttggtcagattgtggttgttgcaatgcaaaacatattgaatggaacaaaaaccagggaaacaccaaaacaggaaaataatagaccagagaaaggattctgttgtggaaattgaaaggaatacaggaaatatatagaaactgataactcaggttctttgagggacccggagccctcacaagagctcaagctcaccacaattcactcacatatattaatctcatcacttatttacttctactaactatccagtcttcccccccaaaatgacagctgtcctattataagtttataacacccatccgcatctctattaatattttcggtgatacttgtgatttggatggtagatgtcctatttaaagaagctgtgcaagtttgttaattttttttatttgagttacaggtgaatatgttgctagtggaagtgatgatggcagatggtttatttgggagaagaaaaccggcagattaataaagatgcttcatggagataatgcaggtttttgtttccccttctacagaaaactgtggacccttaccttctgtccttgttaaccatttatggtcttcttcatgtctctatgcagttgtcaactgtgtgcagcctcatcctttcgactgtgctgttgctacgagtgggattgataacacaattaaggtaactgctgtaggagggatcgattctttccttttctacccctcacttttcctcccactctttcctcttttagtagctggatacttgctaggctcattctgagtgtttgctggttttgttctagatttggactccaactgcttccgtcccctcaattgtagccagtggagcagtagggccagaaagtgctgactttttagctgccatggaagggaaccaacggagattaggccgcaatcgtgatgcaatcctgtaaggcttgtgaatttgttaacaaaagaattaagttcattctttttctcctcttatataaatatatttccttgaagtatgtgaatattatttctatgtatgaaagcacagtaaattgtggctataagtgtggaggttctgtcctttttctgaattgtttttacattatgattttgagctatgaaacatctagtgcacatggagcaaggcttactttcaaaattgaatgggtggaaaagataatgaaagataagcatactggtttatgaaaccttgagttagacttagaacattatggcttgatgtaattgaacatctaaccttttaatgaccacaagttttagaagcatgataagtattttcctcctctttgttggttgatttttggactgaagattggcggtttcttgtccagaacttgtcttttgtatcatgtttttgtcatacatgaagatcgcatcatgatctgtcaaaaattgcatgcatgtgtaaaataatattgcacactagaacttggtcatgtagagcacattgttagaaattttgtgcataccatgtaaaatactgcagtgtaatcatatgattcaaacttgctttcatggtggccctattactttttattccctccagttgcttgcttctaaatttatcttcttaccaaatggctaatgtcaacattctttggtgccaggggttttgaaattcttgagcgctttcgagtgcatgagttcactgaaggaaacttgcatccattcgagtgtgctcagagctaatcaggttcttgctgaagcttgcaggttccttccttttttaactttatattgcaaaaacttttcccttgtgtttcttgatctgaaaaacattatacttgcatcctccttgggccagttatcccaggaattctatacgtgggtgttttgaatatacaatgtaaattttttttatgcttgtaaatccaataaaattctttcttgatactgaggtgtttgtgtgatgagtttttcttcaaaatattaacctgtggttgacaaagtcatcttgcaatatttaacgtaaccatagcgctgaacgcggtctagaattttgaaagctgatgcttttgcggaggagctagggatgttttctggctgatgctgtatggaaatatgtattttctggttgctgctataaaactgtttatttattttttacttttttccatcaggaaggtaatctttcataatgtggccagggaattattaaaattgcactttcattctgaccctgattttctgtttgtcttcgtttttttttgttattgtttttcacctctctttgcaatattacagaggcttcatctttccgtgcgtggactggattgtactatgggaaggtaagaaagagaatgcataatggagacttattttgcccttggtgttgcattatttttcctgatacccttgtgtatagttaagactatcctctctggggtttccttttccttttttcaaaaaacaaaactttaatctagtatttattttggtatttgtagtgcgtaccttttccttgtgtaaagaatgctatattacttttatgttctcacttattaaaaatgtatagaatgcttgtctattgttaatattaaagcttgtcaatcctttaagtttttggctagttagcaattttttcctacgaactttgacatgtagtaaatcatgcttcctgaacttttttgaccgttaaaaattctccctggactattgagattgttaaatttaaggatttttttttttttttaatttcattcaattttactgtttcaggtactaaatcatgctccttagactttgatatctactaaattatgcccctcaaacttttatatgtattaaatcatgtcccttgaactttcatccatgttnnnnnnnnnnnnnnnnaattagataaaagtccttaaatttaataatcttaatagttcagggagagtttttaacggctaaaaaagttcagggggcatgatttagtacatatcaaagttcggggggaaaaattgctaattactttaagtttttatactagtatttgtagattttcttggactagtgtttagattataattggtttggtattcaggtgtaatcttttaaaaagtgtttacattttattacttaagattatatttaagaggggaagataatttatattgaggttttcttgctggaataataaatttggaactggtagttgaagaagcaaggctaggatatgttgtgtgtggaagcaataaatacggaaagatagcataaatatattagagcggtaaaataataaatacacattacgtggtttggcaattcacttattccacaagcagttgatattattaatctgattagaaaatacacagaatacagacataaatttttttattaatagtatttctgttttccaaacttatttaagtgtttcttaaaatttggatatacaaatactctctcatttagattatccattgattttttttttttttttgattaagattacccattgaacttgattatactaatttgtacatcgaattgttcactctgaatttgtacacgccgaattgttatgtattgaattatctcacactgatttgctatgtatttaattacaaatgctctttaaagaactccatatttataaaaagaaaatctcaactctcaattatatgtaataataagaggtagtttaactcctaattttttgtaattaatgagagatagttccaaccatatgtaataaatgagaaagcataagtcaaaagctattgcataacttaattgataaatgtggcaaataacaagtcccaaatttcttgaaagttgaataatataattacaattttaagataatttgacttttgagccaaattcaacaatctccactttagcgaaaaaaccaaaaaactaaaaatgctgcgtcgacatgcaccctaggcgctctaagtccgagagatgttgatcaagttcaagcagtgttgaaacttgatccttgtaactacttttgtaagcatatctgcagggttatttacagttccaactttctggagaataacattcccttcatcaatgatttcacgagcaaaatgaaatcaagcatcgatgtgcttagtgcgaccatgatggacttagttctttgccaaacaaatggcactctaactgtcacagaaattctccacatttttctgaacaatacctaaatccttggtcaacccgagaagacagataacttctttgaatgcttttgttacaaccatatattctgcctctgtagtagacaaagctacagttgactgcaaagttgatctccaacaaactggctcacctgccatagtgaacacataaccagtagttgatcgacgcttatccaaatctctagcatagtcaatcaacatatccaacaagatgtttaccatcagtcttatctctctcaaattttaaaccaatatctacagtaccatagatatgccgtagaagctacttaactactcggcagtgacctttaccgggattgtgcatgtaatgactcaccatactaatagcatgcaaaatattaagtgtaaagaccacttaattttaacttggaaattagcagataattaggacttaattatgaaactagaatattacttatgatttatcattttatggagatttatttgaagttatggtttattatttatgccatatatagaattttgcatttttgcttgttttgtacccgacaacattggaatcggcgtttggccaataaaatcacattttagtattttagtagtagcggggaaatttagttagacattgggaatgtcggaaattatttaaggtttagaaatgaccaaaatatccttaagtgacttagaagctttttagtttagtgagaggtagaatggtctttttagccattttgatcccttgtccttttgcgagattatgtagagttaataatttgattattttttatttgattaagttagaaatacaattattttattcattttatccaaatagataagaaataaaaaaacatcacattttcactttgccattctctctccaactctctctctttctcgagcaccctaaaagcaacaaggttttggaattttcagcttcatttctggataatctagcaagttcttggtgtttccaattaaagggagcccttctaccacatttccccttggatttattaagttttaagttaaggtttttacatgattatgtgagttagggttctgtagcttttccttctgaggttagattaaggttatttttgttgaattgaacttgttttatctgttgctttgatggttgagcaaggtttgagtttatgaactcaagctttgctctctaatggtggtttgtgattttggatgtgttgtggtgttttattgcatggattatgttcattatggtgtaattagaaggcctggaaggtttggtgtgatttggggttgatttgaggttgtggggtgattttgtgtgtttcctacactgaaccggaattctggttcagggggacctgtaggaatcggtcgattggttggtccctaggaaaccccacagaaccagaatacaggttggggaactggtctaccagttgggacattttaggtatccccagtttttctcgtttttgcaatatttagggtatnnnnatgttatccatcgatagggaaacttttagtttcaagtttttcccaaaaagtgatttagcgtgtcaactcatcagttttacgaataatataatttaggggcctgtaaatcgttgataactctaagatttagagttattttggtatctttaaacttaagttttaaactgtatagttgagtagttagtgtctattttatgtaattgtgtttagtatgttgtgtctttgtagtaaatggaaatgtgtgtgtgctattaagtgttagagagacttatgttactgtttttgtgtgtattaagcagaaaaaggctgaaataggtgatggggagtgtttggaacaagaagaaaaagaagcaagaaaatacatgttgctgactgtcattgctgtagcaattatcactagcaattggcaagccaagtaagagaatcgtggcagaaatttcaactagctttaatgaggaataaatgatgcttatgtggtgagaatgtgtacaatgagtcagcttatgtgaaaaaaaagaacaagtggacaatgacttggatttccaattagggtaaactttagtaccctaaatagggggcacccgagaagagagagaaatggggaaaatatagatggctgctgcactttgaatgagaggagcaatacgaatctttcagcaaagtacagaaaaaaaagaaagagggtacaaagaagagaagaagaagactaagaagaaggagaagaaggcaacctcaagagagaagatttgagctcaccaactcatttcttttgctctcctctttaattttgtatcattttctactctttaatattctcttaagctccatgactttgttattttctggttttatgttgttaatttcagacatgaactaagatctttgagatttgggtggttatgaaccctttgtacaaactagtgctttaatttgcaatggctgaagt

SEQ ID NO: 36541 - DNA, 4744 bp, Cannabis sativa
  modified_base (41)..(67): a, c, t, g, unknown or other
tggaaagaacatagcattataccaaatgcaagtaaactctnnnnnnnnnnnnnnnnnnnnnnnnnnnctgtgtctgataaatctaggaatgatacaactttaatatcgtacataaacatcatcaattattaactcaaactttttatttcgacctatacttaatttattacatcagcattctaaaatgagttttttgtatgaattcttaaagagttgtattatcatatcacaacttgataaataatatctacttctgtatatttaatttagatttttttaagaaaaagattattatattaatttttgaccaaattacataacaattataagtgaagatgaaaaatcctccaaccaaatacattaattatccaccgtaagagaaaatttagtcaaagtatgagcataagtattaatagatctgtaaacatgagtaatttgtactcatgtaaaattggacactatagaaagttaatataattcaagatcgcatgaaaagcagaaaattaaaatgtgaagaatgcaatccttaaactacaatgagtgaatctattttgatgtaatgcactcacaaattgagagttatgagccacttcagacttatagccatggctagtgcttctattttttctgatttaagacgaccctaaatttaccttgataatattgcaataatagagccagatgaatctcttaagattgcaccaacttaatcatcaatagaagcatctgtattcaacttcactcttgtcttagatctctgagtagtaatttgagcactttgatattcaagaaaataagagtttgcaaacagtaccattgcagcgactgtttttgtaaattttccataaactacataaaatgcttagttgaaaggcttgcagaaaggtgcaacaagaaatcctcacaagtgattgaacaaacaagatgaaaattaatttgtagtctcaattggcgccacactttcattgctcgagtgaaaaaccataaagcatgaattattgtttttatatgagttttgcatagagggcatatagaattaacaacaatgtgcctatgatgaagctcaacagtaacaggtagtgccgtgtggaaggttctccacacgaaaattcaaatttttgatgcatggtagattcaggctccaaaaagttatccaataacgctcagtcgaggtagaactattcccagtatcatcttttttatcaagattaagcaaactgatatatatcccaatttaacagagtatcaacctgtgaaaaaattatgctatataattgtatcagctgctggaaatagattcagagggatactaagaattctatcaacatctacttggcaaaaaattgcatgaaaagccacaaaattccattgtttgtgttgatttatcaagtcagcaactaataaatcaagattagaacctttaaataggaagtgtgtaaaacaagtgtgccttgaaatctaagggtcagatttgtaaacaatattgagacccgtttctactctccatcttaacccttttagcagcaactcgttacccttaaataatgcctctccaagtcaaagaatgggaatttccaagatcagtagtaaaaagttgaccatttaagtaatacttgtgcaacgctctacttacttaggcatgctacaatgattttttaaaaactgtgcacgcctttgttaattaaaggtttttcaaaaaaagtgaaaaattaaaacttttgaattaaattttaactttaataaatgcataactttacataatttttgagatctcgtttaaaagtttataactgtacaaaatacttttttttttacaaaattgttgtccaacgactacaaaataaaagtccatgtcgtcccgagaccaaacactccagacctaaccatcttgatatgtacaatcatgctcaaactctgaattcattgctgctcaaccttcgcctttcctttacctacacatgaaacaatatctgtgagtcgacggactcagtatgaaaaacataaaacataaaacatattactaacttgaaaataggcgcccatacacctaccaacaaggcttcagatgaattaagaacgttcttaacagaagtacgaaccctataccacatgcactaagtacttgttccatactagtgttagtagggttaaatcgtacctcgagtacaactgagttttgtatcatatgcacttcatactcgtcctgtactagtgttggtaatgctgtgtcataccccttaaaaattatgttgtgactaaaaagttgtcagtaaaggtagttattttttgtagtatgagtgttattgtcaacttctttcttaacctctgcgtttgaaaatacatgtcaaaatattttttattttcatggcaatgttcattatagttataatattaaactaaatttttaaatttttttgaatagtttgccgataatagaattcctgatattttaatatactactcgtgtcaatatttacaagtttattttcggtaatataaataatttaaaattatttaatttttaaaattttttacaaaaataatgttataactataatgaacactaccgtaattttttttaaaaaaatattcaaatatttgttttaatagtttttaaaaaaaattataatagaaatcctttgtattataattcatgcatggcttccaaatggatggctagagaaaagtaaaataaatctatatgatattacattattacatatatatatatattgaatagctaggtagatggtaacctacatttaggattctacaaaatggaatagtaagtaattgaatatattaatgcaaataaagtaaagtgggaaaacaactatattatttgataagctcaagttggaaaacctaggttttagttctcattcctcgacggcttccaaatgtaaatcaacaatacaatagtgatttttcaacccctctacttttagttgtgcctaatctgcattataattgaccaccggtcgtctggttggcgtaattctcaatgataaactgagtctctctaattatatatagcttctattattccacactattctttcacccaagtacgtctaattaattacttgtgaaaaatgccaccttatttttctgcctcatctaattaatggatgattttttatgtatatactagtccgttatcagtctctgcttcaagttcaccaagtgaatagcataattgatttggttaaatgcacctggaccaacaatatcacaccaataatatagttgaatattaacaaatatctctcaattattaacaataataatgtggtaatatatgtgttgaaatatggaaaaaataaacagaaaaagaccatatttttcctacacaagttatgctactaaatcaagattactatacatgaatttttcgtgtttagctagaaatctgaaacacatacaaattttatacttccgttaagctatagtaataatccatcaaaattgtcaaaattttcaactactcattaattaaagattctatcttgattcttgaccatggtccataatcttgaattaactatatgagcatgacatatcagtaaactgtacgattactctctagctttgaggcaattataatgattctgttacttttgttagctttttgactgaacaaaaaatgttaaatgttactttcaattcatgctagtatatagtattggaaagatttcaccaatcctgtgtttataaattcaaaagtccgatttagctacctccttttaacttttaagttcggcggattctcaatcatcaatcatatgatcatatgtccttatccttatctctttctcaaatctcaagtaaattgctataatattagattttatttatttatttatttttataatttctctataaggtatttgccaaaacaatattaatggggagcagtaataaaaatcaaaaaatagtttgccgttcgatttaaatatttatataggaatctattgtttttgctttttcaatccattaattagatttcttgcaaaaaaaaatccattaattaggagatttgaccattcaaagttgctgttaaatgccacatcaagcatgcagccgcagacaataggctattacaactaaccaattataggtagagtgatcagtgatcaggcttcacgatcatggccccatggggttgtataataattaatgtcttaattaaaagcttaattactcttttttttttcattaaagttaatatttttcttttgtttttgtcctactcggtctaattgtctctttcctttttcctttatttcaaggtatgaaaaatttgggtcccactaatttgggaggaaatgtataaaaaatatatttctcatctccacggttatatttatgtgtccctccctcccttttgggatgtggtcaccagctcatgcacttttgtttatctaatattaaaatgagaaatttgtgctaggcaaaaattacaactaaactattatgcataattaaacaaaatataattgaactatatgttgaaaaaattctcaaatacttaccatactcaaaaaataaataaaagtatttcatcaagattacaaaaaaaatagagaagaagaagaagaataacacacaatacaaaaagcttcaccaaggttcaaagacatttgtagtcatttcctccctcatatagagacttaaggaaactctaaaaatgctcttaaagatttatcaagccttgtatgctcagcctagtgtctaaagatga

SEQ ID NO: 36542 - DNA, 3742 bp, Cannabis sativa
tcaaattaatattgggcatgacaacaatatatgacttagagttttaatagatggatgtcaagactgtctttttacatggagaatcggaggaacaaattctaatgcaacaaccagagggttatgtggagaaaggaagggaggataaggtgtgtttgcttaaaaggtctcagtatggtctcaaccaatcaccgagacaatgatataaaaggtttgatgattctatacacaaagtaggctttaaaagaagtgtgtatgatagttgtgtctatgtaaaatcattaaaaacaaaattaagctactctctacctacttttgtatgtagatgatatgctaattgctagtaaagacacacatgagattaaccatgtcaagagaatgctcagtgatgagtttgaaatgaaggatctaggccctgaagaaagatccttgacacagaaattctcagagacaagaaatctagaatttttaagttgtctcaagctggttacatctctaaagtactgagcaattttgggtttttagatgctacaccagttagcacaccaattgcacaacacttcaaactatctagcaagcaatctcctaccacaaaacatgaatctaaggaaatggaagggtttcgttacagtgcaagacctaacttgagccatgttgttagcattgtcagcatgtacatagggaacccatgcatggaacactgaaaggcaataaagtggctaatgaagtatctcaaaggtactatagatattgatttgctgtatcgccctgatgaaaatgaacctacagtgaatggtttcatggactctgattatgatggagatattaacacaagaaggtcataataaggctgagtttttagagtcaacaactgcactataagttggaaagccaatctcaaatctataatggctctttcaacaacaaagacagattatatctctttcacaaaagctgtcaaagaagctatttggctcaaatgaatcattcgggaatcggggatcaataaaacaacaatcatggtacaatgtggcaattaaagtgctatacacttaaaaaaaatcagatgtatcatgaaagaactagacatatagatgtaaggttgcaattcattacagatgtctttgcagaagggaaggtaaacttagtaaaaatgtcaactgaagagaatggattcatacaagcatataccattttgatggaatgattagaaacaattctcaatccaacaatgaaataaattcattagtgaaagttaattttgttaactcaagctgtaaataacaattaatcatagattaataaaatcaattgacacactaaacaccagaatccatttcaccacataaaaggcactcaaatattattcttgattgtgaagatgtactgtacatttgtgttataaaacaataccttaatgaaaacagaagagattgaatattacgtacccttatatgtattttattaacatgagactgaatagaagagagtgcttgtttatccaactaagcatcacaacaatgatgtatcttttgttattttgatatgtatatgcttgtgttttcctatgattaattcagcatttttatatttatgaaatttatgcctccatataatatatttatatatataaatatcttatgataactagttactagtatggaattagttattttgaaatttaatgtggtagtagccagttaccagtactactattaatttttaggggaatttttatttgtagggttttaaggtatgagtttgcaaaattatcattttttggggaaaattttagaaaaaaatctaaaaatatagggaaaacactagtataaggttactagttaccctccttatggtaatttgttatcctaagagtatctaattactcttacttagttttccatatttttcaattttccataaaatattttttttggaaaaaatccattttcttacacaaaaagtataaaaacccataaaatttaaaatttcctctaatttttacttttatcaatttttgaaaaattaatgtgtttgtaataagttatatcaattgttttaaaaataccacaaaaagttgtaaaaatagaaaaaaaaccataaacaatacacaaatataaaatttcacatttattcaatttataaatagaaaagtaaccataattttgatgtaattttctcatttagttactcatacaatgcaccaatatcccctcttttaatatgtacttttttaagttgtcgttttcaataataacacatatttgacttcattttgaaaattcataagatcttgtattcttcagtaactattttgagatataccaacttagatataaaaagtgtttattcccacaacaatcgattagaatattttaaaagtgacatcatgtgttattttaaatctcatatatctttctaaaaatttcaagttctcatattttccaaatcataacaattatgagattttgattgatagttaaaactaataaccaatttatttactcatgtaataagtgttttgatatatattatataccattaccaacaaggatatgggtcttttggacaagcttgtacattcaaacccatcacattttgttagcccaaattttatatgatcatccagaatatgcttttattggcaccttttttttatttatatatattatttctcatttcataattaatttaattcaagaataaaagaaatagtaataatttaaattaaatgattttttcatacatgttttattaaaaaatattctcttttatttttcatataatttatgtatccttattcatgtttttatctttaaataattttttttatgaaatgaattatataaaagaaacaaagaaaaaaaaaaagtctcaaaacaacattaaacaaaactagccattggtttttttattttgtttttactttatgagataagctattatgataggaaaatttgggttaattaacaagcttaaatgtaaagtagacccaaattaatctacctattaaacatataatataaatataacttcacaaaatgataaatacacctcaaaatttataaaaagttaagcataaaataattttaaaaatcactcttaatactttataattttttctcacatattttgtgttagtttcaatatttattttaattaaattttcatatgttaatacattaatggtatttttatgtactcatatttaattttttttttttatataaaaaaatctacattaatggtgtggaagttaatcctccaaaattataacaaacatgactaactattggttatgttacttgaaactaagttgtttagctcctttaattttcagccataacaatttgttatcttgtaatgagctataattattaatagctcttgtcccatttcattttttatgcaacttgtattgtaaatgttagagagagataaagagagtgccaaggagtcatgagacagagagagctaaagagagtttgagttcgagttctttgtagctaaaaactccaagtgtgtgtactcagagttgagaggaactgtgactattcttctagtgtgagtacatagagatctttagatctttgccattggggtttgtacaagttcaacattttcatattagattagtgatgatggctcttactggagtatgaccaagtatcaatttgatcacattaaaattataatgatggttaaatgagatagcatatctatatcgtggaacatatagtatgct

SEQ ID NO: 36543 - DNA, 5201 bp, Cannabis sativa
  modified_base (111)..(115): a, c, t, g, unknown or other
aaataaacatataaatgatcacatgaaccaaatggcatactaaatatgtaatgaaaataattatttctttattgataattgaatagaaaagattacattgaaatagagttnnnnntagggcacaaagcccaacagtaaccactaaattgatagtgatcttctccatattctttacgagatccatcctaaactctgtccactcatcttcatctggtggaggctcatccacctgaagttttgacgattgggaaatcaacagttattccttggaatctccgaagcccgtggtccaacatcatcactgaactaaccagataaacggagagggatacgaccaatttatctgggaattgagtagaggttggaggcgctatctacctgcctcttggatgtataaagtctaaactggtgttatcaacatgctgctaaaggtcgaccagaaccttcgataaaacataccacattagaggagattgttgttattgtcgcgaggcatacctcagaatccaaactaccgcctaagcatagagtgttgggaaaagccaaaaagacattgaggaaagcttcagaggctaatcctcattttgctcagctatttgtgatggccaaggcagactaagctagacctcctagggaggatacctaagttaccgtcgtggatgttgaagtctaggaaattgacgagcaagataaggtctaccctactggttgtcctaaggcttaaggagaaaaagaagaagaggaagagatccaggctcttccctttggtggatacaatgatgctgggagatgtcttggttgcaagccaagtctacgttgagtaagagtatgaggaggcccgtccttactagatcgaataagggttctcgatgggtttctcctttgtccacgctcgagtacaagagattgaagaatctctatgataagggtttcctcggtggggttgaggctttcttgcctaccacagggcagcttgctactaactctggagaagggctttgtgcctggtctgggtcccatgtcgaacaagtcacgatcttgccttcgtatccatatgttaagaagatcaccatttattataagatttgtccgacccagtttactcccaagggcatcaagtatttggctgctttgttcgtgctctacgccaagcaggaatggtgccagccttctagccatgacactaactggctttttgacttgaagtcaagtctaaaacagaataggccgagggtacttctatttttcatagaatgagtaccgatggctgagcggtaccacgaacaaggaggtttcaaagatcaacaactttttggaagattattacatcgttaaagacatggatgtcgaccaccttaattttttatcttgccccatcttactgtcgtttgcccttcacttttggattaaagtcgagagcccaagaaattcttcaactattagaatcagctcggaacatctctctcttggctaccatagctaacttccttaagtacggtctttatatgtccaacaaggtacaaaattttgaccaagtagccaaggaaattctcagtgattaagaggtgcaacaaaagaagaagaagcatcctatggagcattaggggccgattttgaggcctatccaaattagagatgactccaaagtggttgcttgtcccatcatcccaataatagggaaggggaaggttgtggtcgaggaaaatgatggagactcttctgatgaggattctccatctttacttgtccatgagggtgcccctcccgacgttcaaggtagtcattgctttacatagctttatttctctttttacttgtctaagtatttaacaagtgttttgttctgtgcagctatgtcagagaggttgaagtgagtgttgaagaggaagacaggtgacagctacagccaaaaatcaccggttaagaaaccaaggttggaagaggcccttcctatgagcattgcctcgagctctaagatgccttgtctagatgctaaaaagagctttgtggtcgtagctatagtcgtctttgactctcctcctccaatgaagaagtcttccaaaactgtacctccaatcgtccatgccaaaaactctaaatcttccaagggctcgactggttctgagggtgttaatgttgaatggcctaattttccaaagccaactactactccacctactgtttggctgaaaacgaagaaggccaaggagatgctcagattctatgaggacttcttgatggctgaagttaatgagtaactcaccgaggctaaggatatgcccgtgaagctcttggttggtggggtcctgaaggagattaccagggtaagtttatattttagagttctttgttcaggctatgccactcaaacacttctaacttgtttctttttgcagtctaatttgaagttgttttatgcatatttctgagccaagtcaacagctctcaaaactagcacaaccaccaatgacctaaagaaaactttggaggaagcccaaaatgatgttgagctgaagggcaaacaactgggtgaggtgaacaagcaacttattgctaggaacaagtttatcaacgacttaaagcggcaaatagaagacatgacgtccacagctaagcttaatggagacctggaacatgaatccaagagggtgcaggaacttattgacgagagggaaggactctgaacactcctccaaagtcaagaggccaaaatcaaggaattgaccgactcttcagcaaaaagaggactcccttcttaaggagaaaattgcacttaaggaggcttttatccacttgcatcagttaaaatcatcataactataaagaatcaaaagcttgtaggcagaagaattataattaaaagattattctttataatatttaaaatcaaaataattaacttttatgctataaaacataattcggcacatgtacattaacttaatatattaataaagaaattgtttaacaaacaacaaagacaaaaagcgtcattaaatcatgaaaagtaaaattagaatcacaaacataatcacaatcacaatagagaggtgaaaaaatacaatctcaacacctccgtcgtggacccttttttttctacttttcttttttatcatttcttttctacacttacatctgatgcctgattttacaaggaaatttccggaccaattaattgccttgaaactaattaatgtacatacaaatcctacattaggataaagcactagtacactacccgctgagtgtgtcgtcatcagctataatcttcgtctctcacgacctactcaaacatcaggtcatgccttagattccccttctctcagtaattcctgcaaagtgcaacttagataaatactgtatactatctttcctggatggttgtctctgctgttattatgataaccgtgtttgataatgattatcttaagcttacacagtactacagtatgaacgatctaatagaataaaaaatgattcttcaaaattaaaaaagagaggaaaaaaaatgctatactgtttttcaccaacccatgaaccataaaaggcgatgacacactcatagatacatatgtgaagacatttatcctgtttgagctactattttggttatagctagaagtataaaataaatataaattttttaacttatttttaccatttgaaattttttttaataaaaagtatttttcaaactatttcaatatcagtaaaaaaaattgtgagtaaattaagaaatatgtatattattttaattttaaaaatatctttacaaaaagttattttgagagaatatacaaattctaacttcctccaaaaagacttttcattttttatgcaaataaatactcctagaaggactattttatttctaaaagctaaaaaagagcttataaaagctaagccacacgggaccttagagtcctctagaaaaggagtatgtaaagcttactgaaatcataattttaagaacaatacaaaatgctgatcaaaagcagtaatgacttctaaggatgatggtaggttccaaataccttggtgattttcacatattattaatgctagttgaaatggttcactaggttagctacagatgcatcttattacagttgggtttatgcataatctatacattcaaaaaattacattttagaacctatgttaggccttcacactcatttttaccaaaatattcatgaatatgaccaaatattttctcggattttgagattctcaactttttcttcagcagatgggcttcttgaatctagttatattaaaaatattttgataaaaattggctctaacagctgaattaaaaccgatgtacaaaatcaactatcaaaaaattaattctttaaaacactagatctaaataagtaatggtatgtccaaaaatgtataaatcctttatgaaatagcatgctcagatttaaaaacttgcatatatatacactaaaaagttacataccaatttagtagcagcaattgaagtgcgttgcctctctttcttctcacgcaagcattccccacaccagtttgagaaatccttttggtacttcttcatctctctgaagaccgaactgtaggtagattactaaaaatgagaaaccagttgcatcatccttaaatctcatatctattgctagttgctatacaaaaactgcttgaaatagcattgccaaaacagtatacgaacagagctcattcaaccagctacactaatgaaacacgattaatgatggggatggctctgtggattgcaagggttcacacaagctccagacacaaacaatgaatctctctaaatggtaatcaacgaagctacgtcttcagcattaaggtgagccaccaattcactacacctatgctagaggacctcgcactaattgagatgagtaatttatggaagtttatgatttattttgaattatttgtttctatttatggtatcagctttgtttggaaagtttatggaattaaaatagacaggagtgtgaggaggggtcatgttttgatttgtaattgagcagcagctcttggagagaaaccaagtctctcaaatatcttgggcaatttcctattttcaataaaatatctctatttcccccaataatttactttgtatttttctattttgactcactacatagttggtgtgtatcaaatagcttatatatataggtaagtaagatagaaat

SEQ ID NO: 36544 - DNA, 7185 bp, Cannabis sativa
  modified_base (27)..(29): a, c, t, g, unknown or other
  modified_base (7159)..(7160): a, c, t, g, unknown or other
aaacgtgattaactgctaatttccaannnaaactaagcggtctttacatttctccacctgaaactccttgggcaaggacatgtagaagttgaccctcttctctaactctggggtcggggtggattggggatggcaatctaataaacctataaagtaaggagtcagaatatggaaaacaagaggaaaaatataacttcaccaactaaagaaaggactaagacttacttgcaaggttgaaatctaggctgatggtaggaaccctcctcaacgggaagccaaaagtgtgaaagtaattatccctgaagtcatgtgtgtacttcattgaactggtgaggcatgggacactcttgttgtactttccaacctttaaaagcccaccttatccttgtgacctctcattggttgggattcgatctagtaaaaatacaagacctcttttggcgtcggcacaggtttgctgtgtttgacacaaaagatatacaatcctagcagcaggcggtatgcctgagctataagttggaaatgtgctaatcccactattgcacagaattcagcgaaataacacctaatgggcaggtgtgcccccatatcgacttgagcctaactccatatgatgaagcctccttttgtgcatttactgagcctctctctgttgagttcgtacttcctcatgttgttttaattcctgaacaagttgatatgttggttcattcccacggactgtcattcacgatcatttgggaagccttttgatgctccatcgtctcctcttctgaatcaacctcctttcatcgagaacgcttagtcatggtttctttatagaaagaaggaaattaaagcaattagctacctaacatagaaaggaagttgggggtcctctcccataaattgcttggagaggtcccaactagactcactacctaaaaacaataactaccaaaagttactcattctagacaggaagttaggaacaattcaagaagagagacgacaaaaactaacattaaatccaaaaccagaaggattttgggagaaaaattagccagcacaattattgcaaattaacctactctagaaattttgaaacgaaaaaaatttgaaaaataaagcagttcatgacgtctaagtctacctacggttgcaatcgcacggtcaagaaaccctaatctcatcccaaaatagagcatgcacatataattcaaaacaacgaattcaaaaaatgcattccataaataaagataatatatctgatgttatttatggaaaagtcaaatcaattgttgctgggtttggctcaggaagttgattgcacctttcgcaaaggcaagaggctaaggcaatcaacgagtcgatttttgctacaaaatccaaattaatagtttcttctactgcaaccgtcttgattgttggtgatggaaagtgtgggaatttgcgtgccttaatccgtaacaatagacaaagacaaaaaatccatggtgttttctagattgatgacgaaggatgttcttcaaagatggtttgaagttctaaagatggcaagaggacttgggcgcttctaagggtttaaaatttgaaaaaaaaaagaagtaaatgttgtaaatggagctatcggcggtatttatatcccagggaggaaatccacatgaaaaagtaatggacgacaatgatattggcttaaatgacacgatctccatccaaaagctagggagatcaacaatctatgtatatcctcccatttaattctctctagaataaaggtgtgaagtaatgatgaagatgcactttttcagtttttgtgtcagcccgtgaacagccgttgaaatgtagccgttccttgaaggagactcctcgatagtcgtgccctgtaccacactcgactgtcgcatggacacatcatcatcagacgcgaaagtcagcttttctggtcgagtgtcctgtgaaatgtcactacttcattctccaatctccacgtgtgcaaattaagatactagagcaagctttaaccatgtgcagcattctgaaatcttggggtaaatattatctgcattttcggcattggacatgtggattccaagttagcattaaagacccatcagtagggcaataatcaatgataaagtgggcaaatcccacctggatatgcccttctaagagttgtcttggttccgtatttgcagagtcctccaccctcggcagagcgagcccagaagacgcctccggtgtcatgaggctggagggtaagatagtaccttcctgaaagaccctttggtttccttatttattctggcctataaataaggaaatgtcagttgccagatcgtgccataatatcacatcacaattaaagaggaaacttcccataacaagcgcagtgtagttattttagaataactacccacaattagcggatgcagttttgactcgatcaaccaaattctattttcctagtcaacatatcatgttcttcatcggctggtactttatggaaaagcccaaagatactgtttaattataaacttcccagtagagggaaaagggaaaaccttaatgtaatcctacaactactataaatacccaatcaatctcatggattacgggttgaactcttttacgtactttgctcaagaaaacatacgaacttatatcctgtgtatttctcaaagcatttacaagtaaaaaacttacaaaataaaattgtgtcgtggactaaggctagttaacgccccaaccacgtaaaaaactacttgtctcttgttatattttctctttcgattattattacttcagttcttatttttttcattctgtttccaaaaatctggggaaacaaaacgatttaactactacaaatagaagcctaatttaagaaatcaagtatcactgtatactgctaaattaaaaatctatagagagaaaaggaaactttattttttttctctctgttgttctttctcatgtattgagaaatcaacaagagcgaagttatacactttattataatagctcacactattccttgtgtgtgatggatcaatttgcaagacactggtgtgagtccaaattgcatattcctcattaactggattaagggatacaacatatgagaagtttcgaggataccctgataggcttcaagaggtatactctaaacttacaattttcattatttagatttaatgtacacacattggagatcctaggggatatggtacaatgataatcagacaatacaaaactcttccgctgcatacctgatttagtagcataaaactaacagattttgctttaggtgtagttccaactcgtgaagttgtagagaaaacttgaattctaaaggttgatgatttgaaattaggggaaaagtagtaaaaggagtcttctaagggtatttatacttgatgtgtctattcatgtgaagaggaataaacgatccacgaacgaatctccaaaagcacaattacatccgacagttggggactccaacagtcaagcgtgtcaaagaaattattatgctctagaatcgaggcgtaaactgatgatgaagatgcttttttttaattcccgtaccaaaaagtgaacagttctcaaaataaaagcctttctggaaagcaactcctcgataaacatgctcctccacgactggatgatttccacgttgacctactacgactcaagattgaagtcaccttgcatgattgactaacaactagaaagtcatgcaagattacttttaaatttccacatgtccacactaatggaatggggcaagcttccaccatgagtagcattctagaagcttggggtaatgttatccgtattttcggcaaggaacacgtgggttctaggtcagcaccaataacccaccattgggtttcaaagaagacaatttaggccaagcccaagtcacacaggaccttccaggaatgcaccataactttgtgatcagatgagctgtcaccaatgataatccgtatccggaagcagctccagtaccgtggtgcggagagccagacagtgtgttcccaaaagataagtctcatttcctttttatttaagcacatagaataagaaagtaaatgctcctcaaatctcgacagaagatcatatcaatctaaaaggggaaactacctaaactggaaatcaaacaattaattcataattaattgcccacaattataagacacaattttgacaaattcaatcttattcaatctgtctagtcagcagatctactctttcgtcggctagacttcacaagaacagcttaaaatatgtaatttcatgtaaacgccccattagagggaaaaagggaaacaaagtataattcccttaacactataaataccaaacaaatctttcaatttaaaggttgaactctcttgcaatacttgctcaggcaaactaagagaccttgtattcattgtattcccagaggcttttctagctgaaatacataataatattgactcattaattaaggctcgttaacaccccaatcacataaaaactgtgtgcatttttcttatttcttttcttgaattttttgtttcttcaattcaaattcattttaattggtttttctaaaatctctttaaataagtattatgttcgtacataatatagagaggagaaggaaataagctttctctctcaattattcttgctcatgcgttgagaactcaataagaacaatattgtacactttatcctaatatcccatattattccttgtatgtggttgatcaatttggaagacactggtgcgagtctaattgcattcctcatcatctgaattaaaagatacaacatacgataggtttcgaggataccgtgatagtcttcaagagataaatactctaaacctgctattttatgttttgatttaaagtacacacatctggagatcctttgggctatagttgataattaatatatgaaatctttccgctacgtatctaatttagtaccataaaactaacactcagataacttaaaggcaccattttagaaggtttacacttaaccctagctaacgctctcactcttacagcctattcagatgcagatttggcaagtttcatcagaggtctacagggggtatctgatcttccatgaggacattcttgttagttggtccactaagaaaaggcatgttgaagccacatcaagtactgaaagtgaattcaaggctttgcgaatgttgctgttgagcttaaatggatgaaatatctccttttagagttacatgtatctttgcctacttgtcctatcatttgtgtggataatcaaagtgcatagaaattgatttgcattttatcagggatcagatcattgagaagcaacttaattcaatatgtatacctattttggatcaagtggcagatgcttcgacaaaggctctaacgaccaatagattcatttatttgatgtccaaacttaaaatgggaacaaccccattttatttgagggtagatgttaagatcagtaactaactttttgttgagattagttagttagttattttctgttgaatgtaattagcttttcttgattagccttgtacatcttttgtctataaataagaatggtcttagctgatattgtgtgtcttacaattaatttcatctaaaagtcttttgcttagaaactcttcattctttggtttcttttgtcattacaaatactatgataattttttggttgaattgattattataagattatttaacacaatttgaatattttataattttctaagtaaattattgttcaaaaataaaaatgaacaaaagtattaattattgtgtacatttaaaattaacaaaaaatgtttattgaaattttaaataagtaaaaaatatatatatgtttggttaggtttggaaatttaatttgttagtcaaacataataaatactcatatcaataggttaaaaatacaattccatatgtactagctccatctacatacgtgtgtactagtatgtcatatatacatgtgtagttaaatgattactcaacactaagtttggtaagatatagaaagattaaagagggataggagaatttgagagagggagatattttcaaataaattagaaatgcagtgccaaaatccgtccacaaaaatagtcggtgcctatgaattcttaatccttttaccttttctcccattctcacaatcctccataccaaatagaggagccataattaaagtctcctattataatttgtttctcaactcatatgttaaaatatttttttcaatttttataggggtatttattatagttaaaataatatttttataattttttaaaaaatttaaatagtttacagtaaaaaaaaaagaaaacaaaatttctaatattttaatttgtacgtcatacctgtttaaaaaattttaaatacattttcaatacggtaaattattcttaatttttcaaccacctttatttccatctccatctaattgtatctctatccttccaatcgaacttgaaatctcaaagtaaaacaaaaatatttttttttttttttgaaactctaataaaagataaattagtggttgttttctctcatgataaatgaaaactacccttacacgattaatattgtacaataaacaaggaattgagtcaaacaaaactttatttaattagggcatgtatatattggttgtgactcatagatgatatacatactaagtcatgaaagaaactccaaaaattaatgttaattaagtcaaagtgtaatatttaagcttctattattattatcgggttggagccatataaatatatatttatatggaaatatatatatatatatatgtatagttggaggcatgattattgttattctattcaaagtaaaaggtttcaaaacatattataaagggtaaggtgccatgtatgattatgtaccaaaaatatgaaaaatatcaaaacttatattaatcaattttatcatataatatatatatcaatactatacagacatggtatacgtaagttacaatttattcatgtactactaattaaaatacaaaatattaatttataatgatgaaaacagtatacccaacactatttttttttataaattttctaataaagcaagttctcaataaatttaggaaaaaaaacagaaaaatacannaaaggaaaaaaaattacaaaaatac

SEQ ID NO: 36545 - DNA, 6203 bp, Cannabis sativa
cttgagtcacactgaggcagtcggtctccaaatgcactcctatccaccctttctctttgatccagctaagggcctttttgacccctaaagcctcggcaacaacaggttgaatgacaccttgtttgagcaaagagccttccctccacgaatagacccttgtcatctctggcaacaaaaccaattccaaaactgcgacttccttcaaaaattgatgcatccacattgaccttgactctatttaccggtggaactgtccaacactcagtaccatcacctgtctgtgaaccagaccccgacgactctaatacagagttctcagcatttctccattgatcaaggtaaccttttgcgtacgcaacaatattatcagccgaaaagctcttaccattccaaacaagatcattccgtgctccccaaatcgcccaacaaagagtgaccaacaagcatttctgctcgatatccaacaccttaaaacaatccatacactagttgagaaaagatgtacctgttgagcaaatcgttccaattcccactctgttccacaccagttgaactgtttgactagtaaccaggcagtgcacaatggtctcatccgccctgtgacaaagaggacaaagagaggagacatccacatgcttagtcttcagttatgatttttgaccatccaagttaaaaattgtcatagcctaagtctaagggtgggtaaaaaaaagagctttttagtagttggcaagtgactttttcttaattacttgtgtgacaaattcaagccaattaaataaaatggcaaaattaataagattatttactttttcttaatgaatttataatagactcaaattaagtgaaccctcaacagtaccaactttggtcagttcttcaaacctagatagaatagaaggctaggatagaaaccatttactttaaaagcggttccaaaaagaaccaaacaaaataaagaaagaaagaaaagtacattgcatgctaaaatgcaccttacctgcaaaaactatgcgtcgcctatacgaaatcgagtgcgcatgttattataatgcgcaccccaagtgtacattttctaaatctgttaattattagttatagattaattaattaattaatactactaattctaaatcacccccgtttattaataaaacaaaattctcaagaattctattttttttaagaaaacgaaaaaacgaaaaaatagaaaaggaaactcttttggttcatgctcctttcgacgaagagagaaggctttgcgattcaggccaatcaaccgcaacaagcaaaaatccccaaaacccacgtcaaatttgaagaaatcaatcgtacccatctcttaaatctcggactctttcggtttttatcttctgctttcttcctcatcaatctacaggggtaataaaaattatatgcttttcttaacgcattttctttgaaatgtcttccacgttattttaatgggatttctcggctctttcttattcttcggatattcgtgtttttgggtttaatgcaggtaaacttaaggaaatggacgtaaatttgttgtgtgtattaacatgcagtgattggacacgtgggtgagttggaaagagaagagaagtaagcggtgtcagagaaaagattagattttttttttctttgtttcggtgaagcggccgaagatggcgaatcaggtggtcaaagtgagtagagatcccattgaggcatgcatgacctgcccactctgtcataagctcttcagagatgccaccaccatatctgaatgccttcatacgtgtgagtctctctctttctctcgtctgactctaattggttgttctgttaagctaattgggtcgtattgattcattaaatttgaatctcatcgactgttttcttgcacttttgggtgttattctgatttgggtccttgtaattatctattttttcttatctgggtttctctttggtttgacttattttttttctttcctaatatgggcgtgctatattttcaatatgggtatttgctattttggtatttggtgaaatctcttttgttttatcttctgtactaggaagattttagggaggttaatttatgttgggattaatttttggtgttaaacatggcttggaacgcttgaataatggaactggcgattaagtatagccatgtgtgcttatgctttggttgtctctgactctgactcccatggttttgaaggccattttcgttaatgaactagcagcctcgggtttatagagtatagttgcattatagtgcttgtatggtttttttcttcttttcattttcattttatttatatatttattttgtttaaacatgaacattctgtagttattgttataataataagaaaacttatctggtttcttacttgtgactgttcaaaggtgaatacccgtgctcatatctaatccctgtaaaagtttcctattatgtatagtatagcagctgacctcgtttcctattaatgttaatgaaaatgttcaatgcattaattactatttttcttgaaaaaacaatgtgacatctttgagaattccgtacttatatttttggacttcgtccagtttgcaggaaatgtatatatgataagttatccgatgaagagttagagtgctgtccaacatgcaatatccatctaggttgtgttccattggagaaattgaggttaagtcctgctattacttttgctttgtataatttttcacgatcttagttcattataaactgaagagggggagcctgtagtatattttgttctcttctgatgcaaaagaggaaaaggaattctattgagctagaaccatagtgagcattatgcattatgttaaatcacatactaatgagtgaaattcgagtttttggttcatgagattgtatattgagttagtatctattggtttctttattaggccggatcacaacttgcaagatttgagagcgaaagtttttcctattaaacggagaaaggtaaaggcagctgaggttgtgacgccagttacactacctgtaagaagaaaggaaaggtcactttcttcattggtgatcaacactccaagagtatcagctcatgccaccatgactgggagacgaaccaaatctgtcacgaggaaggcagcagctttacgaggatgtggtttttctgctgaaaaacccgttaagagagaggatgattctgttgaaaatcatcaagaaagctcaagttcacctgagccttcaaataagctttctccgcattctaggcaggtaaaggaggagggaatcgttctcctacccacattattcactttcaatagactttgtagctgctggtgcagttttctttatttttattttaaacacatttgcttctacctgccaatgttcttgacctggtgcagagctctattccttctgagcctagtgaaccccttcctgataaagaaactgggaatggtgccaagtcatgggaaggaaagttggatttatggaaacctttaacttgtttggttgaagtagcaaacaggactaagtctgtaaagtccagttcacaagggtctgacaacaaagcagaacccacactggttgctgacattgaacttcaagcacgtagaacaaaaattaaggaatacaaacgcaaaacaaaagttgaggatgacaagaatgttgatcctgtctattcagcatctgtgaaacctataaaggtgcgaagggtccggcgtaaaagggaaactgctttcggggaatcaatgatatcaccacaagctgtgttggacgctgctagtgccaggcatgaaagaagagttggtccaatttggttttctcttatagcatctgatgaccagtaagaaaatttaatttgttttgttctaatttactgtaatactcagaatggagtaagtgagctgttttatctaattcaaattgatgattccagagaagtaagtacatctttgcctcaaattcaagcaagttacttgagaatcaagtgagttttgctgatttacaagcattattaccgtacattaacttgcttaatgaaatcctccggtgcagttcaaatttattatctaaatacagattaaaagatatttcatagtttatataataggatttgtccatgagcttttcaatgaatctatagaattgggtttttcataaatgtttcaagctttgctgaatgtattctttcttggagatgacttattttccttatttttccattaaatctgctctctcttgataatacatacggcttatttcacaagatgtccgtttttgcccttgatcagggatgttatttattacttatttatcaattccatatttccataaaataacttcaagatcaatgaatagaaattcctccactatgtcctaaactgtgacagaactactggtgtgttaccaatatgaaatgtgaccttgtgctattgtttctgtatgatgatgttaaatttaagaaatctccaatatgtagtagtcgtttgtgactttgtgcttttgtttctgtgtggtgatgttacatttctgctcaaacttataattggtatcatttcacgagtcatacacgattatgacattcatgacgttctgaatgtttagtgctgtaattgaggtctgatcctctttttcaagttttcctatgaaatatcatataaagcatgtgtcatctggatataatgcaattgcagtgaagcgatatatgaaatgataaggaataaagacatgcatgcttacttcagaggaatgtttttttttttttttcgctatcgattaaatgaaaatttacccgttatctgatgtgatataaatattttctgagcagggatggaaatctacctgtttcgtttatccagaagtacctgatgatgaaactagctttaactaatgaagctgaggtgagtcaatgctttcttgaatatcataagaagattaaatattgaacaaactcaatctgaactaaagtttaccatatttctattctagctgaaaaaagaaagagaaaaaattatgaagagcttaagctgctttttcactttagattgtgatattgtcatgtgggacaatagttttgaaacttcaagtttttcccccactagtctactttgctgtttgcctctaaacagagttttgtaccatgtttacttgcaggttgagataaaatgtatgggacaaccagtggtccccactttgcagttgtataatttagttgatttgtggctgcaaacaacatcaacatcagaaagaattccagcaaccatcgggtcctcagcgaaggactttgtgatggtgctggcatatgctcgaaagactccagaatcttgaacgcgattgtatgttgtataattcagcggtttcagattataaatgttaatgttttcaattgaagcattctgcatcaggggaattgggttaaaaaacaaacaaaaagagcagctagcccagaaacgagcgtgttgtgggggttcctttcggtggcatggtacagaattaggtgcattgcactactgtcctctccattccccttccttcttacagattatttgacaccatttaatgaagtagcacgactgatacacggttcactctcgacggcagggaaccatcttgcttgtaacaatatgttcttgtcttaataattatagtgagctctctcgtccttttctattaaatcatgttaaaaaggcagtgatccataaaacctgtggtgaataatatggcacatttgatgtctttctgttttatacctaacattagtttcattttcttcgatgaaacatgtgttttgtcgtttttggatttgttttgccaaattaaacctaaccaagaagtgaaaaatgaaagatggcgactgtgcaaacctacaaaaacatcttcctgcagtactaaagggaaaagaaacaagataaaaatcgatcactaaaaattttccttccaacaaaaagcattgctttatcgtgtagtttaaagataaattataaatatgtggattttaacgacaaagcactgctttgtcaagtagaaaaacctgataatggtcttgttttttcagccttgattattgttaaagctaattacttagttaatattgtaaaggtcttcagataagcactgctgctgttgacaaacatcgacgctaaatggaccatgacatcaataattatctacttttttcttttttcttcttatttttcactttaaa

SEQ ID NO: 36546 - DNA, 2740 bp, Cannabis sativa
tatatcctaatccagattggactcacaaaccccataatagggtgttaatggaagctgttatcaattgtttataagtctaacaacactagttcacactagtatatcaattagttgataagtctccacgtggcatttaaaggcctctgtggttcaccattgcttcctataatgagtatcatatgatccctttcaggtttctctgcactggtagtgtgcagtgagaagtatgatggatcgtacatcttttttcaatgttttcttaatctctcattctctctaaatactaatacatataaattgtaatccactatgtttggttgtttgtgtcagtgttttaaagaaaatggattgagtatctgatcttagctgaaatgacatgttttttgcagggatcgagattatgacagagactatgatagggagcgtggacgtgggagagaccgggacagagatagggaccgagacagagacagggatcgagacagagaccgatatcatctcagagatgagaaggattacggtcgcgatagagatcgagaaagggattgggaaggtagagagcgggaaagacgagacagggaccgtggtggtcgtcgtcgcagccattcaaggagccgaagcaggagtagggatcgcaaggatcgtactcgcaagagacatgctcgcagcagcattagtcctagaagacgggatggaaccgaggctactaacggcactggggaagagccaaagaagaagaaagagaagaaggagaagaagcctaaagatgatggaacagatcatccagatcctgagattgcagaagccaatagactcagagcttcacttggtttgaagcctttgaaatagttagtaaaaacgctatagagtgctactacttgaaaacttgtttcttcatttcaactctgtatatctcaatttggaaatttcaaagcctaattcacatgcttatatataattgtttctataatattttgaattgataataataagcctaaaaaacaacaacaacaacaacatgaacaattgttactaattatatattttcattaaactatataattgaagaattagagaaatttaataacaattttattaactaatataatgctaacaataatatctgtttttcattcatggaaggggctcaggtagtaaaacgccattgttatcgtactgaagagtacctgaaacattcaatggtttgcattttcctcccattagaatcctcttcttacacaactcaacaccaccactatctcttctacctttctctgaatcttcatacttgttgttgttcagtctcaccttccgacgactctgaaccactcccgacgataccctaaccagtttccccgatctatctctcttcgccatcaccactacaccattagcaccgcctctgttacatcgaccgctaacagtctcagtcgccgaaggtagaagaagaactttcttagtcagtttaaccgacctcattttcttcgtaagcaatccggaattttcccgagaaacgaaggtgttggaatctcgatcattcttcgtagtcgtgttcttcttcttggagcggaagacatgagtgaagatggaaccaactttggtggagagaaggtttccggatttggaaaacgacgtcgtttggtggtggttggtagcagtaatgttattattattaatattattggtgtgagagtgagtggtaccaccgccatgaaaacgttttggaatgagtagtttagggatgttgactcttatactggttttactgctaggaattttgatattcatcaagtatgatgatgatgatgatgaagatgatgaatcctttttcttccctaagctaaaccctaagggaatcgcaccaccaccaacgctcctatgattagtagtggaggagatgttcttcactttcattttgtacaagaggttgttgtttggcttccaagaaaaatggagagaaaatgaaaatgaaatggaaaatggtttttgggtttttagttaagtgtgagagagagaagatggagtgggtgggtgagactgtgaaaattgagaagtagttttctttttatttattaattattattttattatttatttttaatatgagtaatatatatatatatatataggtggattttattcacttggtgtagacaaaatagtggagaatttttagggggagagtaaaccgattcagctcttcttttttttttccctccaaattataaccttattattattatttttattattattaactctaatcttaattgttgatttgaacaattgtttagtctatgaaatgaggtggacttaaaatacggcctcgagatgttacaaatttgaaattagacattattttattagttttgaaaaaaataataatagtattttataaaaactaaccctaactcttagggcttaattgtcactttattgttgttattctacttgtaattagtgctataattttgtgcgtgttcgactggtttagcctatattatttgtgatttttgtaattagtgctataattatgtacgtgtcatgtttaggtttgtgtcgttttttatacacactcaaatttgtattttatttttttttacaattaatgagataattataaattatagtttttttttacaatttgattttctatgcttagaaaatcaaaaaatttgatttataaaccaataattaaaaccctaaaaaaactataccttttttttcaaaaccccaaaaa

SEQ ID NO: 36547 - DNA, 4120 bp, Cannabis sativa
aactgtatgtgcaaaagaactcttataactatgaaatcaaaaatccaatctgaaatttcttaaaaacaatatctagatgcatcagattatgataaaatgctatattatagtctgaaacaaatatttaccgcacaaaagactaagatcctgcaaagatccaatagagaactagttatttcacatacccttgaattaatttatttaactgtggccataattcttcatctctgatcttgttaattgtcacggaaatcttatcaacaacttgaattgcaattcttatctttgtagatagaccctttataaaagttctagttgcctcaactttgtgtgcctcagcacctctttcatccaatcgcttcagcttacggcacttcctatcatgcattacccgcattttttcctcagcctacacgtttattaacataatactatttagcttcacatcaacaataaaaatatgtgacatgcccctgcatcaaaagcttacaacccagataataacccagaaagacggaaatagtttaaaaggtctgatgcaacatgtccaaataaataaattactaaaatcagaccctaggatcatgaacaccccatttaacagctagcttatgttaatcaaaactcacaagcataaaccgagaacctctcctcgtatcataaagacaaaccaaacttttgaaagttccttctgttattatcacaagacactcttaaattatcatctcaggtcatgtttagaaataactatagggactgactggattgaatagtcggaatgatatgttcttagtcatgtaattagagagcaaattgaaaagaaaaatccaagtacctaaattaatccaactaacatgagataatttaatcaggttatgaaatttggataacactattcctgccaatacaatttcctttggctatataattagacataaaaaaattctctatcaatcttttcttctttctgaaaatatattttctcgttggaaatgataattcctatgatcctatcattcttctttaattattttctagaaaatgtatcaatcagatccaatgatatcacatccaatctagagcgagccctcaaaagaatgatatgaatgaaagcatgaagagaaatgttcttgtccgagaaaccaagtgaaagtagtctaaagattagtaagatactagagggttccctgataaatgataaaataacgtcaatatatcgtgggcttgaacaaaaaacagtataccttaacttcattgtagagtttcttctcccaaagatacagtttatgtaatgtagaagaaagattttttgacgtggtccgcaattcttcctcaaagtccaactgggcaggagcagccgcagacgaagaggactctgcagccttagatgtagacggctgtgaggacattaccgacagagattgagtacccacgtgtaacatcttggaagctgcttcaaaatatagttgaaagtaagttaaacaatgcagctaactgaaattccaattcacccaagtttatacttttattttacattttgaattggtttgccgtaatcataggtcatcatgaacaattgtaatgctacattattaagcaccaaaagaaaaaggcagacttcatcacgagatcgagctagcaaaaccggaatagcctgaattctattaaaaaattaaaaataataaaggaatttacataccatgtctacggttgtacggaagctttcccacctcgagcatctgagcaatttcattaccagactctgaagctcgttgaaactgggtctcaatttcccttaccgcttcaaaaacatctcgataaccacctcgacccttgaatgcagccccgccaccgcggtccttcgacctctcctcttcatcaacaactttcttttccacgacgtgaacctcatattccatcccttcattctccatcgattcacgcggcctagtctgataatgtgagacctctggttcattaaccttgtcatcaacagccgcagcggccgccgccttggcatgcttcccaccatcagctgcagcatacctttgatcaccgtgaacttccttcacaacctcgtgctgatattcctcgtcttccaagtcaggaattccctcctcttcccttacctccctcgagtctcggctaggggtgtactgtgaatagtacttgtcctcggcctgaaatgggttcaaaaaatcccaagccgaagctcttggtggtgaaggcggaggaggaggtggcttagacgaagacgccacagcctgggaagctccagccgacatagccccataaggaggcggcgaagaattaccataatacccacccatcccactggcataattgtcatacccataatacggatattgattctgattattgctcatatgattaggataagggtaatatgaagaagaagaagaagcagaagcgtcacccacatggtgtatgatctcgggactgaggggtctctgctggtagaccacagaaggcgtagctttattctgcatataattcatatttaaaaaccctcctccatacgagcccaatcctccttgatccgtttccatgtaaccatacataccaccgggactgtgcaaaggcgatgaatgatccgaatggtgaagcgaacccgaatcatccgagtccgaatcggagtggaattgtagatgagcatcggaattgtcgtgattgtgcggcgatttcgaagctttgatagtcttacttacatcaggatcgcctttccgttgaggaggaagattaagcttaggagagggaggagccccagaagaattagctaactcctgctgaacaaaagtttgcaatgagttaccaatacctttaagagagagaatgtaagccatgtgagactcagcaaaggcaaaacgctgttgaatcgctcggtcaaggtggtcacagcgctctcggcagagcgccaccgccgggagatcatcgacctttgagctggcgcagcccattatctttttttttttttttctctttttctttaagctaataattttttttattattattacggaccggttgaaaagagagatgagggtgagttatgatgggtagatcaagtaaaccacggccatgattgagatagcgatgtagacagtggggcagcgtttgtttctggggaaaatttttagggttagaagaaaagaagataaagagaaaaagagaaagaaagaaagaaagagagagattgtgtgggagggtgaagagggaatctttgccagcgcggagttttgtcgtcggcttgtattgtagtagcagtagcagagaaagagagagaagcccaaagaaactataggagagagaaacttcacactgtatcagacagtatagtgttagtgtgagaaacaaagagaaagagaaagagtattgtactgtatttttctgtacacgtcggtgtataattattttttaaaaaataaataaaaaataaaacagcttatttatttatttatttattgatgtacctttttgagaacatctctctctggtattaatattattattattatttttaaaaataaaaatggttaacaaagtagtgaattgaaatgagagttgagatggaggaggtatgatttggttagttagtaccaaaaataaaaataaattatgaatgtggggacctgatttctttctggtcattttatttgcattattattataataagggttattaatattatagagttcatggggatatttatagctacagaggtgtttatatggtttgacggaaagttgaccctcttgccgccatataattttcccgttaaactatttattctcaatttccagttctacccttgtattagtttcagcaacacgtttgctttctttggtttttccttttcttccttttgaaggacattaattttcttggttggttccaagtcgaacttcttctatagaaagtttttggttttaccttctctaattcttggaaattttgttgtggaccgatttatcgcatattttctatgcccaaaaagaaaatactattttcatttttcacaaatttttcttttttttaggatgtcttctttttattattatttaataattatattgtgttgtgtttagacataaagtctca

SEQ ID NO: 36548 - DNA, 10321 bp, Cannabis sativa
aatcacgtaatacgcctaaaatagttagggtgttacaagaactgtttgataattcaaggagtatctaggtttagttcttgttactactccgcgacataaaggaacgagagtaagagaactgaatggaagaagtcttgttattactacaaccaatgtaagattttctacaactgttatgtgattaatttattattttccaagatttcatatttaggatgttacattatagatatataatcaacatacatgtttagtaaatctgattcttggtaaaataagttccaacaaatatctctagagatcgttactggttgtgttcagcagtccggcaaatggcactttctcagcgtgcttgatctatgcaaagtaatgtgagtttgagatatgttaagatggtgattggtgaaggatggactagtcaacttggattttacttttcctggaaagtaccaaagggatatatcttttgtctagatccaaatatgtggaacacatgtcaccttgctgagtgccatgtcactttgtgcaaaaaaatttataacatttgccctaacatttgcattggaacttcttcttatacaaaacttccacaggttactcgtcactcagataggtgacacgcatttgtacccacgtgctgacctagatgtgatgcatgttccacatgaggcgtgagtatctccccttgtcttttcaatatctcagcattaaatgtgttgtcttgaaaattgtatgtgggagaatgtgttgacagttatggggagttgtgcactgatggtttcacattcgtgatgatgaatttttattgtattttggcgggaattgaaaatttaaaaccaccatactatcttacccctaggagcttctataaagggcccataatctccattcaacatttttagtaaatttccatctctaaaatgagaagcataaatttcttcaagctattcaagttcttcatctattcggactactcttttctagaagtttcaaccaaacatcaaattcaatgagtaagttgtcttcctctcatctttaccaattttcatttttaattgctctgtggcattactagatatattttcttgttctacgcgattactttagggatattgagtttttcattcgaatgagtgtaacctgaatgttgatagttgatatcaatctagaacgattatgtgcaaaattatccctatatttgcttggccttttgttgtttaatttttggagcttctccaactactcttcaaagataaaccaagactttgtacagtagtatcatcgtcatcttcaagtgggctatcttcgtcattaagattttctaggtgggaagtttcgagttagcctccggatcatgaagtacagcatcatcactaccacgaccagattggcagagaggagtacgaccgtttcgtctgggtgttacacaaaggttggggatagtatcttttagcctcgtggacatacaagttttgggtagacattctaaaaatccttcttgaaggttatctaaggtctttaaagaggcattttatgcaggcagagatagcagtcactgttgccaaacataccacgaagcttgttccttcacatagggcaaaaattttgaaaacaaaacggatcatgcaaacaatttctgttaacgacccacacataggccagctcatggtcgccatggaacctaccaagaaaccactagaacatgaggaaccctaggagtaggaggagctaggggtctttggctatttaatgaagaaagggaaggtgactctgatgataagccatacgggggatttaatgaagcggatgaacccattttggcatccaggtagctacttgtctgaggtatttactatgaggatgaccaattcacagaggcccttccacttcccttgaaggtaaaaacccaatctcgttagagatctcctctatctagcctcactgcaaagagattaaataatctccaagaaaaaggtcttctcggagatgttgtaatattcctaccaaggggaggcagatggctcatagccctagtgataggctctatgcatggtttggtccccatgccaagtatggagctatgctgccccttcattcttattataagaaggtggcaaactattacaagatctatccaacccagatcagcccgaaggggttaaaatacttatctgctttgtcatgctatatattgaacaaggttggggagaacaataaaaacatgacatgaacttattcttcgacttgaaatcaaacccgaagcaaaagaggtaaggatatttttacttctcctagctagattattcatggtaggtcgacataaaaatttccaagctgtcaaagatcgatggacttgcacaggactactctattccgatggaaaccatatatccttctaattagtcgatccataccactttcatccttttacattgaagtttagggaaagaggccatgatattcttgggatgtcttagaggggtcaggatattttgaggctagccaatagtgaaaatttcttacattacggactatatccatccgaggaggccaaggaggattttgcttctacaactaaggagaaggattccactgatcagaatatattggacaaaggaaagtctacccagcctcactcggcatcatccccactctaacacccgatcaggattagtaagctcgctggtgaagctgtacaacccattctacctttcattgtaggcaagggaaagtcagtttttgaagatgagtttataggtgactcttcaaatgatggtgtcccttccttttttctctaagatggtgctcctttgaagatctagggtggagacaatttggacttgtactttcttacttttattcttaatctattttatcaattttcttaactaagtatttgtgctctgtgcagccatgccttccaagctaagtagtatcgtgaagaagagaaaggaaggagactcctctggctaggacacccctgcaaaagtagtgagacaaggagatattactcttttggacaaaggactactctgggtttcacccatgggtcttctgttctagcaggaccactattcttatgtgactagaaacaaagaaggaaaatgatatggtgggctgctatgaagatcaggttctacacgatgtgaatgaataattgtaaggagctaatcagcagccgatggaattcttagtcagagttctactaaaagagctctcaaaggtaaaagttcacaactttaattttcttttctgtatgtccaatccagtatgcctttaacatgtctatttttctttttaggtgacccttaggcttagccattgctattcctaagctagagtttttgcctcctaaaacacttatgacaatactaatctgaagacagccttgcaggaagctaaggatgaagttcagaagaaggaggctaatctaaccggggtgaataagaagccttttgacttaaacaaagaggttgaggaattaaagcaatagttggacaacatgtcgagcgtggaaaaactagaaacagaccttgacaaagaggtggccagggttaccaagatgaatgaggacagagggtcttcaaatattactttctatccatgagggccaaatcaaagaattggctgagaagctcaagaaggagaaaaaaacttcagaagggcataaaaaggctcttgagctgagaaggaggccaatgcccaagtcaaagaaaattatgaatctattggcacagaggttttctataaatttttgaacgccaacccaatggctagcttcagttatcttgagccaaaatttcatgcctagctaatcgaactctatgaaagtcaaaaggctgaagaagatgccaaaaaggtcgtggaggaagcaaaaaaggttgaaggtactactggtgaagctgctcatgaacataccgagtacactgaagcagctgatcctaattttactatccagcaacaagatggatcctcgatggttgattatccgaactctgtgattacgttctgaagatgtttcctttattgttttttttacttcggcctaagggccatacaatttgcacaatttagccagccaagctactttaaacttggttttattttcacttatgcagacatgtgtcttgctaacagctttgaatcctaaacttgtacaattttagcctttatccatgtgataaaaccttttctcatttttgcacatacttaattcctagttttttgcttaagtattttcatgtgccttcttacctacgttgtatcgatgtaggtgcctcccaagtgaccgagcagaatttagactcttggtcacttggaaattaaccagaggatgccacagtgctctattcggaccttattcttgggtctacatatttgtacacgtgaaaggtagctccctgactttaaaaataaatcattaatttttgcaagcaatcatataaaatattgacaaaatttgaacgataatcaatttctttatttatttattggtcgtaatgtggttacttcaataacttacatctattaaaaataacaaggctattatatggtcaaatggacctaatctaaataactttaaaaaacttctgaatgggaaaaccaaccaaagtacatcaattaagagtaatattttatttcataaaaatttgctttaaaagtggccgtttggacctcagcaccagaaattttagaacttctaaataaaaaatgaatccagaagccatatttttaaaatgatgtttcagagcaacatgaaattacatggtctttggacctttgcatttactgatagtattttctcagatgttctccgttccagtatcgaggtacgaaaacgagttccacattttcatcatactaacccaatttgtaggctccaaagcttgtgactttagtgacctggtacgacccttcccaatttggtccaagaacacttgtctcactatcttttgtgtttcacaaaacccttctaagcatcatatcccccacaaagaacttcctctcttttacttgcttgttgaagtgtctagccactttctgctgataggcttaaagctttagtttggcttgatctcttccttcttaaagttcgtataatgactctattaggaggttacggttagcatcttggtataatggtagtcttctataggatggaggctctaactctacttatttaatttccttgtagccataatccaatgcaaatagagtctggccagtagccatctttcagttattctatacaaccagagtacttcggataattttttaggctaactaccattagcttctttaagatgttttttcaaagtttctttgaggatttcttttttgctttaacttgtctattttcttgagggtgagctgcagtcgaggaactcttaacgattccatggttcgtgcaaaattctatgaacatttggctgtcaaactgcttgcctttgttcgagaaatttttttaaggtaggcgatacctacatataatgctctttaccacaaagtataaaacttttttggaagtaattgaaaccaagggattagcttccgtgcacttagtgaaataatcaacatcaaccattttatattgaacaccatatttcccttctaggagttgtttgataaggtcaattcccaaattggaaatgaccagagactctacatttgaattatctcgttgggtgaagccctagggatctttgcaaatctttggaacttgtcacattttttcacataggtctttgaatattcaattatacttcggcagaagtatccttgtcgaagtacttttttagataaacttttcccccaacatgattactgcagaacccttcatgcacgttagtaaggagccaagaaacttcctctttcatgatacatctcaagagaggtagggagaacccacatttgtagcttaccccatccaaaattaagtatcgtacaagttttctcattatcttccaagttttatgtatgtcaattaaagtactccaatttcgagataggctacaattatggtcaaccaggtaggagtgtcgtccaacattttgatttcttttgagtaagagatgttggggtccttgaaggtatttgaatgtgttgattatgcacacatcaggcaagacaaacttgaggccaggaccttaaagtgtattttcttagggtatctagaaagagtcaaaggatatatattgtggtgtctagagcctagaatgagaaatttcataattagtggagatgtgacttttaatgaatctgttgtgggatttattaacaaaactgcttgaattcaagccaatactgacttaaatgaaattaaagctctaggaattgagcttgaggtggaacctccgtcaagagtggagattgaaacacctgtagatcacggaagtgatgattcacaagatgattctagaagtgataatcttgaaagttataatttagctagagatagaacacggagagaagtaaagactccagatacgtacagacatgttgatttaatcgcggttgcatttcatgtttctagtcagattgtgcatgaagagcataccaactatgcaaaattaatgaaaagtaaagaccgaaagaaatggaatggagctatgttagaagagatgcactccctgaagaacaactgaacttgggatgtaatactgatgtcggaagacgataaagttgtcagatgtaaatgggtctatagatggaaagaaggcattctgagtgtacaagaggcacaatttaaagaaaggttagttgcgaatggattctctcagatggaaggagtaaatgataatgagatacttcctccgattgttaagcatagatcaattagaattatattgacacttgttgcatgttaagaccttgaactagaacaattagatgtcaagacaaccttcctatatagacatctggatgaaagaattatattaaaacaaccggaaggatttgaagaggatggaaaggaacactaggtatgcttgttgaggaagtctatgtacaatttaaaatattctttgagacagtggaatgagatatttgatgattatgtgaccaagataggtctgaggagaagtaagttcaatctttgtataaatttctgagagagaaatggcgatgtgctgtatttgttactatacgtagatgatattttgattggcaacaaaagtttacaagagatcaagcacttaaaactccaactaaagacggagttcgaaatgaaggattttggtctggctagtaaaatctcaggcatggaataagaaaggaaaagcataagagactagtgcacttgaattagatgagctacatctaagaggttctagatacctttgaaatgggtaactctaaggcaatgagtactctgctttcacaacacttcaaattgagtgctacttggatgacgaaagatgaagctcaaaagttagagatgtcgagagttcactatgctagtgttgttggctccttgatgtatgtcatggtctgtactagattggacatagcatatgcactaagcatggtgagtagattcatggaaaaccttggaaaggagcattgggaagccctgacatgaattctgcattatttgaagggaactgcttagaagggacttgtgtttggcatgaataaccagaatgaagacttggatgttatcaatggatatgtggactttgattatgcagggtgtataaatacccgaaagtctttaatcagatatgtatttactatgttctgaacaattataagttggaaagcaaatctttataagggtgtggcactttcgacaactgaagcagaatatatggccttgataaaagcgatcaaggaagcactgtggttaactaggttgatggaaaagttgaaactaaatcagaagattattactgtttattatgataatcagagtgtaatacaattaaccaggaattgtgtgcaccatgagcatacaaatcacattgatatcaagtttcatttcatacaagaagttatggagaaagaagctgtgaagattaccaaggttccaactgaagacaatacttctgacatgataaccaagatagtgtcgagtggtaagtttaagcattgcctgaagctaattggagttagctgagcttggaggggctgaggggaacaacagtatttataacaaagatttgtcaagttactttaacttgaaaccaaagtggagatttgttgattatggttacaagttttgtcatctggaaaggaaactatgaatccaaagagtagatacaggatgcttggtgtgaatccaaaaagtcttgtgcggaagactttgtagaatctagagggtgtttccagataagcttgtaccgcttatgtacagtctctccggatagcttgtcattagtctagagatgaacttccagatagcttattgtcagtcttggttgttcatctgggaaggagcgcttgtacgtatcaagatagcttatccgtttaaagattcttgattgtttgtataaaaaaacgcgttatcaaggctgacgtgaattattattgttgatgatgtgatagatcatttaagccggtgtaaatgtgctaggataattttagagataattttgggcaacaatataaatctataaatagctatcaatctttgtaatctgagaaagaatcaaaccattattgcttgagtgtgaatcgtgataatgtaaggtttgagagagaaattctaaactagagagagaaactttttcttgtaatctctaagattttgtgaagattcttgtaaccttataaacactaatatcaataatgatatgactgttgttgttcccactgagatgtagagcattggacattgttcaaactcgttaaacctggtattcttcattttatgttttacttgaattttgagatctttagatttattatttttttgattgtgttgcgtatttattagtgtgatatactgaatcgtaaattattgattgtttttgtttcacacaacagttttcttacagcttgattcatttaatatgtagtttattttttaaagtcctattaatttaattttttaataacaaaatatttttaattattttaatatttttaaaagataaatcatatttaacttctaggttgtcaataacttagaatttggaaggggttgttgtcaactattttcgtagtttgagtgtgcttttgcaaacagaaaaattcagaaaacaagagtttaatgtattatagttccgatggaaaacaaacttttgttcaattaacattaattttgttatggttggcttcaatgtttcgatcctttatagttcagcctaaataatagacctagcactactacaaaaacactcataggtgcacggtttattgacacgtgctcctctatggcgttggttatttctataataatcgacgtcgtatgtattatatatacagttggaggattttcgacacccaaccgacggtattagttttattaatttttatacttacggtttttaaaaaaactgcctctaaatgtcaatttcgaattaagcggatattttcatattctttaactttcctttttataaaatgggttgaaaaaatagaagctaaagacccatattgtagtagtgtagcaatatgaacatattttcttaaaaaacgatattatacacaattattattataaatgatacatacacagatattatacataaagatataaactaattgcataccaaattctccactaactttttatttatttattttggcgctgagaacatttcttgtgtattgttctcagtgttatattaatgtttaattatttgaacatgaaaatcacaacaaataatacataaataaaaaagggatcaatctttgtttgccattatagtaatatcataacattaattagagaagcaacttatggagaaacgaaaaaaaagtggtttacaatgctttataagggaaaataaaatataaatgtactacaatgcttactttttaacttttaagataatgaaaaataagttgaattgatcagtatcatattttcgcaaagagatatatgaatatttgagtatataatcacaaacaaatacagatacaataaaattaaagaattgcgaaagcagaaacaataaagtcgaagttggaaaggaaaaaaaaaacaaatggtgcaattgaattaatagaacacgtgcttcaatttcaatattattccatgaactataaaattgagggaaaatattattttgcactttgtgttttgcaaaaattattaattggacgatctgttttgttaaatgataaaataaactctatattttctaaaattatacaa

SEQ ID NO: 36549 - DNA, 3863 bp, Cannabis sativa
ggagggttgtcaagtttagaagaaggctttggaggcgagctaatgaaattggaaacctcattcatatccaaccagataccatcaaaaggaagaacatctcgaaacaatttgatctcagtacgccaatatttataagaagcaggatttaagaaatcggggaagtaaactggtccaggccaaacctcccccaagtatggaacaccatcacgctttataaaaacatcagcttccatccctcgtaagtaggtcttatacgtttcgttcacaccaatgcctgtgaaaggtcacaacaattattataacaaagtaatagcaagtaacaatttacacaattcacttatttgttaaagaaaaaactcctgtgctttttgtcagtgaataccaggatctatgatgaggacatatttctgtccattttgatgaattttgtctacaaaacgcttcatcttttcgactggaaagttaataggatcgagagtgaaatccttataagcatccatgtagtcaatgtctgtccagataacttcaagggggattttagctgctgcataaccagccacaactccttccacatctgaaacattcttgtaaccgtagcgacattgatgaaacccttgagaaaaggaaagaaacaaaatgaggagtcttatcctttgcatttccacgcaagtaaatttttatatatagttgcaaactcatgacttctcaatttcaaattaactactcataaactcataattctttccttctttctcaacaacatcgtaaaaaccttcaaatttatttaagctcagttcaatgaaccagaaagctagcataatataactaagaaaaacaacaaatttagcaattgtagaacactaaattccatctatctacacagtgaaaaaaaatatattgctaatatgttgaactccaatcaaactttgcttttttaatcctactaaaaattatcgataaagacaatttgtcatctagtttctttccttctaatttattattaacagcacttttaactagctaaaaaaatttagaaggcacaataaaatgtaactaagaaaaacaacaaatttagcagttgtagaacactaattccatctatctacactgaaaaaaaatgttgctaatatgttgaactccaatcaaacttttcttttttaattctactgaaagttttgagataaatttatcaatgaagacaatttgtcacctagtttatttcctcctaatttattatcaataacacaatgaatagttcagacactatttttagctagctaccctacccaatactaaaaatagtatataatccaatcctaccctaccctacaaagtgaccataaagctaaatctcaaacttaatttcctaaatcatataacccaaatctgacaacaagacatccaacatacaagcaaaaacaataatttgacccaattattgtgctgattgcttttcctattacctatcctttttctacttttacaaagattagtataaagactgttcagttctatttctacctaccaaatgaccagtagggcataggggtcggacggccaatgagctcagtatactgatccaacaccgattcgggattaggcccagcaaagaaatacaagtcaataacccctccaatcatcttgtaagtgattctgtctccactataatctatatccatgccattactattaagcaacaaaactccatgagtggctccagatggtgacctcacatccatatagaaagggtgggaaccatacagattaacatcggtattcacactaccaatgtcagcattccacaaagtcagagtctgattgggcctaagcctgaacgatttcctcgtttgttctcccagtccgtacaggttggaccggtcctttgggagagaagaagatatctgtaagaactgatccttgaaaaccaagcgagtctctggttttgaattcaccggagaagtatcgaaaatggtctctccggtggatctccgggagacgctgaagccaaatggggtggtgttgtggaaggtcaggaccaggtctgaattgggtttcgccggaaactgaatttccggcaagaatcggagctgggattgggtgtgggtttggccagggattatgtctttgggtacttcccatcgtttctttttggcgtctgtaattcgaattcttagacggtctgctgtgtcgtaactggattgaatgaattacagaaatcaattataactttttaacacatatataaatgtccagaaaagacaaaagatctttttatagcattaatatgaagttttacgacaattcattatactcttatagaaacatgatttgtctatagtgacttcacagttcacatgaatgttagttataaagtgtcggaaacataaaaagtaaacaaaaaaaaccatacatttccttcgagatgcagacaagaaattggattttatatacctgtataactgattatgagatactttatccaatactagtaataaaagtatttattaacaaaaaaaaacatactaaattatttttttatggttagttgggttttcggtatttgatataaagaggcctttgattgaccagtcagaaaaccgaattggggataaaattggcaaatttctttacttagcaaaataaaatcttacaccaaatccaaaaacaaaacaaaacaaagagaaagtgagggagatttacctagcagtgagagtaagagattgaatatcaggaccataagttgagctgttcttgatgagttgaagattagcagtcaacaatttgcccgagtactgactgtgaatggatttgattctgtagccatacccaacaacagctgtttcttgagctgtggaagaaagaaaactagtagagaaatgaaaaagaagaattaggagaagaaaatgatgaatttgattatgtgaaattagtgatggaatagctctgtttttggagctatccattatattttcacttggacaaggaaggaggagttaatcatcatctgacttttataggtcccatagaactagaagtcgacttaccaagggaccaatgtcataaactaaatctccaagatcaacgacaaaaacgtccattctatgaccccacttttccacttattagtttagttacattgtaaattttttagtaaaatgacaaaattaattatggtaatttaaaataaggatgagattaatttggtattaaaaaaataaaaagagattgtggtatatttgttaaatagatagagttttcttatttaaattattataattaatttttaatgtttaaagaatgtatttatattaattgtttttcaaaaaagttgagtttcttgttaagaaactatgtaaagttacgtctttaatgtatattttgtttctttattaatataaggaaattttgctaaaattatgtctatgtgcaatgatttatttgaacggattaatagtttgtttgaataaattctgacattatttttttggaaatatttttcgtttattgtttgattgtttcttttcttataaagcatgatttatggtgtattaattaagaatatattgtcactgaagttataattatatatggtaaaaataaaatattttattatataataaatattatatctatatctatgtaattgatttattattcctttcttgtttttttttttttgaaaaaaagcgttcatatattagaaaaaaagatggttagacttcgcggtcattacaaaaaaggtgttcaggaatcgagggaataggaatacatctgaacttctggtgggtaaacgcccacatagccacattatgggcaacaaaattacagtttctactaatattatagaaaatacaactaataaa

SEQ ID NO: 36550 - DNA, 5724 bp, Cannabis sativa
ggttcaccctctagccgtagcgagcagaccatggctactcccgccagcgacaacactttccttagattgaaccatctcgatattcatggtgacgatgccggttcccaaggggccgttgggtcagtgtttctctttatttcattcaattgcaaaatcccgcccttaatttggatatgctttttccttctttttacttttatgcatgagggttagggcacaacgacaattgctcatattggaagtattttatgttagtgattggaattgtgttctggattatatacctctttgaaattttacacttagatgcaaatctgttattccgttttgtgcattagtaattggcattgttatgggaactttgattttgaattgttctttgtgtctggacatggtaaatgatgttcttccattgtttagcttgaatctcttgaattctcttttaacagtaccaaaaagaaaaagagaggtcaacgagctgttgggggtgataagagtggaagagggctccgccaattcagcatgaaaggtttgtgaattgatccattttatgttatttagttcagtattgaatactttctgtgtatatgagtattggtcttttatcaataaatgaaaaaacttattgtgggtgatggatagtagttatatgtatatacatattagttagtgtctgcattactgattccatgttgctcttttgctggttgcgtccagtgtgcgagaaggtagaaagcaagggaaggactacttataatgaggtaaggagatgtctgaagttgtttatcatttttgtctcaacttataatttttaatttacaagctattctttcttcaatatcggtgtgcattcttttcgttgaatataatgttctacattgtacccaagacgggttgctcctccttggtacctacacagtaattgctatggtttagtgtttttcaacaattgtaaggttaagctacaagtagttaaaaaagtgaactttagatagtaatatgaaccccttgcacaggattaaggtacatagctttggaatttttatgaattatcgttaaagattaattgcattgaatgtagtgagtgtcgaacaggattcatagggccgtaaggttgtatgcacttcgagccataaaaaatgctaatggcaaactttacatttatactgtctaatttttagacagtataaattagacactacctagggttttatgattttttagttttatgtgtgtgtgggttttgtgcaaatatcttaaggttgatccactatatttcttggttcaattagtgttaattgttgacctcatattaaattgtgttttatgttattttgttcattaagttatctttaaattttgatatacacaaaattgaaggttttatgggaatctgtcagttgaaacagggaaaatactggttgttctagtaaacaaaacaaataagtaaatttctcatgtgaggatggtactagaataatttctttataacggtaaggggaaaacagtcgaatgaagaggactacctgatttttatgctcatttatggaacaggttgtttaaagaatttaaggtgcaatgggtgtttcagcaacattgttctgaatttttgttttattctgttgtaaagataaagtgaatcaaatgttatggagtgtaactacaatggctttattgtgtgatctggttggagtggaatagaagactctgaggatgttgatgaactataggacatctatgggataaagttagatattgggcagctaatcttgttattcaatattaaagagtttaaacgagttacatgtccattaaaaacgagttttttcttttaacttcattgaattttttcattatatcgtacaactaaaaaaatgatacaaccctaagaaaatgaggatatcatctatctaaacgagttctctatatcgattattatttgttgatttagagagtggagattttttgtttcaattcactaaaagacaaattgatgcgtagatattgatgtcaattttctaaagattgtgattggaagctagtttctgcgtttgggtttaggcagttaaaagtgttaaattttttataaatgttattgaaccatgcaagcattgactgatggtatatgcttgttgtgctttcttttaatttttcagaaagctctgtggccatgcaaaggtttcaattttcaatattatgttattatttaagagttttgaacaccttccaggttgctgatgaactagtagcagagtttgctgatcctggcagtagtgttacgacaccagatcaggttttgcctttatttactaacaccaatgtatctattctagtctgtgttttttattctgcgtgtatgaaagtcaaaattacttttgtgctggaaaaggatcataggacacctacttatcagtgaatttctttttggtacattttattggcagcaacaatatgatgagaaaaacatccggcgaagggtatatgatgccttaaatgttcttatggcaatggatattatatcaaaggataaaaaggaaatacaatggaaaggcctcccacgtacaagcgtcagtgatattgaagaattaaaggtctaagtgcatcttctatctgcatctcttgcaatgtgtggattgtgataatgtaacagttctatgttgagttttgagctaatctgactcttcaacatatttgatgcagacagaacgtcttggtctgagaaatcgcattgagaaaaaaactgcatatttgcaagaactagaggaacaagtatgcttacctttgacttgagttgatagcattggaaaactgcaccttgtgatcatttttactgtattctaactttttttgtcttctcctatcaagtacgtaggtcttcagaacctgatacaacgtaatgagcaattatacagctctggaaatgcccccagtgggggtgtagctttaccttttattcttgtgcaagtatgtttccttaacattctgagaaatagatatctacaaggctgttgagcctttcacgggtatcccatttctttatctgacctcttttctttattcatgactcattgaaattccagactcgtcctcatgcaactgttgaggtggaaatatcagaagatatgcaactggtgcattttgattttaataggtaagaaatcctgatcctgtgagcatgtttattatatattatatgctagcattgatgttttggtcagatatatttgcgttgttctttatgttattgtgctgtgaggatgctaggatcggctatgtcaaatgtaattccagtcaaaagttatgtttagtgggatatagactaggtagtgtaaaataaaagcagttttccaactatggtgttttcctaatagaactattgttttaagaaaaacaaaaacaatagctgaatgataattctctatttgtttggttttctctatgcagcacaccttttgagctccatgatgataattatgtcctgaaagcaatgaaattctgtgaaacatcttcccatggggatgatgatgaaatggcacacaattttatcacagatggaggtgaaggttctagccggtcgagcatgtatcaaacgcaagttccccctcttccttcaatttcaaacacaacagtaaggaatccaacctcaccccctctacctggaattctaaaagcacgcattaaacatgagcactaaaaaattacaagcttgatcatcctggccgtggccgataatattagatttctgtatattgtgtagagtaatttaccaagaagtaaattggccagctcatagaattttgatataggtttaggtgacaagcagattcctcttgaattaatttggactttgcagttgtaggtgtggcagattccttgcttcatttcaccatgttgttatattgctgtttttaagtcatttttacaaggccccctctcttgtgccttttgtagtagaaaatggtataatgttagtcactttcttaaagatggtccagttataaatagaattacagaattgatcaaagttgattctgtatcatatattatcttgatacacatttgtcaaatggtattagaaataccatcttatgttcttcattcttgctcagatattctataatacttgtttttgttcatgctaaccacgcaaatagacaaattattgttattaattaaaaaagaattcttgatgtatataaatatgtattaattatgttaatctttgccttaacttataagtgtttcttccttcatctggttgtgaggtgaatcatatgatggtcaagttttggtagaagtcttctacctctcaagggtggggtatcaatgggatgcgttgggataaaatcacaaggcataaacatgtaggtggtgtgggggtttgtagaatcctagattacatattgtaatttggcgtatcttctttttagaaactcatcaattaataactctaaaattaagcgtgcgtgtttgatcttaagtaattttaggatgtgtgattttttagaaagttttctcaagttacgtgcaagtgaggacaaagtatgttggaaatacttgtgttagtttgcagtgccagtcatcattttaggaaacaatcaaaatgacgtactcatgtatactgtagaggtatgttacatgtgaagtgaaggcgttacacttatgatgagaacaaattcgttagtgagtaaagtatataaagaacgatattttactcatgagattttttttttttactgagatcagagtgaattctagttttatttggcatatcattttggagactagagggattcttagggaaaggattaagtaaagggtgggggtcaattgattctatcttgattatgtcttatccttggttgtccgtgaatgtttctcctttcccttctcctattgtttctcgtctggataattttaaggtgaggtgagtagtttatttcagataagtgtgtgagcttaggatgaagaggtggtgagtttttcatgaagtttcttcgagttcttcggcccatgaggattcgcggtattggttttatgagaagcatgagagatttccggtagtagtgcttataaattgttgcaaaagttgaagagtgactataatttactaatgcaaatattggtttatggaaaaatttgtggcagctaaagttgcctactaaagccaaggacctggtttggcgcatggtttcaaaatgtcttccaactcgaacgcgattgacggcaaagaaggtggtagtggatccaacttgtgtgtttttgtggtgttttaaatgagaatgagtatcactatttggtctcttctgattatgcttgggcatgttggtgttcaaccattgtaggatgggatttggtttctatttgaggtttgcttgaggagatgtttggggttatgaattctcatggtataagccaagtggcaatgcttcattgggcaatttagaaaggtcacaatgagttgttatggcagcaatagcaaagaaaggtggaggaagtagttgcgtttgctgagttgagtcttgatcaatatttaaagttaaggtcgtgagaatattcctttgttaagtccattacgtgtgagtgatggtagagagttttggtctaaactagctagatggcatcaagttaaatgtagatgctgctatttttgaggtgaagatttagtttgggtttagagttgtagtttgcgatattgcaagatgtttggttgctgaatggctc

SEQ ID NO: 36551 - DNA, 9239 bp, Cannabis sativa
tttctttattgatatttaaaagatagagattacgttgaaatagagttttatttaaggcataaaacccaacaaatagaccctaatgggtctatctccaatggtcatgttcatggcactagggacgtgatgcatgtgccatcatgcatgcaatgtgaccgtggctgggaatgctcacagaggagctacggtggtcaaaccacctcctcctcgtcacatgatgttgatctcagggaacccaaccccttgatgtgatcatctcctttatggggcagagggcacgaaacttgagaagaagaatggttagggttcctccatgaattcgagctcacatgcatggtcggatttcaaaattagataacaagctcacacgctatgaaaattataatgtataatttttacgtaaaaatttaattttaaaaataaataaattacataaaaattcatatgccccaaattagtttacattattttctaaaaaaaataataacaaaacctacatccaattataccatataattaacgattcatcacctctcttaaatttacaataaaattaccatccatttacatacatatcacatatataataatacataaaacccacccaagatttaatgtatacacattcatagaactactcttgatactaattgttagttttatggtactaaattaggtacgtagcaaaatgatttcgttttatcttattatcattgtaccatatcgcattaaatctcaagatgtgtgtacattaaattaaaacaataaaatacaagtttagattatatacctcttgatgactatcagagtatcttcgaaacttcttatatgttgtatccttaatctagatagtgcaatttgaatgcacaccagtgtcttctaaattgttctaccacacacaaggaatagtgtgggctattaggataaagtgtataacttttgttcttactgagttctcagcacatgagcaaggacaatagagagaaaaatcgatttccttttctttctatatattttgaattttgtagtgtaaaggaatttttttgatttctcaaattaggctcttatttatagtttaaaatctctttaattaaattattgtttaattttttaaataaataaatatttataaccaaattcggttactaatatttatgaaggaatctctcaacaaccttgaaatatctataaccacttttcaaattagatatttacctaattaaattaattaacccaaaaagacaaatttctgagtgttgaaacttggtcggaataaagagttgtataaagatgttcagaaaaatctattttgaattagcaaaatagtaattatttatttttgtaataaataaataagtttttcaaattaatgaaatagaaaaatatataaaaattgttaagacaagatttgtcaagacaaaaattgttaggacaaaagacactatacttgcaattacaaattgtaatttgttggatctttaagggttgaaggagtgttgcaatgtttaaatggagttcagactgatctgctagaaggagttcaacttgatcgaagcacaagtggatcttgtcttctcagatctaaggaatcttagatcttagaacttgattgtattcaagtgtatcggtaacttttgtgtaaaatcattttaggtaacacttttttaatcagttttttatttttgatttaaaaaagtgaatatattttctgaaatcatgttctataaaattattttcactttttaattttttaattgaggatcaaaattttaaaattttgaaaacaaaaaaatcactttctgactcgaacctaaatcttggaacactgacggaccctggccccaactccaaacccggattcggcccccgatcccagctttgtccttgaacccaacataaataaaatcaacaaatataaatgagaataaaatttacagaacacacttttatttttgatttttaaaattgaaaaacaaaagtggttataacatatatttttatttttcaaaatcaaaattttaaaataaaaattttacttttttatttttgtgattaaaaatttaaaaataaaaatattaccaaaggcaatatcagtttgtgttgttgatttgtaaatcaaaattggtgaatatattttgaatgattttaccgtggatattactttatctagtttttagggacccaaacattattcagtcggaatgtatttccaatgtagagagaacttgtaaattttttatgttgagatttatttttctagctttaatggtcaagactaatacataaattcaattacttagcttgaataattaagactttcacattgttcaaaaagaaaaattacaaatgagaaaactatgtcgttttaaactttcgattgtcgtatcttcagcacgtgcgtggagggagagagagactaatgtggaggtggaggctggagcacaccagcacgtgcttcgcttggcagaagaacaaacatttcttcaattcatttcttcccctaaaccagaaaagcttgaacaaacgagatctcatatatacacaccattcccgagtttcgattcttcgtatctttagctacaaacatatccgatttgttttgttttttaattaccaaaaatactgatccaggagaatcgaaattcactaaactcaccgatcatcgtcaccgtaagctctcggcctcatcggcatggctggcgccgcctcggcgctcttcctgttagatatcaaaggcagggttctgatctggcgtgactaccgaggcgatgttacttctgttcaggccgagcgattcttcaccaagctcatcgataaggaggtttttgcttatttctctctttcttataccaattggagttaatgaattacgaaattttaagttagaccattgatggctttcgattttatgattttgggcattgttggatatgatatgatatgtggttacacttacagggagacccacagtctcaggatccggtagtatacgataatggcgttacatacatgtttattcaacataacaatatttacttaatggctgcttcacggcagaactgcaatgctgctagcattctgctctttcttcaccgcctcgttgatgtatgtcatcaatcttttttatttttatttctattggtttaagatatggaattgctgatttgattgatgaagttattctattgaggtgttaatttgcttttttcttaacgtaggtgtttaagcactatttcgaagagttagaagaggagtccttgagggacaactttgttgtagtggtatggatattctttgcatcactcaattcatatggattattgtttttctgtataatataattttgtacttgtgatttcacagtatgagttgcttgatgaaataatggactttggtttccctcaattcacggaagctaaaattcttagcgagtttatcaagactgatgcttataggatggaagttactcagcgacctcctatggctgtcacgaatgcagtttcttggcgaagtgaaggcattcgatacaagaagaatgaagtaggtttattgttttcggtgattgcatcttattgttttttatgctgattggagtagccgtgatgtgtgaccttttttttcctttttatttcaggttttcttagatgtggtcgaaagtgtaaacatacttgtgaacagcaatggccaaataatacgctcagatgtagttggggcattaaagatgaggacatatttgaggtactagatttttttctccccaggtattgattgtaattatgctttaaaacaagtaggcttcatagtgtccaattgtatgaatttcttagaatgttttttcaactactatttatttccaagtaaaaatattaagtaatgttaaccttgatatgttgttgccctacatttattcaatttgatttacttcttccaacttccaagtttgtatctcatttatgcaatgcaatttgagttggagcacgttgtagttgcatttgtttgcagccatgttcttcacccttgtgcttggttgcagacttgcagttacttacctcaaacatttcggacttggcattcaaagcatgggtgttcattctttttttagttatctttctaatcattagagccttcactgtgattggtattataaataatgtgatttatttatttatttttatgagcaataccgagggaaaacttctaatttattttgaaggacactttttcccattagtcaatcttttcttgttttgggccttttagtattgcccaacttctgtgctgtgtcatgatctcaagaaggtttatgtgatttatacactgagggctcatttttttttttcttctctcaacgcttttaaaattcttctatacattcaaccttttgttgattaatccagcttacttggttgaactcttgcagtggtatgccagagtgtaagttaggccttaatgatagagtgttactggaagctcaaggtcgaacaacaaaaggaaaagctattgatttggatgatattaagtttcatcagtatgtttccccttaccaactttgtttttctcttgattttcggactcccttcaagttctgttaaactattgcagactgtttatgtgtttcaagtcagacattctgtatgattgctcctttcttttcccataacattccttttcgttcgttcaacctgttaggtgtgtacgtttggctcgatttgaaaatgaccgaaccatatccttcatacccccagatggagcttttgatctcatgacgtatagactcagcactcaggttcatttcacatgtagtgaacttttaattgtataatattgtttatttttttgttatttatttatttagttttaataaaaattattattatgttttgtgtgtgactctgtttttccccttcaggtaaaacctctaatttgggtggaagcacaagttgaaaggcattctagaagtcgtattgaaattatggtaaaagcaaggagccaatttaaggagcgcaggtagcttttactatgtgtttcttataatttatacatacacacatacataagttgattcaaaattttcttaatattgactgagtagcatcaagttttcagaagtttctcatgtcaatgtttcctttccaatggttaatggccatacttcctacaaattgcaaaatgacactctttagttgtagattttcttttgtttagcctataatggatttcggatttaagggctactttgatagccttagaatccaatttaatttattcttttagtccttgttacatttgtgagggatgtgagtgagaagtttctgatttcaatcactacgaactatgtggtacagcactgcaacaaatgtcgaaattgaattacctatcacttctgatgctacaaatcctaatgtccgaacatcaatggggagtgctgcttacgctcccgagagtgatgcattggtctggaaaataaaatcttttcctggtaataaggtaggcatgctcacatcaagcgttgactcacataccatttgatatactgtatatttgattattataaaatcgttaagtttgtgcattgattctgtaggaatatatgttaagggctgagttcactcttcctagtataactgctgaagatgcagctcctgaaagaaaagctcccatccgtgtaaagtttgagataccttattttaccgtctcaggaattcaggtatgttttctgagcattgttatatggcccaatggagccttaaaatttgctttattacagtctcaaactagaattggaatttgaaatcagaatcataaatacttgcaccagaaaagaaataggttggctaagttcaagctgaagctaaatttgctgaatatattgatgtagtagaattagagttgaaatatatcttgagtttgctagtgagcagggtttctatgttcttacacatgatattgttttttttttttatcatatgcaactctatgaatgatatggaatgcatggtattataacaacgcgtggtggaagtataatggagatgccatgtttgagggatggtagataaaatatatagaggcggcttgtaatataaaatgttgccatgttttcaactctgtttgataattattagttgttttctatcttctctcgagaaatgtcttattagtattaagttatatcgtcaatatgtttgagcttgtgggtgtagcgccacaaatggttttaaacctttgtgtataatgaaaagaatgtcaggtattgaacatgattaaaggtttatttcatgtacaccaaaattcaaaatgagagagactcatgaggggttgctcaaaaggtcagatatgtggttttctcccacaagatttgaggctcaagtcctttgtgggtagctacctacacagtaattgctatagttttcctaaaatatcattggattaggcaggagtttagtttaaaaataaaaaccaaaatgagttgggcttaaccagtcagcagtctaatcatgcatgcacaatcccaccttcctttattgttctttggcaaggaacaaactatgtttatataaaatgaattatggttaatttgtattatgatgttttgattaatacgaacatttaaaattgggactttgtaggttcgctatctaaagattattgaaaaaagtggataccaagctcttccatgggtgagatacataacaatggctggtgagtatgaattaagactcatttaaaggctactcgaatgtgtatattttgctgttactctgagaagtttctttccataattttggtaatagtgataattctccttccttgtgatcttccaatactcgaaatttttgttcaaattgtatgagctgtttgtaatgatgcaagtgttataccaaagaactaaatattttctttttcaaattttgtgagtattgatataattcagaagcaagaattcattcaacaccactcttgttcacttttatgttgaatattgataaaccctcacacttttatatgaattcctagtttctttttagagtataatgagatatgaatgagttaattacccgaaaaagctttctaatttaaataatgaatatttattcttattgtcattttaatttgattgcattagttacattacatttttgaaataatttgattatagaaaatattatgaagaagaatatagttgtaaggaaacgtgtatattgtgttcggttttatagagtactatgtaattatatttttattaattgaattttattgtttggttgagcacataaatttttcatattattttaaaaaattaaaataaaaaataattttttcttttatctatttaataattacaccaattaataattaggaacacattaattttttttatacagaatttttctttttggtctggcattattttataactaatacgtgttatatcatgccaaatgtgtgaaatcacataaagtgtatattttaatttagtaatagttaatttgattaccattgatgtgagtagattattacacttaattactttattctttccaatggcactttatgaacctacaatttttttgttagattgttaatatttttaaattcttctatattccacaaaagttcaaattttacttttgtactattattttcggctttaatgaaagttctcatcttcactttctagtagagataatttgagtcattgagtagtagaggatgagataccgaacttctttctacaaagaaagatattttatataagaaacaaattaaactgaaattaaatataagatctcactaagagttagtgaatcactttaataccaattaaaattttgtttttatgattactaagtgaaattattaaacaatttaaataatgtagaattgtaataaaaattgttcgaacaaaatttaactactctatcagacatagaatttgatggaacaaaaatatgctgcaaaaagtaaaaataaaaaaaataaaatgacaatattttatacgtggtatcagcaatcctttcgaatcgctcttagtttatggggctatgcccagagaataaaatttattatatgaatctcaagtgattacaaaaccaaattgacttatatatattatatatattctctctttgaatttaccgcaacggttgtaatctatcattctaatcaaatttttgaagtgcctagacctttaactcctttcaaatcgtaacacttgcacacttcttttcgaagagtgacttacttgcaatcttcctcttgaagagtgtttaacttgcacttttccttccgaaaagtgtctcacgaacaattcttctcccaaaacttgatgaacaatatccaatgtgttcaacctgcacaagttcaacattcacaagaaacaatatagaataacacaataataaaattaagaacttgttgaactcaagctcttcacacaacaaaaaaactctctctaaatttgaaagtaattttagaaatgatacaacaagagagatagagaaaaccaacgacaagggtgtatttatacactttagaatccttctaggtcgtggtcaaataatcaagaaaaaatcaggttaataaatggaaaatcttcccaatcatgtgagtcaaaatctgtttaaacagatagttactcttttcaaacaggtacatagaaactagataattttttaacaaaatttctataaacaaataaggaaactttaacaatctttacacacacaactatatacaattttttggctaagaaattagataagaatcaaataaatataataaaaaaatttcttaaaaatacaaagataatatcaaataaccaataaggaaaacttatttttattcaccaaataaacaaggaatttgatttgaaagacttttcatactaagaaaagagtatatattttttaaattaataaatataaatacaaaaccattttcaaaatacaaaaaaaatattatatttgtctattttatcaattatgtcaataaataattttacaacattaatgatacatattgttattagaaccagaataattaattggagaaatgaatcagtttaaaatagtaaataatcggaaatattattttgatatgctctttactaaactgtatggaaagaaaaccacaatcatattatttttgtttacataactaagaaaggtaatcaaaatgttttaatttgacaaaattatcattattagaacatgtaattattttttatttatagattt

SEQ ID NO: 36552 - DNA, 3725 bp, Cannabis sativa
aaactgatatgttctaggttaaaatatatcctcactaagattttttctcaaaatcaaggaggtttcattaagggtagatatatttcccacaacataatgatatgtcaggatttgattaggcaatatggaaggaaatcagtgaagcctaattatatgatcaagcttgatttacaaaaagcttatgacaccatagaatggggtttcttagatgagctgctgcatgcttataattttccaccaaaattcatcaagctcatcatgagctgtgttacaacaccaaggtattcactaatgtttaataaatctttacatggcttctttgaagctaggagaggattgaggcaggggatcccatgtctcctttactctttgtgttgagaatggaatacctaagtagaatcatgaagaagattggggagaaaaaatattttaccttcaatgaaaggtgtagtgatttgagattgactcatatcttagctttgttgatgatgtactattattttggaaggggaatttcaagagtatctatttaatgttgtagggcctaaagctattttccatcacatctagcttacaaccaaatgtgtctaaaattgctgtttatagcagtggaatgcaagaaagtaaagtaacaagggtcctgaatatgtctggtttcaatagaaaaaatttaatctattgtcatgtcatcatcatttagatacctttgtataccaatatgtgccaagagaatatcaacatcagagtgtactggtttggtgcagaaaatggtttctagagttaaaacatggagcacaagaaatttttcttttgcaggtcgtgttgtacttatcaattctgttatacacacctattggtgtcagatcctaatcctacccaagagaatcatttcagaaattgaaagaatttgcagaaactttttgtggaaagggtaaagtaatatggatagtccaggaagtgttgcttaggacaagctatatgtggatccaaaacagtaaggggccttggtttcatgaactcctcagattggaatatggaaacattgtttaaacatgtttggtcgattgccaataaaaaggataacctatagattaagtggatacataatgtgtacatcaaacaagatgagtggtgggattacaaagctcctttatgcagcaactggttttgggaaaaaattgttgaagtgaaagaaagaataaggcatctaatggatcccatgcaatcttcccttagaaaatattcaattgcagttggttataagctgatgaatttaaacatggagcactttcatggagtaaagaagtttggtgcatgttaaacattccaaagcacaactttgttttgtggttggcgattcaagatagattgaagactagagagaggcctcaataattcaagtaatatataatactaagtgtgtcttctgcaattcggcagttaaaactaaagatcatttattatttgaatgtactttctctattgatattcatatagacaggttaaaacttggctcgactgggagatttgctatgtttccttgtaggggattttaaggagaattgaaagatccaggtattccaagttcaagaagcaaggtttctctgctgctgttgcaactttttttttagttttgtccgaacccttaacctaatttagaggttgttttttgggtcaattttaagtttattgatgtttgtttgaagttaatttgagggttgatttttgagtaaagaaagtttgagttcaagaacttaaacttggcttaagtacaatagtgaattttgcatgttgaggttatttttgaatctgtttcttaggatatgtttgttatgatatttttaggcattccgtagcttggtttgaggtttggatttgatttgggttagatttgaggctttgttgttttctgcaacagaaaacgtcaggccgtttctgtggaaatggtctaccatttttactaatagttttttcgaaagtctcatttttttcgtgtttcctcgacaattagggcattgccatgctatttatcaataggaaaacttttagttttggatatagatctccgtaaaggttttagtaaattgtttacccgatttacgtgattgtaacatagggccttcgttcagcgcgtgaatttccattaattcaagttgagcagcacacttgaatcaggaaacgaggtaagactagcataagatatgtatatatatgtgtatgtatgtaaattgcatgttgtgttatgtgattcatatactaccaacagtactagtatggtagcagtacgaagtgcattggtaaagtatatgacgttcagagggcacgatccaataatactaacactagtacaagacgagtacatagtgcatggtggttttggtttcaagaatggtaccaaatggaattgagctattctagctaaatttctttgggccatgatagaaaagcatgatgttttgtgggtgaaatggatcaacacgatctatctgaagggtacaaatatgtggacttacactttgccttaagacaccggctgatattggagcaaactgtgtcacttaaggtaagttttcaatgttcaacaagtgtagaaagctagaagttctggtaagttcaaagctttacagcttaacaatagtatgctgagatgtgacctggattatttttcaagagttgttcggtgcagattaagtctacccaagcacatgtttgttttatggaaaaaagtcaatagttagtggctcactaaggatcttctctcattctgcattattgctgctaccaatgattatcctgtgtgtggtttgagtactgaaagtcacaatcacctattattcgagtgctcttattcagatctggttgtgcaagaagtgtttaactggcttggtttcagaggttggcccttccaatttgctaatttagccaattttgattacaaccaaagtagggaaaactaaatatgacattacctatgccacacttgttgcttcagtctactatatttgattaaacaagaataaatgtattcatgagggttgttcatatgcagttcaataggactcccttatgttgtcggttagttttcctcttacggcgtcgcctgtaataacgtcggcaacgaatttgctaaaaccgatgtatgtcccaaaaccatctctaaaatctatttttctagccacatgtagttaaggagattcaaagagtgataaagtgttgtttgtatagtattaaaaataggaatttcaatgcttgtaattatagagtgcttagcatgttaatgggctgattaggggttcgagtgtactggtttggagacgtttggctgtttttgttggttgtggcttttacgtatatctttttggttaatgaaattttttttatttgataaaaaaaactttatttattttcaatattttatttattttattatttagtttaaatttaatatatatattttttttgttaatttttacttttgatttttattttaaactaaattattttattttaaattaattttgtattctaaaatcaatataaatgatttttgggacttttttatttttacatttcaaaacagtttttttttttttgtatttttacagttatctacatagaaaacatattgcaactagcgctgcaacctaaattgcaaacaaaaaatcgtataaaaatcctattataactagcactgcaaccattttagaaagtcaaaccgtaaattt

SEQ ID NO: 36553 - DNA, 2678 bp, Cannabis sativa
aacatttttaatatcaaaagaaattttattccctcaaaattaaatataagaagaaaagcttactaagttatgagcaattctaatagtaaatcgtttaacaataaataaagccacataaagcaaagtttgtaacaacatcttacaatcccgatcaaccaacatttcacaaagttggaccaacccatgttaatttttttaaaatatttgaaatatataataaaagtaaataaattcattagagttgctaagaaaaatatttttacaaaaattgaaagctggattgtatcaactttaatttatgcataaataagttaatcttggattgttaaccaaaatgcttttattaacttttttagaaatgagattttttttttaaagattgagcttagagacatatttaccaatatatccaaaaaagaaaatgcaatagttgaaataaaattatatattattaatttaaaatgttataaatttattataaagattttttcaatataaattccttcttgaaacttggttggatgatttcttttttgtacttcatgataatttcaaggttcattgtttaaaaactaaaatcattattacattgtaaagatctaatcatcatagtagcatgtttttttcatggtgactcatcaataatccaattatttaaagtggcttgtgttgaagaccccaccaattaacaatatacaatttatacaattatatacacacacaaaagcacaaaagcacaaaaattgccatgtcatatgtgatcacccaaccacccaatttggaggagtcataaactaggcccataacaatgtcactaaagctaaaccaagcatagattccttatgtctctacacttatatcaatacctctaaggcacaacattgatttattataatgtgtttgtttttacattaatgctaaaagtcactaatattatgtaatcctctcaccaataagttataggattacatgtgtatttttataaattagtttataataataaattaattatttaagaataaaaatgtgatttaattgaaaactttactaaataatttttatattataatttacaatttttaagaagttactaagttgggagatccctattttataaattttcactaaagtatcattgtatcatttcattacaaaatatttatatttatccaaaatatttatacaataacaaaaaattaacaacaaataaacaagagtacaacataaaaaaccgtattttctgtaaatgaaatcaaaagaattgtaaaattatttaaaattccgtaaaactatatttttgtaatctttttattgtttttgtgtatttgtgaaataatttctacatttttgtgtgttacttaaatgtgatattatctattcactttatgagaaatctaatcggttagtgagattttgattaaaccaaaaaagcttggctttttcattttgctacaaagtgatgaatcccactctcaccaagggaagccccatttatttgaaatgaaaaaaaaggaccacaaagaatataaagtgattgtcatcaccaagtttttttaggccattgaaaagacactaagatttgttctcttatacttttaggacttttcttttatttctttggcattagaaaatactgttttaaattaaatgattgtagatatttgacttatcattattcaccatatgctatatttccatccataggatgaatttttttcatgcataacataaagaccttaatttataaacaccttctaaaagtaaatgtaagttttgtcattaattacgattgcacagctttttgttggatttttcggtctgctaattatgtcgctcatgatttgccagcttgagttacttttcactttctttctctgagggtagtaactccctttgtagttactatgaactaatgctgtttcttttttttttttcttactttgaatgaagttttttggttatataaaaaaaaaataaaaacttttactagataattctttcaagaagaaacagacacaaatagtcatgcatacatacatgaatctaaatatgtatattggttccataaaataagatagggagtttctacaatttacacttgttgcactgatgcacttttttattattttggtttctagaaaaaaaattaatctaatttatttttcataatcgtgtacgttatagttggttaagatatactgcaaaattttgagaaatttagaataatttacaatatcaaaagtaatgttcaaatttgttttacacgagtataaaataagaaaaagacgaatgcaatagattgtttgatttcttttcgacatgttaaattttttagaatttcttaaaatttaacaggatatcttaaataactactacgtatatatgactataagaaaaaataaactaaaaaatttatttaaatgtcgaaacaaatagaagatataccataaattttccaaaaagatagttgtatatctatgttttgctcaacaactcacactagtatctattattgttgttgcagagaaattatgttgaatttggatggttcatgataagatcttgattatatattattaggatgggcaatagttggtctacttcattctatgtagggtaaatactattttggatcttgtgttttacaaaagttatcaattagactctctgttttgtta

SEQ ID NO: 36554 - DNA, 6004 bp, Cannabis sativa
  modified_base (5843)..(5856): a, c, t, g, unknown or other
atatttaggtacccataaaagtcattaccacatatagttttacataaaaatattacacgaaatgcaatttaatataatactatacaatacaatatgatatagtacggcgtacgaaacgattatacatatatttacatttttacatttgtaaataataaaatttgaatgtttgttatgaaacaggtattggattgattttagtaagtgggaggtttttgttaatgaccaacgtactcgtactttcttgtctttagaagttacttctactggtttggcagaggtatacatttatttgcttaacatagtttaattagagaattgttgaaagatactattagtgcttaacacttttctcggtatcatattactattagtgtaattaagtatcggactccatataatttaagagaataatttttaaagaatattgttaaccaatcgtgagacgctacctataaaaggtattggacactacttgtgctcaataataatgctcgtttaattaggttgtcgaaattaagatttaaacattctatatcctcaaataaagcatctgttttaaacctggtttttgatatgttgtgaccaaatcttctaataattttgtgaaaaatgataagtcttttcatatgatcttatatgtgttgttgttagtgattttgttataataatcctcaagaattgattgcagataaaaaagcaaattgaagcagtcaatgaagtttataagtttcatggtcttcctgaatattatgaggtattgttgatttttaattaaaagacaaaaatatggcaaaactaatgttttctttttttaatgtataaacaaaaatatgtattaatggttatttaaattcataactactttaatttgcaggatccacagcctcatatatccttagcttggataatgggtgactatagcaacttcttaaagaaagtgattcaaagagaatggagattattcaatggagggtcaaatgaaaattgcatatttacaagtagatttaatggtattgcttgcaaaattggtaataaaacctaccaaatatgtaagtatgaagacttgtaaaaaatgggaagaatccaaaaaatgatatgaaagaattttcaaaacagatcaaatgtgtattataactataatgtagattgtgatatagaaaaattgtaccaacaaaaatagtgtccctactatagtctttgtcctatatattgtgtattgaagtgtgatattatcaccaataatctccacaagagcaaatgccatcttcaaacttgtgaaacctatttgcatctcttaccaaaaacaccaccttcaaaacctttgacaaccccttaatgaacacatgacaatccccacatactctcaagttcttgaaaattcgaatcgttttcttcttcttcttctcatcctcatcctcttccaatccaccacgaaccaatgctaacccgattgccagcttctcgctgtgcattcgcaagctctcttccttagactcgtcttctacatcatgtaatgcaaatctcaatcccgggatgtatcccatttcagctctcattctcttctccatttccttcaaagcttcatgaatctgttctataagtgggtgagaatcatctccattgtagaaaaagtgaacctctttttcgatctccacccaactacgccccgcctctttcttcaatccctttctcttcaccacttgtcttaatctctcacattctttccagcagcctgcgtcggctaagatgttcgataacataacatagttgactgtgttatcaccatccaatctcattagtatctcaccaacctctctacctaattccacatctccatgaactctgcaagtactaagcaatgtttgccatatccctgtgttcggttttaaaggcatgttctcgatgagattcttcgcttctttcaattgtccagctcggccaaggagatcaactatgcaagcataatgctctactctcggtttaactcttctgtcacgacgcattcttgaaaataactcttggccttgttcgataagtcccgagtggctgcaagctgagagcacagccaagtaagctaccccatcaggctctacattttcgagttgcattttgttgaacaaactcactgcttccattccaagaccatgttttccgaagcctgtgatcataacagtccatgaaacaacattcttcgtaaccatttcatcgaaaaatctttctgattcatctatagaaccacacttgagatacatatcgagaatcgaattggctactgatacgtctaaaccagatgggattttagaagcaagagcatggatttgcttgccttgttccacaagtgcaaaatcagcgaaaactcccataacactcgagagaacaaaaccatctatttcatggtttatgcttcctcttaactgcctaaacaactccattgcctcttctacatttccttcttgagcataaccaagaatcaatgaactccaagatataatgttcttctcttcaatttgctcaaacactttccgagcatcgaataatcgtccacattttacatagagatcaactaaagcaccagcaatggtggcctgaatttgacatgggaaagttaaacctcttgtgattaagctaccatgaatttgatttccttgctgaattgccccaagaccactacaagccttaagtgtactagtataggtatgctcatcaggaacttcactctcctgcatttccctaaacaaaaccaaagcctttccaccattcccttcaagtgtgtagccactaatcattgcattccaagttacaagatttcgaaaaggcatttcatcgaacacctttgctgcatctttaactcttccacatttaaaatacatatccattacagaattccccaccacaatagccaaatcaaaaccagatttaacactcaactcatgaatctgcataccatactcagcaacacccagaatccccgacgccttaagactcgtcgagaaagtgaactcgttcggtttagaattcgaaactcccaacatttgattaaagacagataaacatttctgggcatttccattttgtaagtaaacacacattagagaagtccaagacacttcatttctctcagacattttctcaaacactttataggccaaaccagttctactacattttccgtacatatcaatgagatcattgctcagcattaagtcagacccaaatcccatcttcatcaacgccgcgtgagcctgaaaccctttatcgagtaactttctcttcgaacaactcctgagaaagttagccaaaatctgcctttgattcatttcgtaaaagaaaactaaaaatccaagctttatccaatatccatcgaattggataatgtcaacgagaatattggaaaattcattcgtgcccgcgttgagaaactgtacgaacttgaaggaattgaagaaaatccatgcccatgtagtcaaattctcgctatcgcagagcaatttcttggttacaaaaatggtggatttttgtgaaaaaatatcagaagttgagtacgctagtttgttattcgaaaaagtgattcaacgaaacgtttttttgtttaacgcaatgatcaaagtctatacacatagtcacaagtatgatctagctttggttctctacaaggaaatggtcagagatataaaccctaaaaatcccatttttcctgacaggttcactttcccatttgtgatcaaatcttgtggagggttgctctgtatcaatttgggtagacaaattcattgccaagtttgtaaatttgggccgcattcccattcaatcatttgcaatggtttaatggatatgtatataaagtttgatactttaagagatgcacaaaaggtgtttgatgaaatgtgtgaaagagatttaatcacttggaatagtttaatttcaggttatgctagaatgggaaagatgaaaagggcaagagagttgttcaatgaaatgggtcccaacaagagtattgtctcttggactgcattgatttctgggtacacaaagattggatgttactctgatgcattgggtgttttcatggaaatgcagaaattgggtattgaatttgatgagatttgtgttgtttctgttttgccagtttgtgctcagcttggtgcttttgagattgggaaatggattcatatttattcagagaaaaagggttttttgaagagttcaatttgtgtttgtaatgccataattgaaatgtatgcaaaatgtggttgtattgatattgcattgaagttatttcatcaaatgactgaaaaagatgtcatttcatggagtactatgataggtggtttggcacataatggtgaggcttgtaaagcaattgaactctttagagacatggaaaggtcaaaagttaagcctaatggtatcacacttctaggacttctttcggcttgtgttcatggcgggttttggagtgaaggattgagctttttcgaatcaatgactagagattatcatcttgacatcgaaatagagcattatggttgtgttgttgatcttttaggtcgctcggggcgcctcgatcaagccctcgaaacgataagaaaaatgccaatgaagccaaattctaagatttggggttctttgttaagttgttgcaaggttcatggtaatcttgaggttgctaatgttgccatggaacatcttttggagcttgaaccaagtgatgtagggaattatgtgttgatttcgaatgtttttgcagataatggaaggtgggaaagtgtttcaaatgttaggaagctaataacaaatagtaacatgaagaaaattccaggttgtagtttggttgaagactcttcttgagcctcatgcagtgatgtcaattttctcatgtaaaacaactctatcaaagaaaagttgtttaaagttatgttaaatccttgcctagaattcataggttattttgcatagatataataataataataaaaaaacattttgcaaagtaacattataaaatggtatatattcccgacctatttctaaggtattttaatagggataattacactaaattttcaatttttttacttttatattgtggggtaaaattttgttcaaaaatactgtgtgttttttttttttaaaaaaatactgtgtaaattttatactttgtactgtgttaagtttttcactattgttctactgttgttttttagttgttccattgttgtttttagttgttctgttttgtgttccactgttgttttataaaaccacagtattttttaaaaaaatttctgtgtgacaatattttgttaaagttaacccaaattccaatatttttataagacttccttttaatattatataaggtattttagttttggtataagttattaactatttttttattagacattaattaaatataactgcaaaataattttaattgataaatattcttttttataatcaacatatcaaatataatctcacataacttatcaaaattagagtccctaacacacataaaggaaatatgacctataaaattgtatataaattaaagagtaataaaagaaagataaaaattaaaatagaaaatgaaaaatagatatacagtgtaatttcttttttatatttttcatatatgcgtctaggttcacacaaccaacctgggccagaactaaaaaaattggctaattaggatttttacccctaaactttaacatgtaccaaatcatgcctcctgaacttttctgcccgttaaaagttccccctgaactattgagattgttagatttaaggattcttgtctaattttatccaattttactattttagtgattgtnnnnnnnnnnnnnnatgctccccagactttaatatctaacaaattatgaccctcaaactttgacatgaactaaatcatgccccttgaactttcatcaatgttagacttttttttactaaaattggacaaaaatcttttaatccatcaatctcaatagttcat

SEQ ID NO: 36555 - DNA, 8201 bp, Cannabis sativa
ttgccaaggtgtggggccacttcctgcctccaaaatttctcacctgtagaattggaacattgaatcttttgtttggaaaactagagagaaagctcatagaattgaggggtaggtttatatgtttgtctaaagaggaggagttacatgtcttggaattggttcttttgacttgcatactgaaactatataaagttgaaattttctgcaagcacaatactctagaaaaactctctaccactctttcgcaggtcgaaaatcttgttaaagaaggctgtattcaaccttctaattttgtaattgaagtaggcaagctatcagcagaaattcacacatttggcaatggagaatcctatgatcgctctctatttcgaaggttattggaaatgttctgcctcaaagagattatgtttgttgggagactcaagtacttaaacaccgaactaatcattcctaataatggccctgaaaatcctattatatatgttccaggactacctgttggcatagcatgccaaattaccattcacaacatttcggttgagagtaggttgtggctgaagatgacaatggatgatggatcaactcaattcatctttttggatttgaacaattttgaagaatgtaatggttatagaagattttcatttcttgcacccttctacaagaccccaaaagcaatgtcctttagtattaggttatgtattggtatagaatgtccattcgaggatctgcactttgtcaaacatcgtcgtgtgggtcctaagcacaagctggcctatctttgcaaggaaatagaggtttttctgtctaaacgatgagtgatctgttttacatcttatgtaaatgggaaaaaccgcggcaactcttggctctattgactcactttctccagacggctgcttcatgttctttcgaatcagtggaaaagtctagattgctgggttcagtcaagctctacgatgaaaacccgtattgatgattggcgaattggaaaacagaaacaaatcatttctaccaaccatcctttaaaggtattgctttttggcaattctctactgatttggatttacaggaagctttggctgaagtactagaagttatattttatgccttctttgatatatgcagagtctgttttactgataattcatctcatagctgtagtctttacatgtgtctagattttgattttccagggaacaaaaagcatgaaataatttatggtttggttctatcaaaattatttggctttcttttaatgttttttttttttttgacctcttctattacaatagcagattgagtatggccgatttttgagatgatggagttctaggaaccaaaatccaactggtttctgaaaatcatgtcataccgctgtttcgtcggttttgagttccaggtaaaattattttccttccagttggcttgtgctaaatatccatgctctccacatttaagtcttaaaatatatgaaataaattgatgttgttcatgtaaggtctgaaatttttagtaagtttgtttttagagttcattcagagcacaaaaatacatggttataagttaatggcattgtcccaacacttgcatgataagatcggtcgatgaacgactctaccaccagcctagaatggcgaatgactgccacccgggccagaacgatgaatgactctaccaccggcccgggatgaagtagaactctgcaactcttattacctaagctttgatttgatttggagttatatgtacacctaaagtataaaatgaaattacttaagttttcatcttcaaacatttcacatgacatgttttcctttttgttctcatatgataatttggtgatgaattgcaaatcttactttgaatttattttgttattcaactttatgtcacgctctttttccttttgacttgagatggacatttttaaccaaatcaaatgttagcttcctaaagattatatttttaaagtcaacacctctgtataataagataatgtgtaaagactttctgattagtttttgggttgtaatttctttaatattatagtatgtttttgaatttttttagctgataatgtggctaagtgtgagtatgtggacaatttatctatccagcactctagggactatttgtaatgttttagaagaactttttattaaatttatcaaccttatttaaaataaataaataaataaatatgtacgtattttttgattcaatactcaataccattatcttttaacatttcccaattggtttgatttatctctaaataaaaattaattatgattttcttctacacctaaaaagtcaataatttaattaattaattaatgatatattaattaactaagaccaacaacaacaatagagcacccgggtttaatctgttaagtagattatagaaattcagttattaccgtttgctctccttttctcaaactcaaaggctttttccttttttaattgcaaaagaacttgtgaatatatgagactaatgctttgtattcaactatgaaattgtccctttacaaattccccccttcaaaaaaaattaacaggtccataatagcctttcaaaatgaaaattctaacttctttttttttccaatctgattacgtaaaacaaacttactttggacaatacttcttttcaatgactgtgtggaaccactttctgtacactcatcggtatcgactaacaaacatcatgtaaaagacgacgatgaaacaatggctgaatggaagcaccttttaccaatgacatctccattggattcatgccaacccttttgtccttctttgaaactctcaatctgtaaaaagttagagaataactagagttctctttagtaaaaaaatgttagaaatacagagaaataaaataaaagcattgacataatgttacttacttcagttactacattgtaaccatctttcacacctcccatcacacagatagtctcgttaacaaccgcagcagctgaatatcccctcgggtagttcattggttctccactcatccatgatccgagtcttggatcgaaaatttctacacttgaaaccatagaatctccatcatagcctcctagagcatacctgcaaaagttgaaacccgagggtgtcacaggagaaggtgaaactaagtcttcatcatagtggttccaaatcgagatgaaaaatcgatatgggaaaatgaaaatgaacagaattatgatcttacaattggtcttttaaaactaccaatgagtgacagcccctcttagacttcatactagaaatacttctccaggagtgttctctaggatcaaacatttcagcagacctgaaatagtgaaattctttttgtcaagtacagcatatatgatatatttagtatgataggattacacaactgaaaataccaaaaatccaatgcccaatatgatatagttgattatgcataattgcacacaaatcaatcctctatatacataagacatgtttagattggactacagatgtgaatgatacatttggtccatgaatgtaatacataaatattacaggtttataattgttagtgtaaacaggtgtgtaacatctcactttaagtaatctgtcccatcgtatccgccaacagcataaatgacgccattgagttcagctgcagcaagagcaaatctctgaagcaataaaggaaataaaacaatgggatcaattgctaagcaaataatattaacaaagtaaaattacaaaaggaagataattgcatttcaaaatgttaggagtgttcaagagtgttgaaggtttataaatagtaaagaaaggttagtgttgtaaatacactgtagcactatttatcgaaatagtactccaattcggttacccgagtgtcatgcacatatgaatcttagttgctaagtctatttgagaaagcatgaggcttaaataacaatgactctagtaaagtttaccttttgcagcattgaccgtgcaagtatccatcttccgatatctaaatcaagcatctcgacacttgaatagcactcaacaccattcccaccacccattgcaaatattttttccttcaatgtagctccagctaagcttcccttctcctggttcaaagaaggacacactgtccatttgtctttacttgggctgtaagattcaacttcaccaagaaaagaaaagacggaagaattaaatgaactgtcaggataagtgtattgagaaaccaacttattgtattggcacatacctgtgtcataccaaatttgaccatttccgccaccaattgcataaaattcaccatttagttttgcaactgaagcgtacgaacgaacacaattcattggtctgagaggctttagataattcagagaaaaacagtatgaatcaaaggttgacaaccatgattcaccatcataaccccccaataaaaatattgactcataaggctccgaattcagattatcaaatgattcagtaaccttatcgtcatcaagcaccctggagagattagattcagagtctgaactgcaatgtctttttaacagttgaatgtctttttccgcttgcacctgaaatgcagggcaaaaagaatcgataaattggacaacccaccactcaaagaaggcaacagattgacaatactaaagcgccattgatcataagcaatttaatctatgagaatgtcaatgaaaagttccccatgtaatagagctacaatccggattagatcataaatgttcagccatacaagtttctaattactactagttataagtaatgagttaatgaccataatatcatatggtaagtctaaatttataggttccatttccacaacaaatttttaataggcaaaggacccactttaaactcaatttttcaaattttataaatggaggttatataacaaagaacccaattattcaggaaacataagccagaataagagtgcttacagaacaaattcaaagaaactccactacttaaaaatgttacttatcagcaaataaacgacattatgacatttgaccattttccgactataaattccagcctcgtttgcaccttagtaaaactagaatgttataggatagttctgctcgtcacatgattcaaaccaatccaaacgaattattccttaaccttaacttgcaatacatgaatgactaaatgcacagatgaagtttgcaataaatttatttatttggacaactcaagaaaggcacaataaataaacaatcacaatcagataataacaaacacacttataggaattgtatcaatgatcaaataccatcttatgttgaagaaagcccgttttctgagtttgttctgctttaaaagccttcagctcttccacctcgtgaattaactatgcaaatacacatgacaatatgagaatacttgtaataaaggaattacacaagtgacatttccaaacagaaagtacgaaatactgagatagatttcacctgagttataagggcttgatactttgatgatgaaccagaattttgctcactaatatcttctgaaccgaatggttccccaggatatcccttctccttcaaggaaatattattattatcaaaagcatgttttgcatcacccatctccaagtgtgtgccatttgttgaatcagtatcctgtgtatcagatgtcagagacgagtcttgatgtccattcatttcctgtttacaagccaattgcttcagttccttgcataggagatcttcctcgtctccatcaaccaccctcacattaaattgagcttccaatgactggttttctccatcaaaggatgacaaaacatcagtagaacctgatctctgacttgattgatctgagggctgagccgctacaggaagtgggggaaattcttcctctctagtgtcacgagaagagcctgctgctggaacattataactcctcttcattgtattctgtcgtactgatgtacccgaaacaaccgcttgcttatccactagagcaagtggtggaaaccctctactttcctttctagtgtcacgagaataactggttggaaaattactactccacttcattgtactctgaagtattggagtacctggaggaaccgctaaagaagccatcaaattagtcaactgatttgcttgagcatggtcaagctcaaaccagaaatgttgatgagtgtagtagttgtctccaataatctgtttaaactgactttcagccagtggctggcattgtaatcgaacacgaatctgaacctaaattaaaaaaataaaatataatcaatacctgtgactgaaactaaaagataataatttctgccatccaaaatggggtgtctcacataaatttatctcagaaacatagaccggtgagatttgatataaactaatacctgtgctggatacattgtcctctccgagccatcactggtccacccatatgggtcgatattcatttgaccaggggaggcagcctcaaagatcccatggagtttcctgtcactgtagttgaacagaaaaagtggcaatccaggatcaatgttctttacgtaggaaaagtgatgaggtggcaaacctgaaaggaaaaagtatacatctctcactagttgttgacatcaaataatgaacaaaatgcaccagcgatatccttccacaaagaaataacacaacaatttactattaagtgcggataactatcattaagactatttcggaagctcattgaagggaaagatggtgtaaaaaccaaatgtaaagctgccaacaataagaagtacacattcaattaagtaagatcactaaccaaatagttgtttatgaaaacattctcttattgtgctattcttggttccaaatatgacaccaccaagttgactcttggccaaatttcttgcagttgtagagctaagagctttggtgggaacaggaattgtgctcccattgttataagaagactgtattttcttccagcttcccattctatgttccaaacaggagtaaacaaaagtctacatcattaagcagaatcataaccttagcaatagagtcatgaacaaagtgggattttaccatcttcaaattcacactagtgaaacatttctacaaccaatgcataatataaccaatactcatatttgcactaccaatttctacataagaatatgaggcataattcaagagaaaatggtttgtacatatatattaagctcagatgggaaccaacattgtggtagcaagtatgataagaacaaaactagcttcatatgaaaggaacatgaaaacaaaacataattgcaacaacaaatatattaaaacaaaatagtaacaatcatatgttaatttcaattagttaataacaggatacagggcaagatttcctatcttgagttgcaaacatatggctaccaatcaattaagtaaccaacattaatcaagaacagtataattaaaaaagggaaaaagaaaaaatccaaaagaataaatagtaaaaacaacaaattaattggttttccctataagcaaaatcaattgatcattgatgttcaatccaaaacaagcattgaaatttactttcttttagttttatgccaagggacaatgaagattgaacaacaacaacactacatatcagtcataaatgatccttattctttatgatgagcaaagtagcttaaaatcagtgttcattgcccatatacaaaacaaaaaaagatcaacgtaacgacgatgattgtggttcacaaccagtaatgtgagtctgcaaaagataattcaatgaaaaccctagaaaatccattagaatttggtagcaaaaagaagaagaaaaacacagaaaataaaaataaaaatagcagctttatgatattgatatgagtaaaagaagagaaaaagagtgaatgcagtagtggagagaaaagggtattgatttgatagtgttagcagtgaaatttagagagaaagccatacttgtacggatcagttctgaaactgagaagagcgatatgagttgctttgctttggctgaagcgcgaaatggttagtcagtgcagttttatagaacagtgcgctatactccccctgcgcattttagtaatttcagtaaaaaagagagaagattttttttatacactataagtaattttttattttatataaaatttaggtgcttctagaatacacctcactaagggctcgtttggaacg

SEQ ID NO: 36556 - DNA, 4132 bp, Cannabis sativa
gtaaaataatttccaacaattcaccccttggacattaatgctggatttttgcaagtgactaacaggactataccgtgttttacaatttccgaatctgtggccaatttagccaacatgtcaacaaatgaattttgttctctcaggacttgtcatatattataactcttaaatccctgtaataattcacccaacattagaacataggaaaccattttctcaccttttatttgatactcaccagagatctggttcaccacaagttgggaatcactataaatatccacctattgggccccaacttcttttcctaactccaagcctgccaacataggttcatattctgcttcattattcgaggcacggaacccaaagcgtatggtgctttggaactagctcctctaggagatcatcaaaacttgtgcactccgctacaaagtcagcgagggcctatccttttattgacacccggggctggtaatgaatgtcgaattggctaagtttcattggccacttcaataatctgccagaagattctggcttctatagtacttgtcgcaagggatgattcctgagtactctaatggcatgagccttgaagtatggtctcacctcgtgcaatgctattagtaagcaaaaggttaaattttcaatcatagggtatctagactccgcacccagcaatcgtttgctcacgtaatatactggatactagactttctcttcctcgtgcacgagtgcggtgctaatagagtgatctgacactaccaagtacagaaacaaattttctccttctacaggtttcgacaagatatgagccttggtgagatgctcttttaacttctgaaaagagtcctcacactcttcagtccacacgaactttttgttgccttgcaacacattaaagaatgggatacatttatcgatagatttcgagatgaaccgactaagggcagcaacacaccctgtaacactctagacatccttttgcttcttgggagagggcatgttaaggatggccttaattttctctagatttgcttctatcccctgggcactgacaatgtaccctaagaacttcctagaagagaccccaaaggtgcactttttgggattcaacttcatcccatactttcttatgaccgaaaatgcctcttccagatcttggtcgtgctcttcagatgttttggatttcactagtatgtcgtccccatacatttcaatattttggcctaattggtctttgaacatccaattcaccattctttggtatgttgctcctgtgtttttaagtctgactggcatcacctgtagcagtaaatgcctttgttagtttggaaactggtgtgttctacgtcggcaatatgcattttgatctggttatatccagagtaaacatccatgaatgtgagcaacttgaaccctgacgtggcatccactatctgatcaatccgtgatagcgggaaataatcttttggacaggccttatttaggtccgtgaaatttttacacattctccatgtgtcattgggcatcgggactacgacaatgtttgcaagccagatgggatataatgactctcgaaggaagtcattggcagtcagcttgtcaacctccattcttaccgcatcagatatgacatgatctagaggtcttcttttctaacgaatcggagttacatcttcatggatgttcaaggcatggaaaataatattctaattaattccagtcatgtcagaatgactccaggctattatatcttggttttcctcaactgtgttgattacatcttcttttatggtcggggggaggtgctttcctaccctaatggttttggtagggtcttctttgtagatgctcacttccttaatttcctccatctgttctaaattctgctcatctaactcttgcatctaacttgtcttcttatccctcctgtacaacctctgtgtccattggatcctctgacccaagtgcttcaagtgcttcttccctaaccgtgtacatggctcaggttgatacattataacagtttctcgcgctctgcttgtttcccttaatggtgcctatgcacccaagtccactagagttggtcggccaaatatggcattgtaagatgtgggacagtcaactaccacgaaggttgagtgtttaaacgcactagcctcgctgtctcctttaagggtgattggtagttagatttttcgcatgggcattaaggcatcaccattgaagccttgtaactggactgagcatggagttagatccgcttcagtaagtccaatcgcttggaatgcggacattaacaaaatattaacggaacttccattgtcaactaggattttggaaactcttttattggcaatctgtgcatcgattaccaaaggctcgttgtgggggaagcgtgcatttttagggtcatcttctgtgaaggtttttgggagattcatcgtccttagatgctgtgtgggagattgtaccagtgcacacacttccccttctttcactttttttaaatatcacttttgtgcgttcctagtacttccagtgagattgggtccgcccaatactattgcaacatgtccgtccataggtggtggagccactctaggaggatacgaggttcctagtcttggagccaatagggccaccccatccggagctggcggagcaggaagagcaggtaaagatgttctaggagcttaagggcgcgcaaccccctgtgggggattgactgcaccctgctgtcggggaagcatcatgtgtccttggactaacccctgtccgagatagataattgggatacgaaaccattgcccaaatgtccagctgagaccaacatctcgatctcgttttttaagtactcacactcattcgtagtgtggcccttctccccatgatactcacattgcttgctttgatatcgcctgttcctcccgccatttgacatgcgtgggggcttccggtaatgaatgatgttacatgttgctttgtagacattctcctaagtgtctatcaaacttgtatactcgttgtactttggatcgtaatctttctagggttttttcaccgaatcattttgactgtggctctgtcatcccctctttccccgcgaatgacccgcactagagtccagaacctcagacttaaactgtccaggggccacactatatccagtttgtgccatttcgtaccaagagaaatgggtctgtattgggacaaggccgaatgtggtaggtccataaacgattggggagaattgagattcgggaagagacaaagatggggtaggagtgtgagaggtaaaacttggagtggctatcgcaggcattggtgccggaggaaccccgaatgcctgagtgtatgcatcctcaaggttaattatgccatgtgccttggacatgaaccacttagtgtttcagctcttttcctttgcatctctccccacaataaggaacccgcagccaatcctgattggagagccatcaacttcaaatcgtcactgaccttggtcttcgcggccgcctctatcatcctttgaataaaagcctttaagctttcgttaggctactgtttgacattggtcaaggaatcgatttccatgtctttttacaagcggcataaaattgcttgcaaaacatggactgtaaatccttccatctatcgattgatcctaaagctagtcgcttccaccagtgctccgcagacttagttaaatttaaagaaaatcataggctctttgtgtcatcactgactcgagcgacttgcatcatctttttgtatttggctaaatgtgttcgcaaatcagttcttccctcatataacttgatgtgtggcatcttaaagtttttgggaaaatgggtctccgtgatccttttgacgcagggttctaggtcctcatcttcagaatccaacaatgctcccctttgcttatttaccaactttgttggggcagcaatttgctcttctagcctcttggtatcgctttttgggaggtcttaccgcctcaatttgtcaagcaagtgatttttcgtatcacctccatgtggcctcgctgtaacaccctaactagcataggcatattacgtgatttttaaacgtactgtgcagctcgatgctaatcaacgaggtttat

SEQ ID NO: 36557 - DNA, 2490 bp, Cannabis sativa
tttttcaaaaacaaaatttttactttcattttgtgattaaaaaaattaaaaaataaaagtgctaccaaacgacacctaaaaaaattgttagaccaagaattctgttacatagccacattttatatagaatagatatatcattgataattaaaattattttgattatcatccataattaaaattatatatcatatgcttaaattatgaagatttaatgacgatagtgaactggtgatcgttgtaaagtacaaaataaagatatttttttctcgattcttagtttcatctttgtttacttttttaatttattgggagacttgagaggtatgagactatgatactatacctgggttatgacgtttttttttcttctaaattataaactacaaaagtaaaaaagatacataggacaaaattgtcatcccaaaatttagacaatgaagttataacatcctcaaacaaaacactcaaagagttagaactttaacttgtaacactaaaagactacttgaaatatctcaaaaaaaaaaaataccaaaaactaaattatattacaatacaatctacaaataaaataatatatcaataaaatattaaattcttcaaactctaccatttaattctatcaagtaaaataaaaactaatgaaatatatatgtatattaattctatttagttaatgatattttgttaaagtcttgcattgtctacattatatattaattcaattcaattatttattttatttaaagtatttatgaactacaattagcttttaacagtactatttccaacaaattgtcttatagtattttgaacaaaaaggccaaaattaattttaaataatacaaaacttatgcaactctttcttatgcaaattcaaacggagtgaaaaaaaaaacatatgcaaattcttttacttatgttcttttaccttgaaaataatataatgaacaaaaacaattattataaatttatgcttgctttaaaaaagataaagacatttcttctacatagttaaaatttgcattctttatctgtagtacatctaaagaacaaagagacaaagtcgtagtagtttaataattaatggtagcataatagaacacaaaaatttgtttcaatatgcaacttcatcacattagcgtttcatagaaaaattacaaaagtatagaccaaacacaaatagatgcaactgtacttaatatgaaccttaaaatgcgtaagaaaaagaatggtgactaaatattacttattaattcctcgctaatatgttttattaatgctcatgaaaataagtctattggtgggtaattacttatgaaacatctctatgaaaatactaagtacataatgctaaaatataagaaataaattactccagagtttactcaagtcaatagctaaaacccccatatgggacatctaccatcaccaacttgtatgtcgtcataactggattgcatttattttgaagaaaaaagtaaaataggagataagtaacttatacatacatacaaattatacaaattatgagggtacctatgagaatattagtaagaagatcatacagaagtttggttcatattttttcaattgtaaaaggtatatatgcaaagttaaatcaataatcactaatacaatacccaagaaatccaaaaaaaagaaagaaaaaagacaaattaaatggcaactgataactaaaaaaaaaataatgattcaaagcatgaaggcatgtaaatacatagatgcaaaactatgcttaaactactgttaagaaagattcaaacctgaagggaaaactatcaattgatccatggtgtgttgaaaagaaaaatatcaattagcattcttgaaaagaaaactatcaacatcaaaaaaataaggtccaagccttgcaatctgtaggacaatagatcgaagcagcataagaagccaagtttaaatcaaattcagtttctaaaaataataataataaaaaagaattgatatatacttacatatatgttaaatagaagaaactcctgatttcattcaaatgccgaaatacttactgctgcaatctgtttgtttgtattgaaggattgcggaatgaatttgaaatcaaggacctctgataaagtacatgagggacctcaaaaatcatctgatgtggcctataaaataaatttacaatcataaattatacttgcttaaatgtatggattactgcttaaactctaaggtagtgcttggtttacatgaatgagtgtaggaatagaattgctattcttaaagaaaaatcattcaagtgtttggtttgtttattgtcattggaaaactcattccaataggaattgtaattcatgtaaactaggaaattacttttcctaaataaaatgacttgaaaagctattctatactaaccaaaaattatttttccttatctaccattttcataaataaatgattaaagttataattatatgggtaacattttttattttaaaa

SEQ ID NO: 36558 - DNA, 2928 bp, Cannabis sativa
  modified_base (747)..(747): a, c, t, g, unknown or other
atatatataaatatatatctaataattaattaacctcctttgttttaacttatgtttatatatattaataattaattacattggatcctccaccataatggtttattttttacactaaatatcattatcttatcatcaatcatatacataatgtcggtattaatgtatttattaatatcagtaattaataatattctcaagactcgcaacttccctctagctttgtctccattatgaatgaatatgaataaagtaattaaaaataaatttgactttttttttcctacagtttaagagaaaaaatattgactttgtatgatctttcaagccatcctttaactttaccccccccaaaaaaaaaaaaattcagcgataacatttgttatacacaatttttaatgcataaagacctaagaaaaaagagagactgctacaaaaagaaaacttttttttttgttaaaaaaataaattatatatgttctaaaagatcatgctatagttccttttctctttttcttttttcaccttattaaaaaagatcgaggttaaatatatataactatggtagagctagcgtgatcagtacatgcactttttaatcacactaacatcaacatctacaattatttttcttgctaaatattgtgtacgtatttatatatatgtgtgttaaaaggaaattattccttcccataccatattctatagaggcatgatcatgtatattctcatatatatatatatatntaaatatatatatatatatgtttcacaaatcccacatgtatctatctagctagtactttaataaattttctattattgtgtgaatttgatatatatatatatataaaatacatatatattataggagatgcttctatttattataatgcactcttaaaaatgaacgtatatacacttttcttttatgtatttttaacatttggatattgttctaaatctaattattttaatataacaaaagtatatatatatattatagttattacaagattatatagagctttgtaatatcatcttgttgagatgatgtatatgttataaatgattgattatttgagctataaaagtttctgattcaaaaaataaaaaaataaaaacaaaaagcgtataggacatagcttagatttaaaataatttattttacaagcgtataaaataaaataagtatacaaaaatgcaataaaattatttaactttattttcagtactataaattattacgaaattctcaaaaatagctactaagccttaatctcataatagggttttggtactataaattatttattacaacaatattttgaaagtactataaattattataaaatcctcaaaatggaacatattatttgaactttatattacatttaatagctaccaagaaaaacttgtgtatgtaggtgtttgtcccatattatttatgtgtgagtaatttgtagtatttatattacacttaataagtctttatttcttaataaaattttaatgattaaataaatactatatttggcatatttgaggcaactttataaaaaaaataaaaaaaaaacctcaaaaatatgtagaatatatatcctaaatatctatgatgtatattctcatattaaaaataaaattataattataactatacactgaaaacataaaactcccccatgttatatatgatatatccaatattctactatatataaaagttggttagtagagagtagtgagtattaaaactcttaattagccactaatacgtacacaaacaaaggttgtagtgctatagcctaatatatgtacatatatgggaccatgggagaggccaagacagcacaaatagtaataatgtaataatgtgatgataaataattaataattgtgactaattattttgacattaattaagagagaagaagagaataagaaaaagtaatataaaaattgaaaataatgagctatatatatatacatgtatagttttctgtgcccaacctttagctaagatccatgtgaccttgtctatggccttttttataaggtcttcggtttaggggaatctttactttttacatgttttccatctttggcttaaagtgtaatgatgttaggtggcctttaatttgaacccaacatcaaaacattcattaaagctgtaatattattatgattaattttttaagtttcttttttttcttccatcatttaatcacagtttatagattagacatctctttctttatgtatatagactatagtatagttagccccacctctctctctctctttaggataacattttatattaaaatttcttcattccataattgtactttataaatagattccaaaactcttgttttaatttccataatagtatactgtcaatattggtgtgtgctcacttaaaatgaaagggctaatttgtcgtgccggtacaataaatacatgcatgcaaggcaagataatataatgtttttttttttttcaaaataatatatacatatataaattgtttaatttgtcatgttaacttattatgatgcacagtagcattattataacaaatcacaacattattacaaacaacccaacatatatacgagccaattaatacgtaggtttgtacatttaataataataaaaaaaataataataaatggaattattccttgcaaaaaaatggaaaaaatataagtgtggctgtgtgtactctttataattttagatgacacatatagtgaatttgtcatgcatgtatatgttccaagaaagaaaatattatatgtaaatagtttaatttgttcttaactttaattaattattttttggcctttacaagaaaaaattgatcaccctatgcttaatataacattattattatcctcaaaagaaaaaacattattattaata

SEQ ID NO: 36559 - DNA, 12415 bp, Cannabis sativa
  modified_base (63)..(81): a, c, t, g, unknown or other
  modified_base (286)..(289): a, c, t, g, unknown or other
  modified_base (9612)..(9624): a, c, t, g, unknown or other
aaaaattttactttcattttgttacagaacgcatttttttaaatttttttctcacattatttnnnnnnnnnnnnnnnnnnnattttaattttattttcataatttcttctaactcatatttatattttttttctaagaaaatttcatataattttttgttttaatttttttatcataatatttaaaatataatttatttttgttcaataaatatattttttaatcatatgaattagaagaaaaacgttaaaaaaaaattagtataattaaatatataaattttatnnnnaataaaaattattaaaataaaattctttacaaatttttaaggtttaaataaaattctccaatataataataagatgtaaattgaccattggatacaaaatctcatcaatctaatggctcccatccagctgaggtgttacattcctcaaaaacattattgaggttatacatcaaatgtactctcaaacacaaaaactcaaaccctaaacacagccgcctcctttaatctttttttttttcttggttgcttctctgttctgttctccttatatatcttcttcctttcttcattcacgaaatgtgatagcttctctgttctttgctcattgaaaaaaccccatttctagaattgattcatcgacgacgacgacgacgacgaagagcttcgtgtctacgacctgagacggcgacaagccctgcatacttgacatgtaatatagacacaagctttctactctctgtacaggtgaagcttccttctgcttccactactctcagtctcagctcagtgttgttaactgaagtgttatgcattttttaataatcttgctctcagatctataatattcagattttgtatttcttgaagcttagtacaaacgtacaaagaatatatcatgtaatgtttttcctttggagttgattagtaattgtaatacagtatgaaatgttatctacttagtgccttgaaatatatgtcgtaaatatgctctgctaatattgctcggaatattttttcatgataatattgagttagtcataaatatatgtcctcatataaattggtctgactagtatttaaatttgaggtgttcttgtggcatttgtttgtggcatcatcatatatggaaaatcaaactcataatacatatattcagtgtcaaattttatcatttagttctaattcattattgcagttttatttatcttaaaccatctatgatgttgtattcaatttaaataactatgatattcatctttataatggattttagtttgtgcataatgctttgtgtagccataaatatctgattcaaagctaaggttttgatagctgaggaaccaggcatcaggtatttcatttcatagtgctgtttattgtggtgctgtttattgtggttgcttttctaatctacttaagttttataacggatcatgaaagggtcgtggcaaataggggagagcataatgaaaaatatggctctgaaaaacctgtaggttttctacagggtgccctgcctttcagccctaacatcaacaattatggcttcatagtacgggttatgtgctttttgggctgctttggattcggaaccattgcctgtatttaaggtttttaaaccttttatactccaatgttcccttttcacttcccaaattttttcttcacgaacccgcctccaatcgccattacatttctttttggtcattattttttgtcttcaacaattttaaattgatttcagatactaaatcacaatgactataatagcataatgatttttgttaccaagaaacctaactggtcaggttgttacaaataattttgttcataacagagggccgatgtaccttatttagactaatgggcgagcccattacacttgttgaattagactgaaatattgaaccatttccctgagcatggagtacacccattgggactttataaataagttgattcaaagtttgggttttgatgactgaggaagtaggcatcaagcaattcatttcatataattattgtagttgtgttttttttgtactttttattttttaacaaattttaaaagggctgtggcaaataggggagagcatattgaaaaaatggctctgaaaaacctgtaggttttctacagggtgccctgccttttagccctaaacatcaacacttatggcttcatagtacgggttatgtgctttttgggctgctatggatttggaatcattgcctgtgtttaaggtttttaaaccttttatactccaatgttcctttttcacttcccaaatgttttccttcacgaacccgcctccaatcgtcattacattttctttaattttttggttattatcttttctgttcaacaattttaattttgttttttattatagtataatgggtcacaaaataaactaattagttgggcgattacaaatgtttttgttgacaagagagcactgaaatattgaccattttcctgagcttggagtacactcactcactggaactcaataaataagctgattaaaggcttgggttttaataactgagggagcaggcataaagtatttcatattatagcgtcatttattattgttgcttttctcttctactttctttttttgaaaaaaagggccctaaacatcaacatagtacgggtaatgtgctttttgggctgctatgaatttggaaccattgcctgtattaaaggatttttaaaccttttatactccaatttttcttcacaaacccgcattacattctttttcttcattatcttttgtcttcaacgattttaatttgatttcagatactaaatcaccaatgacgataatattataattatttttgttacaaaatctcattactattattctaattagactgaattattgactattttcctgagcttgggacttctattaagctgattttgataactgaggaagcaggcttcaagttatattttcttttctttttctttttttaacaaaagggatgtggcaaatagtggagagcataatgaaaaaatggctggctttttacagggtgcccctgtttttcagccctaaacatcaattcttaggccttcatagtccgggttaggtgctgtcagtgctgctatggattcagaatcatgggctagtccaaaggaagattaaagatgggctcacattcacaaagtcaagttcagtatgccaccttgctacattattttatgaagatattttttatataattttattgattttgtttaatgtaattaaataacataatataaaattaatgtaaacaaaatgcaatgtattatttttttaattgtaacaaataaagggtaattattgtttttattatttcaatttatttttaaaaaacatcaaaatatttaaatttataaaatattctttttaaagatagaaaagtataaatttattaagtgaaaaataattattaaaccacaagattaaaagtaaaaacaaaattgtataaatcaaatgtaattttttttaaatattttaccttattttaaaaatatcaaaatatttaaatttataaaatatatattttttttaaaagataaaggagtataaatttcttaagtgaaaaataattaataagccgtaaagtatatatctctctttatcttctcaatttagtctaatttagtgaaaattttaaaatttaacataattaatttttcgaattataattaatgaaataaatcaattaattgagtatacaagatgatattatcttatacaatgtgggaatcatggacctatgtaatcaatctcctaataagtggatgtgagatttaccaaataaattttttgacttattaatttttcttgactccattatagatttaaaattgcactattgactacatagaacactttatatatccaatatagatacactataattatttattattttaatgacaacaatcaatgattctctatagacacttgcaatcaagtagggacaaaattactgttttatccttcaatgtattttatcctaaccatttattgcctttagccaagctcaaaggaaaccatcgtttaacttttaataaaacataaaagctatatatgtcaatttctatgattaacactctcacttaattgcactaccgcgagttcccaagacgtaagctggtaacaacaagtcaaagaactcgagcaatacaattaaattaaaagcttaactatctcaggattgagatcaattgatttatgatcaactaagttatattgagttagaaaagatataatagtaagtttatggtattttttcacttttaatatcgatccagtccattgtataatcaatacatttgatacaagtttactttgctaatgccctgaaaatggcattgtatttatccaagtgtaagtaaaccacatcgttgattatcatgccagtgtaaatctagtgcactgataaatagcagagctaaataatttgaagcatataaccacaattatttttcactatatttaggatataatataacttatatattaaacatataatcataaaataaatatgtgaataaagcatatgacatgatcaagatatgattctgatccttatttgtagtaaataagatttcgttgaaatagaatattattttgggcataaaatcttaacaaaggagtcatgcttactctttttatctttcagattagtctattagccctgtgttatgtgcgtcgggcttttgtgaatgagtgtcagaatatgattgatcttattattttttttatttattatttgaataatgaagttgttattttctaattttttttggaagattattgactgatagtcattagtaggtgaactttgtcagatgtccatatttggtggcttattgaatctttagttaagttgttattaagattttctttctttttattgtaaacggttttgtaagccaattattattgagtttgctttactaactatataatcatatagtggactttatctattttgtctattaatggataagtatgttttctctatttttctccaaaaataaataaatgaaaaatcataagcaaaatgtgtggaactagagtattgtaaattaagtaatgcaactataaaatataatttaccttttgaaaaatctgctctaataatatgctaaattatattacaaatttatcacataacaatctaaatttagattacaatatagcatgaagtaaaatttacatcataataaatataatgtttttatatttattattgtgccattttaatattttataattaaattttagttaatatattactttgtattaaatgatgatttatataattattattattatattttattattaaattttagttaatatattaatttgtattaaatgatgatttatataattattattattatattatttaatttatatttactttgtattattattattttatattttcaataaattattataagtgcattaaatgacattaaattttgtatataattattcatttggaccacaatagtaaaaatatgtaaaaatgtcacacaactatatttttgttgttacttttagttgttattttggctatgaaaacaagagttcattattcttgcgtataatttacaactcccatatgagtcagagttagtgaatagtgacagtgttgtacagctgctaattattgcttgtgaatgatcattaaagataatattttctctaaataaattttgtgactgaattggatattggggacaaatgagactgaatgtgaaaacatttcttggaaggagaggaaaacaactattttgttggaatggaatttaagaaaccaatgattttctttttgtgcaaaaaaaggatttattgtcttgtaacaaagcaaccactaatttgaagtttcgtcatatatccatttacaagaagcagagctagctccattgaaaccaaacttaatgggcaaaataaactaacaacaacaacaacaacaacaaacactcacaacaacattcaccattttgttgatttacatttagccgattgttcatttatgaagtaaggcttgaaatgtttcataacttcctcatatgttggcctcttgtagtccactgcctgtgaaacaatttaactcgtgaatcagaaattcactcgaacaaattataccaaaatattcaattgttttgaacaaaatttccgcaaataaattacttgctcgataacttcttctggggttgcccatttccactctgaaaattctggttctgcttcaccagtagctaagttcacctcactctcatcttttgttaatctcataagaaacctagttacagttcaaatacatgatctttagtagaatgaggccatgtaaatctagtataagaaaaagaaagcaaattatatttacttaagaaggttacataagactttatgtgagagaagttacacaacattgaagataatggactcaattattatgggaaatcaaagaaacatttggcatatttagagtaaaagattaataggaatttcaagcgcatagatgataaccaaaagaaatgaccttagtaatcttaatgagtgtgaaccttgaaagaagtatagttagtcttagctgattaaggcaacctgaattttcgataattacttaatgtagtaatgagggtttatcattaagcttcacaataatgcaaaatccatttctaacagacaagcagcaaggctaataagagaaccttttcggttaatttctatgtcaaacctgttttatattcggtagaggaagcaaggaaccttgtgtatcaaatgaaaatggagaagaaggcacttttgaaagggaaacttcaaaaaattacatctattgcacacagactcgtatcgaaacagtcttttaagggtcaataacctagaagttgatcacagaagctcccaagttcaggttttccattaatatctaatacaactagatctagtcacatagcctgattccctttcatctgaatataactatgtgagctgaagagacctaaacaaacaaaaaattgatgctaagtctgtaatacaaaccgcttttccattattctgggttataatcagaagggtttcacagtaataaaacaagaaaaatcaataatcaatgcatacgatgtagcaaactagcactctatgaactgaatatatgaatttccatttcttattttagaagaaagacttaccacttttgtgcttgtccatgccattcgcctccccagagacgattgactttggtcttcacagctggagggaagtcataagtcaaccaatttggaacctgtcaatttgcaacctcaattatgagctaataattcattgatactctcctcagttgggtaaaatacaggcaaattcgtacatattttcgatggcatttcaaaaacactgtccaagggattttttatcattcagcagcaaatttatacaacttcaactcaaccatatagttcaaaacttagtctgtcagaatttaatagaccaatcaccattgaggttaatcatcatcttgctgacttccttcttttctaatctgtttctaacgagtttttgaaacagtcacctacttgagtggaatggaagcatggattccaaatttcaacaaccttccataagactaaaattctctagagtggttgattaatttaagtttcatcgaattcgtcataaacctaaagagttttgaaatcaaagtaaatcattaaatgctttaagtgtaaatctaatggtgagacagagagagtttaacattgttgaaatatatccattgcaagactgacacagcttccagccacaacaaagatactttgcacaaacctcagcaatgatttcagccgatacaatcccagtttcttctcgcagttctctaatagctgccaacttaggttcttcaccctcttcaattcctccctacattatccaaaatgacgaaaaatcagtataaaagattagctaaggtgggaaattgagttgagtgtgttaaaccaatgcaaagtgagtttgctcatcagttgtatacatatatatccttctataatatatcacctgaggcatctgccatgctccgggaacattcaatcttgaagcaacaaaaacctgtatgatctcaaaagtttagcattttcttcaccattcgtagtgagctaggaaaaataaaaactctttcagcagacacaagcaatatatatatatatcaactttgaacttgcctatcttgctcattacttccattcagaaagtaaaataacctgctacataaatgcaaacaagcctatctacacaagtcttatagcacactatcattgaacatataccactgttattgctgaattcaaatactttttttcaatgtacaagtgaggagtttagaacattcttggtgactgtacaaaattttcaaacatttgagtttttgagtactctaaaaacaaccatactaatttccgcttcagtccaaagcatgagatgtgaacagttcacaatcattgatagtccaaagtaatagatcctccctcgttcataaatcaagggagaaaataaattgattgttctatatttagacaagtgctataaagcatttctagctatcacgtttcaattataagattatcctcacgcaaaggcaaatttgtcgcatcaaaaccaaatcatattcataagggacaaattttgtttcttagaaaaattttggagtgaaaatgaagccaaatcccagcagcatgataatagtcggataagaaaacaaagtcaagatttttttagcttcaagcaatcgaattcttttcataaagaaccaaacttaaccatcaaagttctttaacacaaaaaacacaaaccagatcctcaagcagtaccagaaaagcaaaaaagaaaaaaaaaatcacaaacaccttcttatataagcaacagtataataggaattgaggtgggttttgtttaatttgagtggaaattaaaatatgggtacctgatcatcagagttaatgaggcaaacaccaacgttgggacggtacccaagaggcagattctccattgttctgctccactaccactgaaaaggagtttaagagaagctttctctctctctctctctgtatacctatctgggaataaatgcttagaccattaggaatttcagaagtatatatatttttagaaagaaaaaaaaaagagtttttttgtgggaatgagtgacgctgaccatgacaaaaagtggtgagtcagagcctcagagggtggagttttgcccccacttaagttgcgcacccgtgcgctcccttgccttcggtaccatcatcaaataattactcattagtcgtacgccccaaagtcaaaatctgctgcgcttctttccactcttttaccgttaactccatggccttttttttttttttttttgataactattaaagaattatttaacaaaaacataaaaacaacttaaaaaaaaattacaaaaatacgattttacggaatttttaatatttttacaatttttttgattttatatataaaaattacggtctttttatattgtaatcttgttaatttgttgttgatttnnnnnnnnnnnnntgttattttttgttgttacttttatgtagttttcttattgattttatgctattttcgtgttattttttggaaaaccgtaaaaatgtcaaaaaaaaaaaacattctttgacagtaaaaatataattattttacaaaaaatagtgccttatgtaattattccaactattaacctctttttatagctagaagaaatataattataaataatggccaagataaaaaatggaccaaagtaagtaaatgctcccctccttttcaaaaataaataaataaataaataaatgttttcttcctttttaatctaacaaaatcaccaaatataataaattaaataataaaaattataaaaatatttatatttttgtcgattttcttaaaaaaaattatattatataaatttattagtattttatattaatttattaaaatacaaaaaatatatattatattattaaatatattatgtatacaatagtatttaatatatcataatacaaaaaattaatataccgtagtaataaaattatgaccataaaaaaaatagcaaaaataaatttagtataataatactaaaaaaagtatatacaataataaaattatatatatcaccaaaaaaatatataattacatataattaaataaaaattaaatatcattttaataatatactatatacaataaaaaaaatataaacccacaacaattaaaaatataataaataatattattaagaaaaaatatatcatactaacaaaattatataccaccattaaaataattatacaacacccaaaaaattatatactactttaatatataataaaatagaaactaaacatgatctaaaataaataatatattaatatatataataaaatttatatactatgcaacaaatattatatacgatacaataaaagtatttttatataacgacaacaatgaattatatatagtatactaataatattatatgtcacgccaacaaaagtatattataaaataaaaactaaatattatcttaaaaaatattactataaaataaataattgtttattggatcacatccaatggatttagacccaaccgatccaattcaattatttattggatattaaatttcgtcatccgatccaatccaatcgaattgagtcattcgatctgatccgatccaatagatgtattggattggatcggttccaaccattggatgcattgactggttttttattggactgaattggatctatccaatctattttagctaccatttaagttaatttcattaaaaagaaaaatatatatataaaaaaaatatgtaatgggtaaattgcggcaaaacccccaaaacttttattttggttttacttaacccccaaaacctaaatttgggcggtaaaaccccaatgcttgtattctgttagcaatttaacattttcgtccattttaagtgttaagtgccatgttggactcgacacagtgtacacatggcacatttttattggtccacataaaaaattatttaaaagaattaaaaaatcaaaataaaataaatttgaaattaaaaaaataattataaataaaaaaataacttttcttttttttttttctttctttttttcatttctttttttgttttttcttttctttctttttctgtctggttcatctcaactctctctctttctatcactctctctgtctctcttagtctagatttagggttttcaaaacccttgggcagccaccccggtagttcgccgaccaccccaagccacctcgactcctctctctctccctcttagtcccgatgatctcggcagccaccacaggccacctcagtggttctccgacaacccccagcaacctcgacggttctccgacaacctccagccacctcgacggttcttcgacaacccccagccacctcgacggtgcctctttctccctcggtgctctcgtaagtcctctcctctcctcatgtctctttatcgaaaaaattgatttatttttccaaatctaggtgttttgtgatttggaagaatacctaatttggtttaagaaactatattttggtgttttgtaatttgcattttttttctttttcaggtgagttttgatgggttttatgtggtggtggttttggtgatgtattggtagttttggttaggtgatgatggtggtttctggggagagagagagatttagggggagagagagagagagagagctgtaaatgaagaaactgaaaagaaaaaaaaaggaaaaagaaacatacgtgagaaaaaggaaaagaaagaaaaaaaaatgaaaaattattttttatttataattatttttttattttttttaaataatttttttatgtggactaataaaattgtgccacgtgtacactgtgtctagtccaatatggcacttaacatctaaaatggacaaaaatgttaaattgctaacagaacacgagtattgggagttttaccgccgaaatttaggttttgggggttaagtgaaaccaaaataaaagttttggaggttttgccgccatttatccaaacataatttaaaactttataattcaacgtacataataaatattagtttagtccaacctaattctcatgatctcataataaatttcgctaaaaataaaatttatttaatacgcattgataattttatttgcgtttaggtagataagaattaatattatttaaagaaaaaaataactattacccctatttaaagaagaaatattggcggctaaaccacctgaactttacggtttgta

SEQ ID NO: 36560 - DNA, 2671 bp, Cannabis sativa
gaagtaatgtttccataataaaaagaaattttggagttctttctcaacggtaatgtaatgctttgtagtagtttaaaatattgctaacaaaatttttgaaaatggctaactagccgttaagcagtgagaaaagagagaagaaaaagtgggtgttgtggtggctctctctcctccatgacaaggacgtcacgtgcggggacccctttcctatgaggccaactcacacatgtggaggtccccatccatttctccacgtcattttgacacgttacccttgttgaaactttctcattcatggagacatttttttaaggggataaaagagaaagaaaaaagacagccaattttattctcttgtgcaaaagatgagaaggggctcaagattttggccaaaggccaacaatcctttgcaaataaaaacataagcacataacaacaaataaacaaggctaagaagtagtagggtactagtgtttttctaattacatggttgaacatgttatatgtttctagactttggcaaagactggagagtttcaatgtacatgatacataagaaacgctttgtacaccaccaagtaatggaaaacggctaaaaacatgagatcaaaataaaaaagaaacggctaaaaaaaacattataatgaagttccagcatttgctttgtccagcgatcatcaacattggaaacctccacatgcaataacccacagtatcacgatcaatacaagtactgctcctgcaatcatcagcttcatttggaggttttgtagccacattttccgtcgcaattgccttccttgcctttggaagctgtcagcctggattcaagtgcagaagttcatgttagcatattacatcaactgtaagtatatttattccttctgaactactaaatcaaaaagcatgtaattacctggaactgcaagttttcagtcttgtcgaccagaatttcgatcctttcaccacggtccaaaacctgcagccaaaagttaggttggtcgccatatatcagttagtaatgcacaaactggtcttactataatttttatcctagttttgaatgccacacatatcagccaaaatgacagatgccattcttcaaacagagtaaaacaccttctttctcttttttaatcatcaagcaaaatccctatattcactattatggatatgttcatgtaaattctaactatctcggtacccttttgagcatttacgaatataatttaattttttccataaaaaatgatatgggggttcttgcccgtgacagtagaagattgcttgaaaaggggaaataaagaaaaggaacgaaggatcaaacttctaagcaaagcaatgccatttcatctcaccactctaccttaaaaatcaaagcaaaattcttatatttgtttcataataatcaaatatccattaaggtgaacaaaacatgaattccctgaagctttccttgtttggagctatgattttaccatggaaaaaaaaattgtgaggggagaggaaaagaaggaaacccaagaaattttttcttacattggatatatacaagtaaattggaagtgaaaatatattttacaaacttttcacttttccaagtgaaatctatcagtaaatgttctaaatactctaaaagtgaaatctacatgtaaaagttctaaatactctaaaaataaaaggaatctaattcctacttaacaaaatctcttgtttgttcatttccaaacaaaagaaaagaaaaccatcgaaatgtgttttaattatcccctaaaattcaggctcagaacacaatgaacggttctaagcctttcacaagctcggccaatatcatagccgggatttcatattttccacaatgtacaatgtactattccagtattagctagatgtaaagttaagcgcagtgtgctattatccagatgcaaataaatagagatccgtggattataagttcttacaagaatatcaataaaaatgaatgcaatgttgtgggtctgtatgaaagataacatttactatagctccaaagagcactttccctttctagaacaatgataagaaaaataaaactgtgcaagacaagctgcatgctcaagtatttctgcatcagagagaagacatccatacataaccacaccaccttaatgtttgggaaagctaaatatgagctattgcaagacaatacctagataagctttacaaatatgttaataaggttttgtcaaaaaatatatataattataagtttatagggtgtttttgttgttattttggtgcatatttatctcaacaatatctcgccgtctctatctaagtaaatctcacacagacaaagaaaagcctaccaagacacactactacaccacttttctcaattatttctgtagcagaagatagtcacgttgtgataaaagacagtgcatacaatagttcaaaagagtatactcttcatacatatgaaagaatctcccaaaacttgattgggaattctatccttaaaaactgaatcctcctatcttactaaaatatatgagatgcgaaataggaaacctaagcttatgacttgtggactcagattatcatgactaatttggaatcaaaacaaactaaatgggactaaaccatgaatctagtctacccacccatcacgagagagagagagagagag

SEQ ID NO: 36561 - DNA, 3201 bp, Cannabis sativa
atgaaaaatataattgacttaaagttatatcatatgatttcttgcagatggttgacagattggatgatggaaccataactgcagaacttggtccacttgactataaagggctttataaggcactatacttagagattttgtttattagactattagtattagttatgtatgctccttttaacctccaatgtggttttcaggctgttggaagagccctcttcagggcacatgtagagggtcagcttaaggtaattgagatattagtcaattatgcttttattaatgtcttcatttgatcagagtcaactaattatggtaatattacagagtgagataatgtccaaacccgaattgtttgtggagcctgatccggaactacctctagctcttttggatcaaaaggaggtatgcaacaatttttcttttggaatgtgaaatccagtcttatttacactgtcattctcatttctcaggctggtaaaaaacttctgctaattaccaactcagattatcattacaccaacaagatgatgcagcattcttttgatagatatcttcccaacaatatgggctggagggatctctttgacattgtgagtgaacaatcttctttaattcacgccaaagtttgatgattattttatgtcatttcttgcatgaatggtagtgcttgtttgggttgaacattgctattaagcaacgtggtgcccagcacagatagcatcctataaatggttagcggtaataaatgcgacttgatattgagttgcaccagtagctgacacctcatgaagatgctagacacattagcatttctcttagaaatagtcattcttgttaaccatagcaaagtttcgtgctcggttttcaagaatctcagttatgactaattataaagaatgttaagtcactatttttgtttatatcaggtaatagtctcagccaggaaaccagagtttttccaaatggcacaaccaatgtatgaggtggtgacgaatgagggtcttatgcgtccatgcttcaaggccgaaacaggtaaattttcatattctagtacatgttctcattcattagtactaacaatagatgatgctcaaaccattcaatccatcatgttcatcttcaggggggttatactctgggggaagtgctcagatggttgagagttccctaaacattcatggagatgaaatattgtatgtgggtgatcatatatacacagacgtaagtcaatccaaagtccatctacgatggcgaacagcattgatttgtcgagagctggaagacgaggtcagtgtacaaagtctccactttatttatcatttgcaaaactttctgtttgttttgactatttcaatcatgaaaagcttttcactgtttcgataaaatcttgaaagtgcagtatagtgccttgattcatagccgagttcatagagaatcattgatagagctcataaatcagaaggaagtcgtaggagatcttttcaaccaactccgacttgctctgcaaaggcgaactaaagggcgtcctgctcaagtaggctttcattcacaactgtcgggttagagatgaaaaaagcatagagaaaaaaaatgcaaaagaaaaaagaaaaaaaactataaaactaatctactgctttttactgttgcattttaaaaaaaatattctttcagactcttgctgctacaaacatggaagatcaagatcttacagaatctatgcaaaagctacttatagttatgcaaagactagatactaaaattgctacaatgctagaagcagatggagagctcttcaacaagaggtaaaatgatatacatatataattgatcatgactatagtagaaacatcacttttgtccctaacggtattcaagaaattatagttcattttgttatatgacggtctacatacattacgcgtctgaatgtttgaactttatttttgacactataaatttttcgaaaacagatagaatatctactataactacaatccacaggatcatataagaaaattttagttataatttctctactagtaggaacaaaagtgatattcctagtagaattttcctatgtaatgtatgcatattatatatccctttgtatatgcaaacttgtatcatctgtgggttaagtagaactctttgtatcctatgttaggtggggctttctgtcaagagcaggtttgtgggacaaaagccatataatgagacaaattgagaagtatgtactactgtcccttaacaaaattcttcatattttttttcaaataccacttggaaccttctaattaaaatgatatgttgttataaactttctcaaattgcagatatgcagatatatacacttctagagtatcaaatttcttgcactacacaccatttatgtattttcgctctcaagaacaggtaattttgagatcaaagcatcatctttttataatttggaatatgaattttccttaacacttcactaaattgtgtgcttttattgcagtctcttgcccatgattcatataaccataccatgttaaatggatctgctaccatggacaaccaccaataaaatcacaactattgtaatattagttgttaagatctatttatgtggttgttatgtttggaactattacataataaacttgtagttaattgcttatgatacttggagttaagtcatagatggaataaaatatgatttttctaatgccatttttattcttaaccacacaaccatacaattacaaactaatatgtactcaaacacaaggcattatgccacaagcttagtgttgcagatgaaatagattctattaccattggactttatgcagcattctatccaaggtggattcctgtgatctctttcacatcctaacaatttgttcatcttcattctttttaaagcatcagagtcatcagaggtgaaatcttcaaagaaaacaccctgcatgtgccaaccaacattactcagaagaagagttaaaaccaaagttgaagctctttgataaattatttggaatattattattacccaatgttgggaatctaataaggcatgaattcttgctgttgggtcttctagtgtcagtataatcttacactcttcattctgcctaagaaagctatccaaattcgaaggggagatcgctactactcgaacaacacatctcactatggtttcgatctaaaaat

SEQ ID NO: 36562 - DNA, 5946 bp, Cannabis sativa
aaaaaaaaaaaaaaaagcacaacctttttcaactttcggccaataaaaaacataaaaaagtaacctatggtgacaaagataatgatatatatattttgcttaatttttaatccatgtgacctttttattcttatcaaatcaatgcccaccattcctttttatcgcatattaatcattcattcactttttcttatttttaaaactcaaaaaaatcaaataaaaaggaatatattattattatatataccacgtgtacacattcataaatatatctaaatcaaaagaggaatatataggaaatagatcttgacactctttttcttttaagggacaaaaaagtgaatcccataatctcaaaataacatcatatcaatttggtaattaaaaaaatcatatgaaattataaaaaatacaaatatatatatgtatattatatgatgataagaataaactaatatatgtaataaatcacaataagaatttataatataatgattaattgagaagaccatatcttattacattaacccttgtttcacgtaataatcacttaattaaacgttataagcaacttttatatatgcgaatattattattatatttattattattgtttgtggatgatcattataattattctccactccaccgttaaaaataaattatatatacatatatgaatatgtgtgtatataaacaactcaataacattatattcatgtatatatacacatcacatagtgccacacattattaacacaacaatataagtcattataatttatatatatatacaaagttgtggttggcctttagcaacatgcaaggtcgttcaatcttcaaccacgagtaatattattgtgatattgtctcctctctctctatatctaaatatcatatatatatatatatatataaattcacataatattataatttatataaatgtctatataatagttatatagtgagagttatatatatatatatatattgtgttttcgtggttaaaatatatagtaacctcacatttaccggtatttccgttaatagtaataataaggatgacctctctctaatttccttctctacattacaacaaaagcaaagtttttatttttatttttatttttttaattttattatttttttaattttatatatataattatatttatatatataattatattaagccagttgtaattcccctgagcggatagttttttggcaatttttttttttttttaaaaaaaataataataataaatcaacttggggcttgtggaaatctttcaagttgtgttttgttttgttctgtttttttttttttaaattatttatatataaaaagtagagattggagtgttggttttttttttttttgagaaatgaaaaaagagaggaagagaaagatgaaaggaagaatatcaagaataggaagctatgcaatctcatctgccattagagaccaacaacaccttcaacaaccttgtattacatgtacaacttttaacatacttgctcctatctacaaacgtctcaatcatgaggtttgtcaattaaagtttcaatctttaccattttcttcaaatgggtttatgttgtttattcttaaaaaacacaaaaacatattaaaaatccaatcttttgtttttttgttttttcttaaccaggacccaagttgccgtgaaagtgattacagagcattttggatgactagaaatcaaagcattttagattggttgttatatgaaagatcttcaatcatttgtcttcaggtttaattatatgaaaataaaaatcctttctttatgtctaaatttatcattttttttttatgaaaaagtttctaacttttttgtttggtttattttattaggagttttgggttggaaatgaagaacttgttgatgtttatgagaagagacttggtgctgctggttacatgagtttcaaacttggccgtacaaacaatcgtggtgatggtatatatatatatatatatatatatagttttatgtatatatgctctcttaattatattcccctttttgtttttcaattcaaaatcttttcattcccacattaatattaatatgaacctttcttaaaaaatcaaactttattttaagaaaaacaacatcaacatgctatttttcttgtaaagtttggatttttttttttttctatttttgaataattctgttttcccatttctgggtttttgttattttttctttctacaaatattggcttttgattttgctaaattttgtgtatttttgttcatttctcttaatagggttactcactgctgttcataaggatttcttcagagtacttaacagtagagaattgcatttcaatgattgtggagatagagttgctcaattgttacatgttgaattagcttcaccaatttcacaatgtcgaaataatgatcccatcaccaaccaagagattctcattgtcaatactcacttgctattccctcatgattcaagcttgtgtcttgttagattacatcaggtaatgaatccacttttgattctttgttcttttaagtatgggattagttggtggtttataactactcgaaaactcttaacaagtcggttttgttaggttgagttagatccaataactttcctaataagaatactaacaccttgtttaaagggtcactttagaaaacattatttcaaagttctaatttttttaccaattatgtgtctttgttcttgaatgaacaggtctacaaaatcctgcaatgtgttgaatcatatcagaaggagaacaatctaaattccatgccaattatactttgcgggtaatttataacactttgttcataccaaagattttgaacacaactcactcctaacttctctattgcaatgctattctatgttatgttttttctagtgattggaatggaagcaaaagaggacatgtttacaagttccttaggtctcttggcttcgtttcttcttatgataccgcgcatcagtacgacgatgcagacgcgcacaaggtaccatagtttcatgaatttcactcaaaaaagagttttttattttgtattcttgatggggattttcttgctcaattttctcttcaaatttcttgtcttagtgggttagccatcgcaaccatcgtggcaacatatgcggtgttgatttcatttggcttcttaacccgaatagctatcgaaaattccttagaacaagttggactgaagcagtatttggcatgtttaaggtcagtttttttggcctttcattctgtttttcattttgtgtgtttgagatttttcttgaagtgaaataactatcttttgttatgtctttaatggtttcagtatcttttaagaagagcttcaatgacagaacatgatgcattttcctttcttaaggctgatatcaacagtgattgcataaactatgctggtttttgtgaagcactaagacaggtttgatctttgatcaaattcaattacattataatcttcagagtgtgtttggaaagtcacggtgaaattggatttaggtgtaattagaggtatttatacagtttagtatgtttgtctgaccatgtaattacataataacagtataactgcaagtaattgagggctcctaattactctctcaaaatttttagtataattactaccttaataattatatgacttagtaattacatagtgactttcaaacatatgacaagttttgtttgtgttttctcctgcagctaaatttgattggccattgctatggactaagtgatgaagagacaaaggatttgtgggatttagttgatatagatggcaatggagttattgactttaaagaatttcaggtaaaaaccatcttctcaaccgagcttaatcttaaaaagggtgtgttcggttgcaggtagtggaatagaaaggaatcaattttcattcaattcatttgtttggttgaatagttcttctgttttaaaataggaagaaagaccgttccatttctattttattactcccaaccaaacgcgtccttagaagaactatacaagaaacaataagtacttatgttgtcaaattattatgtcattgcagcaacggatttggaaccctgcagcatctgagcaacgcgatgaatatatcgaagaagttgttgaaaaggatggtgtgaaagatagtaagcaacaacaaacaattggttttagtgtaaaaaatgcagttctctttccttctgaagttgagaaaggaaagtggccagatgactattcgctctctgatcacgcaagactcaccgtggtgttctcgcctattaggatgccttgttctcaaccgatatcctaattcgcaccacggtgagaactcaatcaaagctttacatgggaaatgagcttaaaagtccatcaaaggctatcgaggctgttgcaaccatcaaatttgctaacacaggccgcgacatgagacgccatttgggaactttgttatgctcaaactcaaactagagaagagattaaagaaaggaaaagaagaatgttatataataagatttgtacattttgtaaatagattgtatgtaaagtcatataaaaaagaaaacaatcaaacaatcatcccctttttgtagcatatgatgatgagtgaaagtattgtttttagaacttgttgtacttaggatgttaaataatgtcacatagttctttttttatttttcttgcacaagattatttcctcttcttcattaattacattttaattaggggtgcgtttgataatatttttctattagttttttattgttaaaattaaaaagttaaaatattttttaaaatcaagttctataaaatcgtttttactttttaatttttaattaagaatctaaattttaaaaaaaataaaaaaaaaatactttcaaaatttttttaaacaattttttctaattaatattttgaacaccgaccccaacttagacattagaaactgaattaggatttggccccggacctgcccccggttccgacttcggactcgacttaaataaaatcaataaataaaatgaaaataaaatttatagaacatacttttatttttgtttttaaaatttaaagcaaaaatggttataaaacatatttttatttttatatttgtgattaaaaatttaaaaatataaatgttaccaaacaccatttatatctttttagttttcactaatgattttttctaacatttttataaaattactagaatatgttcaattaagcaaaatatttatctatttattctatgtttatcatttttattttttttatgcaaacatgataacagaaacaaagctaaagtgttacacatttagggaattaccttatatattatttttttaacttttttttaaaatttacaatttgagtttttaaagtggttgcagcgctagttacaatagggatttctgtactattttttgttgcaatttaagttgcaatgctagttgcaataaaatatttaatttggaattcgtaaaaatgcaaaaaaaaattattttgaagtgtaaaaataaagaaaaccttatacatttttctttaaatggctaaaagagaatttatggaaggattcaaataccctttaatccttatctcatagtaggatttagctaaaaaaagtatgtaaatattttatatattttattgtatatccctacatttaagataagtctttcatataagttaagtgtgatgtaaattttcaaagaatataaagtttattaatttattattatttaagtagacaaactcagttgaaattgaatgactttaaaagaaagtgattgacaagaatattaggtgctcttcattcaaaaaaaatatatatataaatatattaggttctttagtagaatttaatacgtttatatctttcaaaatataatataaaattctttttttttt

SEQ ID NO: 36563 - DNA, 3890 bp, Cannabis sativa
agccttaactttaatctagaaaacttaagtcattaagcttgatactagcctccaagtgataaagttctaaccctaagtctgataactctcttcctcactctctctcacacgcccatacaagcactctgaacacttgagatttgctaatcctaattcctactttgtgtcctcaagggtgctatatcatatcccacatataactatctctgaatagtattaacccttagtatcaatacaactaaaagagaagtaggtcattacctgctatcaaagggggtcgaacctctacaacaattttgtgtgttctttattttctaattctaattgtataacacgtggcaaacatcacatccatatgaccttgctgttggttgaccaacatttcaaggtcaacagcacgattggaacctcgtcaatattttgcaaatgagtcggtatgcttcttcacgatcagctcgacttacactacaaatagaaaaacccctgctccctctacttatttaactatcaacctgagtagagcgagagccaacagttgtaacctctgacaagtagtctaagtagaattcaattgttcaacatgtatgattcaacaatacaacctctgataaatgtttaaattatttatatttattaaaatataattttggtaaaattaattatctaataaaaattaaataatttaggtcaatacctcaatgtcatgttcaaattccagttcttattgtttatatataatatggtggggacgagcactcaaataacttgtggcataaatatgtataatatttagacatacattgtgtgcgtgtgcatgacatttgcttgcttttatagctcagatatttattatgttgttacgaggttttctttcccagttcacatgatgttgttgttgcttttgaacagttctagatgagatagataacaagtttgtgttaagtacaagtgtagtactaccacttgcttttccgaactatactaattaaagtagagagaagaaaggaaactaaagatatttcacccatcatgtaaaagaaaatatatataatagataagggcataattttctgtactaattaatttgcattttgaatgacaaaaaaaaaatccttgctctacgaaggttttcataccacctttaattaatttatggtggatataattaccctcttagaaagcacagcatgaaatcaaacgaacaagagatttaaaattaataatgagctgtacttaaactatagccttcaaattaatactcaaataacaataaataagaccaagtcatataataggtaatagccactcacttttcttccaacgcccggctagaaagttccaagagagaagtaatttatttacagctattgggttattttagttttttttccttcttcatcattctaaagaaccaccaatttttgcagtttagtccttacaaattcagaatatttgctaatggggtcatgttttgaagccaaggactattcaactgtgtccaaaactgttcttgggtccaatccaggctcaattttggaacttgtaactcaggcaacttgtccagcttgtaaccatatggtacttgcaaagatgcagtggtaaaggaggcattataattatctactgctgttgctgatcctacaacttcttctacttctttcttcaacaccaagtcatttgcggccattaatggttgttggaattggattagctcttcatgtgggctacaaaacgaaaaggtgtccattggagaggctggagaattatgctcattctgaaagtttttctcttcttccatttgtaccctctgttctagtactttcaatgaagtggccttcctatatactttgcacaaaactatgtcctgcgttatttaaaccaaattaatatcttaattaattacctataaaaaaaaatgtgaccatatatagctagcaattattataagattttctcattttgataattggaaaaataattatatattaactaaatttatatatataaaaaaaattggctaagttagtacactgacactattagtacgttttagagataactcttatgcatattggaaggttctaggcaattttagcatttaaaaaaaacgtatgcatatgtactttattattattatattattattattttctttctttggaattttgcatgtgaagattccttgaattttctcaaacgtaaactttacaagtcaagtatatatatgtgaaatcacttataatttctattgtttgtatttgatcctttcttgtgtatatatgtaattatgattgatatatggtaagagataaagggggaaaaaagtaaagtagtaattaactaccttagagagtttgcagttatcaggcaaacgatactcattcatgacccaatcagtcttggttcctctaggagctctgcccttgtaaaaaacaagagtttttcttaaaccaatcacccttttgggctctgataaactcacaatccgacggtcagaacctgttgctttccaaaaccctctttcagtggtccggttaggccttccaccactaccatgctttctatctcttggcacaaaaaaataccattctctttctccaagcttcgccttttctatatatgtcaaagaaaaacaaacatatcccacattattatattataaccataataacaaaatgttgataacaaaaaggtaataattatgtatatattataccgggcaagacccaaggatcaaagagatagatattgagagagccaattatgtcaaaactcattttcccagacaccatattcttgagataaaaatctaaaagctcctcttcagtgggatgaaaccgaaagccaggaaggtcaagtggtattacatcaggatccatggatgagttgatggccatttaattattaaagtgctaattatttgatgatgagtaatgtattggttttggttttggttttggttttggtgatcagtatatagttggatgcatatatttatatgtttgtagcttaagagaaaatactgaaaaatgggatgggataaaaaagtgaggacgatgtaggagattttataataagccatggttgtgaccaagtcatgaccaaacatatggggggcagaaaagtctgtccaatattggaagtgtgtgatatgtggggaccccatgatagtgaagcctacgcgtcttgacgtagaaaaaaccaactataatattatatggacaaatatatattatgggatatgattttactttccgtgattgtaatccgtgatgcacggcagtcgtcagatgagagaattatttgatctgacgattgagattgatctagaggtaattagggttaaaaagtaaaaacgtaccctgacactcatttaatataacctgagactcatctaatgtaccacagaatacattccgtgaaaatacatcacgagacaaaatcataccctatatattatatatatttaacaacagttaccaattttgtgcctattatcaattttcccttcaaaattctcccaattatatatatattttttttatataaatttaacttttctgtaagattttgtctcattatttgcttgtatgtctttataaattagtaattttgatttaggttttaaactttaataattattaaattgtagctcttaaataaaaataaaaaaaaaatcaatatttttttaatagatcttaaggagttaatttagatcttcaagaaaatcattgtgaatagtaaggaaattaaaagaaaaaatcaaaattttaaaacgaattgagcaatttcaaaaaaaaaaaaaaaaatccatttagatataaaaaaaagtatgttaaaatttaattttgtaaaaacaaactttcactaaaataatttatatttttatt

SEQ ID NO: 36564 - DNA, 2028 bp, Cannabis sativa
  modified_base (46)..(76): a, c, t, g, unknown or other
atatcaattcaaatattaataggatttattttattattattttatnnnnnnnnnnnnnnnnnnnnnnnnnnnnnnnaataaaaataaaaagtcacccataaatttctcataaaccaaattttagttatatagacgcactttatatagaatagatattgattattaatattaatgtatataattattaatgaatagtctcgcaggagatttttataatatattttgaaaatgtaaaattagataaataaaatatctctatcgaaacctaatttaagtaaacaaaatgggcatcaattttttttaacaattatcatacttaaatatcaaagtaaattaagtaattaaatttaaataaaatgtatcataattattttaatcattcttatcttatacagctgtttactttaaaaaaaggaaaataaaaagataaaaaaatcttagttatcaagtaaaattaaaattaaaatagaaagaaaactgcgttaattattattaagtttttatttgttaaaattccaccgcctattccaaaaatataattcaacttaaattagaagacattctcaaccgttcagatagattcatgataacttaatcttggccgtccatttatacgtccttttgctataaatagaacccctgggttcaatttttaattttcacatcattttgaagtaacttttcagaatggggtcttctcgctctctctcgcgatttttcgctgatcggttagtgttgtgattttgattaggtcgatttggttcttgatcggtttcgtttggagtttggattaatatttagggtttcttttggttaattgcaattacgcctggtatcaatccttcacaagtttcattgttattcattaataattagaattagatcaagattaataaatctaatctttcatgatcatcagaacgaacataaatggttgaaaccttgacttaatttccgtactaggcaatctccaggagtagtaggagtactgattatcttcatcgctgaaagtagtagtgatcattgattcatttaaggtttgacatacttatattcaattgaattttcaggttgtgctgattaactgcggcctttcatccttatgggtttggaatgttattcttttatctctccttctgttcgtcagttcgaatttctttctgttttcattattttaggtgattgagagaatgggtcaaggttttttctgtgtaaaatgattatttcaattcttattatgttgtccatcttagcatatgcatatgtattggactagtgttttcttttatagcttcggttatagtgagatttttggttcatgccttttattttgactcttctttcacccaagaatattataaagcaactaaggcttcatttgttatgtagattctatttaagcatgaatctaaccatggaagggagctgtattggactagtgtttccttttaacttcagcttcgtgaattttcaagactctgctatcactcaagagtatcttaaaatatgcaactaaggcttccattcttttatcggatcacaagaatctaaccttggagggaattgtcttggagtaatgtttccttttaactttagcctttgtgagatttttggttcatgtcttcaatgtgttcaatgaattttcaggactcttcttttactgtaagaatattaaagcgacgcttaatcaagcaataatctaacgttggaagggagttgtactgaactagtgtttgcttttaactttagcttcgttgtttgtgaggttttttgttcatgccttttgttttgggtgtttaataaattttcaggagtcttccttcactcaagaatattttaaagtgactaaggcttcaataatccaaccttggaagggagttgtccctgactagtgtttcattttaactttatcttcggtctttgtgagatctttggttcatgtcttttgttttgggcgttcaatgaattttcaggactcttctttcactcgagtattttaaacttactaaggcttcaatcattttatcc

SEQ ID NO: 36565 - DNA, 2024 bp, Cannabis sativa
  modified_base (1112)..(1135): a, c, t, g, unknown or other
atttatgttatataatttggaattggtaatgattaattagacttgttaaaaataattatttttatggcagggaaatttggtgccgaaatcttcaacattcccatcaggaattaaagatttagcaaattatgttcatgccaaaggattaaaactagggatttattcagatgctgggtaatgtattttttacttaattgtacaatatttcatatattataatatcgaaaaactcattttgaatggttctctaaaacgataaaatatacctttcgattatttggtaaattatacaacaatttttatagtcacataactcatattgttgctcgtatcttttattaattattcacataatattttttttttcgtatttgtagaactcgaacatgtagcaatacaatgcccggttcactaggtcacgaagaacaggatgcaaaaacttttgcttcttgggtatgaataatttttttttgtttttggtatttaatttacatttcttttttcaatatatatttaggttaataatgatttgttttaatcaatttagggagttgattacttaaagtatgataattgtttcaatactaataccagtccaaaagaaaggtatgtatttcatatcaattaattaacacaatatatttgttaataaaaatagtttgctgatttcttttaaggaaaaaaaatgttaatatgtaaatttttatttgttgtaatatgatatatttttgttactatttaataacacatttaagatttgttagtacgtcgtattaaatattatattatattatattatatagtattttattagattattttttatgtcatatattttttttaacaggttttatatcataattatgttaaaatatatatgcataaatttaatacttctaattaaaatattatatatttatatatgaatacaagtcattacaaaatatattattatacaatatataaaacatataatagtatgcatttaatataaaagtgctattctttataaagctaaattgtaagtttaatttatgggttcaatacataattttttgaagaaataaaatagagattgattattttgaaagatttattattattattattannnnnnnnnnnnnnnnnnnnnnnnttattattattattaatcatatatttcatcataggtacccaattatgagtcaagctttattgaattcaggaagaccaatctatttttccttgtgtgaatggtaagtataactaaattaattaatttatatgaaaaatataaatctttcccacaattatttatttatttatttatttatttaggcaatatttttttataaatatatattttttttcttaaaaaaaatctcacttattaaaattgtttgaaggggacaagaggacccagcaacttgggctccaaaaattggaaatagttggagaacaactggtgatatttctgataaatggaaaaggtaaatattttactaaatatatatactttcattttatactataaggtagtttgaataataatactatacattattacaatatgtatcgaaactagttcgaacataaaactacatcttctttattgctcgtattgtatattattttcaacaatttttgaagatacaagataatatacaatacgaataataagatagatataaattattgatgtgattattttttttatttttgcataatatagtatgacatcttgtgccgatcaaaatgacaaatgggcatcctatgctaaacccggaggatggaatggtaattcgatattaactcttcttattctcaatacttttgtaaggatcgacctgcattatagacgagttagggctcacatttacggtcttcgtcctaggaaagcttcaaaatttagaaaaacacaaatttttcgcatacaaagaagatcttgaattttttaaagggattagattgaaaaaacgcaaaaacaacaaaagaattacaaaaataaagttgtacgaaattttaaataattttacggtttttaa

SEQ ID NO: 36566 - DNA, 6548 bp, Cannabis sativa
  modified_base (5159)..(5163): a, c, t, g, unknown or other
gtaatttgctattccttaacagctcccctcaaacgaaagggtgagttcctcacaccaagtttgtcaataaggaaagcaaaccgagaatgagagagaccctttgttaaacagtctgctacttgatcgtgtgaggggatgtatcttacttccaattgtctctgaaggactttatctcttacatagtgcatgtctatttcaatgtgcttcgtccttgcatgaaacacaggattagaggccaaagcacttgcactcaagttgtcacaccatgttaccgagggagcaatcagaggaaagttaatttctttgaggagtgactcgatccaggaaatttctgcagcaacatgtgcaagcgctctatactccgattcggtacttgatcttgataccacttgttgtttctttgatgaccacgagaccagagtttcacccaagtagacgcaatgaccagctattgatcttcgatcatctgggcagcaagcccaatcagcgtctgagaagccatttatggttagtttgttgctgcaggtgatgtgcaaaccaagatgtttggagccttgtaggtatctcaacacttgtttaactccactccagtgagtattggttggctgctgtaagaactgactgagcttgttcacagcataggcaatgtcaggcctagtgtgacacaagtattgcaaggctccaactgtacttctgtaaattgtgggatttaccattggctcaccatcttttattgacataggcttccctgctgtcattggagtaggacacggcttcaagttcctcatgttggttctttctaggatgtcttcaatatattttgtttgagttagataaagtcccgattcatctctgtacacctcaataccaagaaaatagtgtagaggccccaaatccttcaaggcaaactgcttgttcagttctgaaataaagcttgtcatttttgtagtgtcacttcctgtaataatgatatcgtcgacgtatattaggacaaagagaatgaagcttgttgactcgaagaagaacaatgaagtgtctgactttgagtttttgaatccccacttcagcaatgcacttttgagcttgtcaaaccatgctcgaggtgcttgtttcaaaccgtacagagatttgttcaatttgcacacataattctcttttcctttttcttcgaaaccttgaggttgtaccatgtacacatcttcttcaagatcaccattcaagaaggcattattgacatctagttgccttatatcccatcctcttgatacagccaaagttagtatgattcgaacagtagcagcctttattactggactaaatgtttctccataatccacacctggcctttgatgaaaaccctttgccacaagccttgctttgtacctttgaaaggtattgtcagcatttcttttaatccgataaacccacttgtttcccaccaaattcatccagctgcaataaggcaccagcacccatgtgttgttccttttaagtgctacgacttcacaatccatagctttcgaccatcctggatgttgaagagcagcagcaacactattaggttcagtattgtcgagagaatgtgagctttgacttaggaagattcgaggcttaaatattccagccttgcctcgagtcaccatgtggtgagtaactggtgcagttggtttttcctgctgctggacagattctgctggtggagaatcaatgctttctggttcaggatctgtgacataaaactgatcgatgttcataccagtattttcatcatcagtagagtaatgagcttcccttcctaaacctgaagcactactggaaacagaggaatgagactgttgtgatggtgacagaggtgcatgagggtgtgcttcactgagtgcttgtgtggcagtatcagctgctggaatggagggttcattatccgtggcaaaagtgggaaggagagaccaggatgatgtgtgaatcacaactggttgtggtgattgaaaattgtttagaaaaccattttcaaagggaaattcaagttcattgaaaactacatctctagagatgtaaatttttccagttggagtaaggcatttgtatcctttgtgagaggtgctataaccaaggttgacacacttcaaggagtggaattgaaatttgtgtgactgatacggtctaatacatggaaaacatgctgaaccgaacaccttgaggaatttataatcgggtttgactttaaaaaggacttcatgtggtgacaagtgttgtaaggttggtgttggcagcctatttatgagaaagacagcagtggtgaaagcatcacaccaatattttaagggcattttagcttgagcaagtaaggtcaagcccatttcaacaatgtgtcgatgctttctctcagcacgaccattttgggctgaggtgtgaggacaagggtgttgaaactcaatgccatgagttttgacaaagtcagagaaagctttgtattctcctcctgagtcacatctgatacttttgattttcttgtcaaatttattttcaactaaggctttgaattcaaggaaggcatttaaggcatcagatttgaacttgagaggatagaaccatgtaaatctgctatagtcgtctacaaagtgtatgtagaatctgtgatttacattggaagagatgggggctggtccccataagtcagtatgtataagatcaagaacagagttagctctagaattagacagattataaggaagggagtgtgctttgccgtactggcaagcatcacagaagcctttcatttcattcttagaaattcttacatgacttgactctaaaacttgactcaacacacgagttgatggatggcctaaacgcctatgccaaacatcaactttagagacacgatttctactaacattagaccgattaacacactggtttatagcagtatttaaagcataacagggacttgtctgatgtaaatcagactttgtggaaagaaaacaaggaaaatacgactgagactgtggtgaaaccagctgatataacccatctttaagcaccccttgaagcagcaccttctttgacaccttgtccttcaccaaacaaaaaccagcataaaattcgattagtatgttgttgtcatttgttagtttagaaatactaatcaaatttttggctatatcaggaaccaacagcatatctttcagcaccagtttatttcctattttagtgtttagaaagccatttccaacatgtgaaattctaagtttattaccattacccactgtgaccttttctttaccattgtagtcttgtttctgactcatggttgaagcatccgaagtaatgtgattgctggctccactgtcggcaaaccacgcgtcactctccaatatctcaggggtagcaataaaggcattgtgactgttttgaggttgtttgcttggaggctgagaattgttggggtcagaacccataaagctttcatcaaagcgattgtaacacacagcagcagtatgtccatacttgccacaaacttggcaagtgggtcttggaccatttgtacgtcctctgcctcgagatcttccaggattaccacctctgccagagtatctacctcctcctccactgtagttttgattctgatgagagaaaacaccacgaccacgtccagaagagtgccctgagttggttttcgcagccatgtttgcttgtggaacagcaccagaggctttgttgtttgagttcaaggtctgtaatctttcgattttactgtcaaagctgaggagaatatcctgcagctcttgccaagttgttttgggtcgagcttcgattagaacaacaatggaaaggtactcagcgtcaaggcccgatagcacattagccacaaggtgtgcttcgggataggggtctccagcaagcgcgagtatgtcgacccaattctttttctgtcttaagtattccgtcatgggtgtcgatccctttcgaaccgtctgaatcagtgttctggtgtcgtccatcttcgattttgagtatgctccatataagctttccaggtcacgccacaaatctgcagcagaggctgagcccattacttcggtggctatgctttctgtcatggagctgtaaagccagcccatgagcaattgatcattaatgatccagtgttcgaattcagggttaacttgtatgatttctctggagacgccatcgacagtgacggtttcagttggtagaaattccagaggacatggctgagtgccatttaaatggccatggagtctgtgaccccgaacgatcgtggaaaccatagtcttccacagggtgtagttatttcgatcgagttttagggaaaagggctgattgagggttgtgagtggaggaagatgtgtgtgtgtgttttgagaagacgaaccaccatttctgttggatgtaggtccctggactgcagagctttcttcagaagcagcagtcggagctgcgttgtttcctccatcttgattggtaggggtagacatggcacgggcctgagtgctctgataccaagtttaaatatatgcaggtattgtatttagtaaatgcagctcaaggaaatggctgctcagtatttcatttatataggaaaagatgaatacagagaaaggagccaaacggctcaatacagctggacacaaatacagagagaatattctaacaaccttgatcctgtaatgattacacaatcataaatcctaacagaattgtacaggtcagcaatccttgaggagaaggaatttgcacacgtgctgatgctgatggaaaacaagttgctggtgcaggatatagaacagaggtgcactgtaggtaatttgctattccttaacagctataaatctaatattgaagaacatatttgaaagttattatgtaattacttaacatttatatatcttttaataatttcacattaatattttaaatacatacaatatgtatttagatgtgatgatgtgataattacatagaaaaataataatatttaataattaatatctaaaataaaaagttttagtaattatgtatacgtccaattcctatatggtgaaacaaatattttatattatcaatattattttagttaccaaaatcatatatattaagctgagcatttcgctttataattgattagtaattttttnnnnnatttattaaattaaaatatgtagagcgtgatattaaaatgtatcaataaaaatatgtcaaatcttgtagtgtttacacataacatttttttatataataaggtactggctagtcctcaaatattatgttatacttattttgatttttaataacaccaaataaaagagtaactatttttattttattctattcatctaaaaattagaaagatattataagtgtaggaatattcatattaaaagttgaaggtgtaatttcgatacgtaaaacctacataattggttacattatcaaacataataattttacaatgatataataaaattttcaaaattattattgtgatttaaattaatagaattattagttatatttctagtcataattttattcaaaatatgctgatggacttgattatttgattttgtaagaaaaagaataaacattttattatgaaatattcaaagagtatatatattgctatatttatatatatggtaattatatttatttataataaagcataaataaatgtaatacctttatttactaattaattttcatttccacacatgcattgaataatgcaagggaaccaatcggcagtcggctttcctaaattaaaaatttggtatcagatgctctagttcaacggcttcaactatacatataaaaatatacacaaacattaattcattttcttaaataaaaaataataacaaagagaataattaatttaatttataatccattgctctttctctctctctttttgttaacttaaatgcagacattttcaaaaagaaaaatatattaaattggtaagcaatttattaagaatcagaagtccatggttttatttattttcaatttttggttgcatgcacatgtttgattattggtagaatactaacacaattgaattcaaaccatttaatttatatacatatttggaaagacaggcacatgttgttggccccatttggaggagaattttgttgttagcaactgaaagtgaaaaatatatactttaatatacataaaatatttctaaaaatatataaataaataggtataataatcatatatcaaaccaacccactttaaataataatttctttaagaaatggaaggcccatgtcgggaggtggaataattttatataatatacatacatatacattactgttgattagtaaataaattcataataaagatatttatgtctcaaatttcaacttaaaataattggtttaacaaaagagatagttgatttgatcctatacctactatcatatatgaatattttaatatatgtatatattattgtgtaaatttacaatacatttttagatgttttgatacacttttatttatttcggtat

SEQ ID NO: 36567 - DNA, 3910 bp, Cannabis sativa
ttttttggcgtgtcagcagcaaggtcattcttctccctttcagcctttagaggtggcgcgaaatgagattgaaagttttcataaatagctactagtttgagttgatgatcgaaattgcttttagttcaagaccaaatgcaatgcaggtttagcaagaagcaagattcttcttttcctacaatggtctaagcctagtttgtattgttccaggtgcagcaaaaaaacatgttattaaaagatttctttcttttccctcttattttttgggttgtacattcaatttgccctggttctaggatttccctacgcatagatctttgttgcttagatatcttgaacattcattgattgcaatttgttcagtcaactaaccactgcttttgtatctggtttgtgaaatcacttcataatacaatattccaatttcaaatatctgtacttctgttatcttcaacatcaaagctctatcttttcaaagacaaaaattggctagcaactttgaagaagattgcataaaagaaatcaaataaaataattcagcattttacaggacaatcttctgagtttctttacgaaagatttgaagaggggggaatatggtatctgcatgctttccataataacatgaaaatatgttagccagttgatttatggtctctgaggcagtagaatctctcagagctagctgaattgatgatagcttaaccagttcatgtccaatgacaatatgattacgagggtagagcttttccagaatctggcaattattcataggcataaaaagtttaaaaaagattgttacccttattaacattaatcagtaaaaaataaaagttagcataattagagttgaaacattactagttacctcaattgaagctttgcaatggtcccttgctggttgtaagtctccaaccagacagaaagcttgggcgagaatgtcctccacctaccaatcaaaacaactattaaaaaaacatcaaatcatccgaagttgaaagcaaacagaatttctagtctcgaattatgtcttgacctttgagaaatgataaaccagattcgaattcccatcaatctgaaagttgagctatgaagaggtaaatacggagaaagctgaaacttacctctgcaatgctcctattgtatgcatgtagaattgacttcagcagatcaagagattttgaggcatctgagagtttgaaaccagatacatcttctgaaactattgcatcttgtaatctgaaggatttaagaagtaaagtcaatagattgtgggcggaagatatgcccattgtgcaataacacaagaaaccacatttcagctgcatacctcctgatacatttccaagctttatctacagctgaatgagaagattctagatcacggtaagagccacatttcaaacaaaacccaggattcatattaggtaagttattgctgcacaaaaatgcatccagcgtcacttcatttttgttatcactgtttaaattctcagcctgtaaaatataatcaataaaaggaaaatgattaaataaaacagattacaggaaaagaagctaattcaacaagtacacaatatggccacgtttgaagaggaagattggattggatagaatagaattgaattggatcggatagaattgaataattttagatatgtgattttgttatgaaatttgagaggatattttgaaaaattaatacaacaacctaaataatacccctaacaatgaaaaacttggtataattttatcttatccaatctccaatcttcatgtatttcaactgcaaaaagaaaaacaaattacaactttgcatcaaatttgttttcctttaaatgattgttgaaaaatggtcaatacattcattcttttattctttctcaatcatatccaaattcactatctatgtgacctacaagtattgtgtacgacggtgatcagttgtctagtgagttgtgactaattagtatatgaaagtcatccagttagaatttaaagattctactccatggtcaatatatggtatatatgaagcttatttcaaattatattgcgagataaggatacctggaaatgaggttcacagctacttgttctgctgatgttggcaagcttctttattttatgcttttcgcagttgagaacagaggcatctaacacaatgccaggacaatttgatttcacacaccggaaagcattcagaacaaggtcggacaaatttgcttttgaacaaccactgcactgacagcgaaacgagtactcattttctagaaattcattacgatctttggcgtcccactgcccaacctgtaaaacaaaaccacaattcttctatgaacatcaaactttgcatgatccaaattccaaacagcagcagtgttcaaaaatagggaaaatgacggttatattgtgaggaagggctgcttggagtttttaactttttgattgaccctaagactataccgatttttattttttgacaagaagatagaataacaaagaaattattatgataatttctcatgttgcacaaatgggacatgtactattagtcaagggttggtatacctgcggaccatatgataactccaggtcacaccctgctgctacagattctgttgttcgtatgcagagtgttcgtgaaatgaagtatgcatgaatatttggctgacaagaatggttgaacagactgccatccctataaatagcttgtcctactttgacctgccaaagtaacaaaaactttaatacagtaagcttgataaacttatagttgttttctaagatgttggacatacacttaatgttgcatatacttaataaactcgaacagagatgaccaggattaaaggagtacaagaataagaatgcaaacctgttccacaatactagtaagagctcctgatgaaactttatcatactgatagtcatgcccttgaatgtcagtagatttcatacgaacaattgtcatagagtttaccctaatttgagatataagaatgacaacctgaaaccatagagaaactgaacctcacaaacaagaactgaaacataagtcttaaatttatatggaccttgccaataccatatatgtatagatatatttgttaagatattgataaagtacgacaaagaatgattatgatataagatttatacaagtatttataaattagtatccttgctcctgaagttcatttttcaggattaggtctcttcccagctgtaataaactagttttttgcagaagtatgaggaaaaggagcatactgatgaaaggtatcctgtcccttcaggtgattcttggaattattttaattttttcttttatatttttgggttgataggcagtttagaacatatataaaaagaatagagaataattggtgatagttttaacaaatttaagcacacagcatacatgaacaaggaaattttttagaagacagacctgtgctatagcgaacccatttatctgaatttcaaagtcactggaatgctgaagacagaataacaatacagtggaatatatatgtgattccaatttgatttcaggagacatttgcgaataatggtgcgaaagctcctataaaatttgacacagaccaggagaaggcatatcagatctgacaataaaattgagataagttcaactgaactgaactagttattgatgaatatagtttggactatgagatataccagaatttccctcagattagaaatctcctgggaacctctctgcattacagacttaacaaataatctaccagctaaaactatctctgatggcaacactgaaggccagtgtgcacctttacactcatgtttatgctcaggaatatgatcactgtctgtttcaggattgtaatctaacatgatctgggcaacatactgttttagcgtg

SEQ ID NO: 36568 - DNA, 5910 bp, Cannabis sativa
aaaaaaaaaaaaaactgctttcaagtataaaaataaaaaaaaaataaaaaaaaaacctcctatttttattattttttttaattaattatttaattactttgatttatatattctgaattttttattagtatcatgattgtttctaacttgaaactatcatatatagtttctcattttttttaacattttaataaatttattattaataataataaagatctcttaattttatgtattttttttatatataaataataaaataattgacgactttaaataattgagatataaataatattaattgtaaaaaatatatttacttaaataataataatattactctaatttttctctatactactctatcccttttattttattttatattaataattttttgttagagaaattcaaaattctatatatacattattcatataaattttaattttttaataaataaaatagatattttttaattttaattttaataaataatttaatagtgtaattttaatattattatatattagattaattttttaagtcattatttattatttttataagtaattttttaaaaaattattatattaaataaaattaaaattattgtgcaacagtaactatgttgcttattttatgataagagatatgggaagagctaaatagtggagcccacaaaaagaagacaataatagtatgtctggatcaaatgagggaacagaaaaagaagatagaagcattttaaaggtggccatatacatgcaatatcttcttcttcatcttcatcaatcatcatcatcaaaaatgatatatgaagaaatttttaataaagataaattaaaaataaatgaataagcttagccttatttggtaaagggtatacatccaaaaattataccaaaagcaaaaggccaactaaaaatggacccgactcagttctcttgagtgttgcttatatcatggcttttcacaaacttaactggacccacattcacagtccacgtgtcaatatcaggtcagatcacgttcaatgtgtccccactaatcttatagtaggtgatctatctgacctgttcaattttctaaattttggacctatctaacgctgtccccccatgcagacagtcaaaacttcttgtgtgcataatttttattaatcaacattttttattatattggtatttatgtaaattatacatatgtatttttgcaaaatttcattcattaaataaaaataattcattgcatctcgaacaaattacaggccatggggattggtgtttggagaaacattctaacccatatgctctttttgaggattttgggtcccctaaagtaaacccaaagctaccattctcaacaatgtcggactgttgattaggagaagcaaggtttttttttttctttttttggctctctttttcctttttacctgccaaattgggattatatattataagagagctgacccacaaaaccagcaactttccttcaatctaaagaaaacaaataccaaaacatgaaccatgaaacataaaaaaccaccctagacctttgcagcctgcagcttgcttgcttgctttgcttatttctcaaatctacacaaacagatggatttctatctacacatatatctaatggatcaatccaacacgaccgttgatttgttggactattttgactttctcattcaactacatgccaaattcttggatggcccaatgaaattgtctcggttggcattatcccaaggaaaaaaagaatagaatcaaggcttgtctatccactcagtctcggcagcaatccttcccgaaccacggccaccaatctttccaaaagaccccattgctgatatgttcttgaagctgctgctaccctcgttgctaaagtttcttgacctcctcgactttcttagcttggaggaacagacatcgctcgtttcttggttggcctctagatcttgacttttaatctttgcaactaccagacgagcaatggcgcttcgacaaaatggacaaactggtggagttagacatgcagttgttgggtttggcttgttgtggcaacagagggctaaggtgcattgcgcacacatctgatgaccgcaattttggacttcaattgtgcaaacctgctcaaagcatatgcagcaaagctcagaatcactgccctgcattgcaaaaaaaattcatgatcagtactccttcgtattcattaaactagtcagttaattggactgtcactgttttgcacaatgcaaatctattgcttagtacagtataagataaggaccagacacatcatggactaggacactacaatcactttcacacaagtagacaataaccattttaagatgggaaagaaagctccagatttcatatctagcaaagtcaagatagtacactctatgagcatatggtcctaaagcttcagaaaaagaatcatttaaaagacttgtggtcctcgtaagggaaatgttttaattcagaagtcaaatgaaggaacaaggattagcatttgaagaacagttgaaaacaacaattatgctgtttcaaatgttatatatataaaaaaaaaaaaaattatgaattctgaaactacctcagagatagtatcatccatcccagcatcagaatgtaacggagatggagctatatatgcagttcccttgagaatgttcttctccctctccctgtttgcctccatcaacgcttgttctagaagtaattttgcctctggatttagctcactgatgaacttcaaaggtgagggccagacaataggctctgccgatgaaggattcaacaaagctgcacatgctccctgtttgtgtttcaaagcaaccatgtatgggattctcctgcgtatatataagatcacaagacaaaatatcaagaagcttcgaaaaactaatatattactcaatataaatactagtagatacatgtagactaataaaaacatattcattgagaaaaagtaagaagatgcaaaagaaaaaaaaaaaaaaacccatgcaaacagcactaaactctatatgacgtttttttgttatttaaaggggttcccaagcttagaaggaatttgggtgatagaattatacccagatgaatctctatgataacgatcagccccccaagccaacaactcccggatgcaatccagagatccccctctagctgccagatgaagaggagtgctaccagggcagctgtaatgaaagaaaaaatctttagtatataatgaaaaaaatcatcttttagaaaaaaagaagaaaacatgtcgaatcattacccatatccaccggttgaagcacaaacaagagctccattaactaacaatatatgtacacattcagggcgtctttgacgcgctgccaaatgtaacggtgttgctcctctaccatctctaacattcacaaatcgagcaaaacccctagaatgaaaatcaattatatgatgttaatcacattcagacactaaaatgctcggtcagagaagaagaaagggaaaaaaaggagaccaaccaagaaactgcgacagggctggaatgagcagaagaaataagggcttggaggcaatctgaatggccataatatgcagcataatgcaaacaggttcttccgttgagagaatcaaacatcaaaagctgataaagcattcacaatattaatcgtatagttttgagaataactcaatagagaagaggagaagaagatgaagaagtatacatacgtttgctccaacttcaaggagtttttgcacacaagagatcttgccatgcattgcagccagcataagtggactctgaaccattcacaatcacaaaccataaaccaattagaaatttcgaacgaataccaaaaaaaaaaaaaggaagaaacatttccagttagaagagaatttggtacttcaaaaagagaaaaaaaaaattacctgcttatgacggtttaacacgtctggatttacagatcgttccaaaagcttagatagaatctgtaaaatccaaccagaaaaaggaaaaacacaaaagtcgacttagtcaaaccatgacgattcaaccaaaaacgttgatttcccaggaaacaaacaaaaacccgatttccataattaaaaaaagaaagacaagcagagaaagatgaaattcggcaaaagaagcaatacaatagagcgaacctcgatctggccattggcagcggcaatatgaagaacagaatggcgatcgtagacggtggtctggttcaaaagagttgggtctctctctaaaataagctcaactgcgtccaagtccccaaactgtacggcggtaaagaggccatgctcatgactcggcctgcaactcagtccctgtcccatcgttctcttcttcttctactcggtcactgcaccaccgttctccggcgaggccctcaaccctcaatcgtgcgccaccttttcctccgttggaggtggtggcctcggtcgctctctcgtaaaaagagaggctcacatttatgtagcgtttcactaggccctctagatatagagaaagagagagaaagagatgagtattcgagtttggaacagctgcccggaggagagagaatgagagagaagctgaccgtgtcagcgccagggcaactatcagatatttttcgggcagtttatagattccaattcccgtaaggtgtactacaattgggccaactacaagtataacagacgactcggtaacgagtcaacacagctgagtcttgcaactcgcccaccaagattttccaataatagatctcagtcgttaaatcttacgctcttcattatcgtaaccgttaaaaagtattagagaaaaatcagaagcaccattggtgcctacttttagcaatattcaaaactttaatatgggttaagaaattgattctgttacaacaatatagattaattaattaattaattattcggagtaaaagcataactaatattaattggaagagtctcagttgaaatattttacttattaattaaaaacaattgttttaccgcgcctttgttaggaattgaattgatttgacgtaattacccctgtactgtctgacatactgctgtgtctttcgcttattggtgtacatattcgactgaaaagatgactgcgctacccaacgttgtcatggaaacgaaactccgtcgtagttacttttcgattaaaatagggcattgatgaattttactacatcattttttgaaaatttaatactacacgtcttttgatacttcgttctaatacgttatgcaaaaaaaaaaaataaaaaaaaaatactccattctaatacaatttttatatttttcgtatttaagaaaaaaaaaattagaaggatcagataatcttacagtggtgcaagcgttacgtaatcactatgaattgcaattaataaagatgataattttattacaaaaagagaaaaaaaaattgtaattatttaacaataactcaatccttttagaatttttgacacctaaattcttttaattattatttcacttgcacttaatcattcttaaatctcatttaaatgcttatgtgtatatttttatacacgtagtatatttatattggtccacctaatataattattttaaaattagaaaaaaaaaagtgttataaactaaaacaactaaaaatttactgagtcatagattaatagaggagtattaacgtcaagctcttattacaatctcttaatcaacctccacacttgaaaacaaatgctaaaatattttgttttttaatcttttttcatggtggtgttagttattctcacaacatcattcttgtaatttttttgaaaaattttgaatagtttaaagtgtcaaaaatacgtttgaagttttttgaacatgcgtgataaactggaatatcaggaactct

SEQ ID NO: 36569 - DNA, 4209 bp, Cannabis sativa
  modified_base (3899)..(3899): a, c, t, g, unknown or other
attttaggggtttttgtaaaagtatcctatttttaaaattaccctaattattggtttccctaactaattatttcttaaaaaatacatagaaattcaaatttcccaattcaaaacatgacctcccatgtaaattgaaagcattaaccagttgttttatttaactattttatatatatatatatatatatgaaagtaacaattgtatattaatatattttcaaatctcagggtgggctttagccctccctcaacacccctaagtctgcctatttgaacgaaactttccccaccttaaaataaggatatacagacaacaaagtcggacaatgatcaaattccccctcagccataaaaacaatctcagaagaataaatgcttatatttattatattactatgtaagatttgatattaaattagaccattaatagtacacgatataatattcttaagtagtgacctttaataattctcttgataaataagagaaacaaatattttattaataaagaaaaaccattaattataaaatacaaccaataacaatttattacttttaaaatggaaatattgggaaacaagacatacatgcacatgtataatacaagtgcaacctcttcccccattccttattacttgaaattattcattatctttaaatagaaatactataaggaacacccattccagtcacaccaggctcagaagatggcttcaaaagctcataaggagcaatcccagctccatttctattcctcaattcttgattaccattcctttcatcaataatcccttcaatctccttcaatctcccactaaattgttcaaaagtggcctttatgtaagtatcatcaccccaggaaggctccaaagcctccccaagatactcttcttcgggcgaatgagtagacaacacattcaaaaccgccattactttagccgcttgaagcttagaaggtaagcattgcaagagagtcccttcaggtttgtcaataaagtatttccactcttcatctgtgggatcttctgttgggacattggttctagctattgttgctcggttagggaaatatcctgcatacgtgtattgaccaaagtttacagctgcatggtgaccggatgtcacccaaactatagttgttagaatttgaataaggtcttctggtgtctcaagagtaggccaccatggctcatctttcttatcttcatgcccaactgttcgaatttctgtccaccaagattgcaactcctcatctaactcaacttggcttgaatctgagtagtagtggttcacataactagtaacccattgtttaagggcatcccagatgaggaggccatcgttggcaaaagggtaatcttcgatgtttaatttcaggccatgtggagagtcagggtcctctgttgctattcctctgcttataagatctgctggcaaggcctcatgatcgaatcgccatagtttgtcataagcagcagaacttatctccattgagaatttactaggtgagaatgtgctttctattattccatttgaatttattagtagttgacgagctaaggcattgatttccattgtgtatctaaaatgagggtgcaacaatctaaatatagggtgcattgcactcagttgcctttttgttgctattatgtatggttctgtcacacaatgtgtccttaacctaaaacaaaaacacaaaattaatattaataatgtgattcttaaatgtaatttagcactgttaattaaaaaattgaatttatttcacgttagtgtgtataatattttggccaattagaatttttccttttaaattttgacatgtagtaaattttgcctcctcaacttttcaagcctttaaaaattctcttgaactagtgagattgttgaatttaaggatttttatccaattctattcaattttactaatgtggggattgcccatgtgccaaattgtgcctcagaactaattgatatgtaataaattgtatcccttaaactttcatccatgttaagcctccattagtaaaattggataataaaacttgaatccaacaatctcaatagtttaggtgacattttttacagtctacaaaatggggggggggggggggttgaaatttggtacatgtaccgaagttcagagaacaaaatttttaactaattacctaatattttagtataatttatgagagcatatgtatcatataatactgaccagtgactaacgagttggtgaacaccagaatcatgagcaagaacatgagctttcgcgagcctccatagccaatcaccagttgcattccaagtaggtgtaaagacttgcttccattgtggcttatcatccatttgtggtctagtgagctcaatagccaaaggccttaatgtgccttcttcagttaggaaaaacaatgctcttgatccatacaatgttgttccttcaagttctcttactttttccacaaatggtaataacaaatccatgtagtctaacataaacaacttcttttgttctattgcctgcattataaattgttatatttttatttatttattatgaattacaaaatattacatgtacaaatacatatagtaattaattaattagtgtacctcttcaacagtcatgaaacctttgatctctttatcaataatttctttggtgattgctgattctgctgagccatacacatttggatcaagtttactttttagtggccattcctgcacataaatatatatcgtttatatataagtataattaattacagtattaaaatatatcactacaaaaaatttacattgtaactaaaagtaaaataattgtgattaattaatataaattatcattcctatgttgtgattaaaaggtctgtgactaaatgtattaatcacaaaaattataatttgttgtgattaaaaataaaatagtaacaaattgtatttaaacactatgctttagtcaagtaattttttattgtaactaaaagtcacaattaatcacaaaaaaattatgttataattaaaaaattgtcactaaaaataattattttttttaattgcacattgaacatttagaatagcaagaacattatttatttattattatgattattttatttttttaagaaaataacattattttctaattttagtaaatgaattatatatttaaaattaaatataattattaccgtaaccaattgaatgccatgtggattaagaccagctagagtctgccttccaaattcctcatcccttaaccaaaagaatttgtcccctaaaaataataataacaaattaaataaaaatattaccgtaatttatgtgtgcacgtatcattataaatatacttactgtccattggttcgggaggaacgaattgaagaacatcatcgacatcagaagcagccttgaccaaccttggtaaggcggatttgagaagagatttgttgtgatgatttggtgggattttgatgccttcatcaaagagtgtatcaatggctgtgaaatatgggaagccttctttatcaactaaaagtccttctagtgatggtaccaatgcatgcataactgagaatagtgtctttgctccaaatgtcatttgttttatttctgagaagttttcatctctaggtatgtagaaaagtacgtccgatgataatcttgattctgtctttggatctgtaattaattccattattaatttcgcaaaaagtaaaaaaaaataatgatgtggtgtcatttcgatagtggttaaggtggtgtgtttagttggaggtaataatagaatggaatggaaataaattagttttcatttcattcttttatttgattgtatattaaagtattgaaacgttattccaatagaatggtctttctaccattttggtggaatnactattctattttgaaatggaaagaaagatcattctaatgcatgataaaaaaaatttaataattttttatacactttaaattttattctattttatttctattcctatatgtttttattcttcccaaccaaacgtcactgaaggtctcatttaatatgtttggtgtaatgtagattgaataaattataaaatatttttaaataagtttataatttttttagaaatcaaaaatactattttagattaaataatatgtaataaaaataagaatatattttttaaaaaaattaagtaaataaaaaatatttga

SEQ ID NO: 36570 - DNA, 2942 bp, Cannabis sativa
aaataaattttaataataatctaactaaaaaatgttatgatcagattgattacttttttttacatctatttgtgttagaaattagcgaaaattgaacttaagtatactatttgaaaaatacaagattaaatttgttatttaataaaataaatagtttaattggtaatttttgtaaaatacaaaatctaaaatagtatttactcatttttatccttacactctcgaactttggcatgtatcaaatcatgctctttaaatttttaagatcggtaaaaatccatcatgaactattgaaattgttgaatttaaggacttttgtctaatttagtacataaacaataattgaattagtaaaattgaatgaaattggacaaaagtttctaaattcaacaatatcaatagtttaggggaatataaagccgttcagggaacatgattaagtacatgtcaaaatttagaagacaaaaatcctaattaacctacataatttattattgtttatttttgaaaaaaatacttatagtagttagctttttttatattaactattaaaattatgtatgtagtagttttgaattgaaaagagagaaagagagtgatatgattataccagctttccttgcagccctaaacaagacctcttgaatcaaatgttgagcaggatcaccatcaggaaatgaagcaatgaaaaattcaacttcagaaactgcttcttcattggtgaaatattggtataatccatcagaagacagtatcaaaaatctgtctcttgagctcaatctgtggtgataaactgatggtaaacatgttatgtatggacaacttccaacatagttaattctgaacatctcaagcaatgcatcattccactttggctacacaaacaacaaaaacaaacattaattttaatacacaaaatcattaacaacattagggtaagtagcccttttatttgtttcggtgttctgtttttggttcattttattgtgtacgttgtagttaattgaaatacttaaaataagatttaagtaactgttcaaattttattttcgacactataaattattaaatttttttaaaaatttataagtaatcatgaataactataatgtctattttcatgaaaaaaaaaagaaaaaaatgaactaagacactttcctaaatatcaaaacagataacaaaaagataaaaacaagattgggtttattttatagtacaccattttatctgttttgatgtcaaaaagagttttttattcaatttttttttttatattcatgtacgttttagttatttagcattaacaccttttgcaattataatatcaaaattaaagttcaaatatttatttattgcacacgtagctatcgtaataattaaatatttaaattttattttcaacactataaactattcaatttttaaaaaaatttaaaaaaaaaagctaaaatattttcttaaataccgaaacaaatagcgaatataccgaaataatactaatatttttttacctgtttaagaaagcctgcaccaaaagctctagtaacttttaaataccctttaactctctcattcatcacagcacaaacatcatcaggatgttctttcttaattctctctacttcctgaaaaaaacaacaataactcatgtcaaaatcaaaaaaaatgcccataaaattataccacaacaaattattaatcaaatcactaattacctctttaacataagtgctatgatccattgttaactgtaaagaagttaaattagaaaactcatattcattgatatgattatgattattattatgatccatgattttctgagctaaaacagctctactatcaccaacattcatcaaataaacatcttcacctttcatcaacataaccaaaacacaagaacccattaaagccaattcaggattctccataaccattttatcagctatatccaaataagaatcttctgtcttttttaaagcctctgaaagtgctttcaatacatttttttctccaccattgaaattctctttcattttcttatcaacttctaatctttctctgttccattctcctttccatctcttcccctgttttttcatgtccaattccgaattattcgaattcgataaagattgaaacttttcttcattccataacaaccctttaagttctttatgaacattagggtagagattagtgagtaaataatcaggagcatctggaccgttgaaaccatcatagattcccacaaaaacccaaccgtgttcttcggatattactatatgaactcgatcttcacctgcttttccttgtgcccattgaagatcattctcaataattctcaccttatcatcctcatcatcatcatcaacaacaacaacaaccttattcgaactcgaattagtactaatcgaacctacattattctcctcttcaacaacaacaatcttcttcttctcatcagaatcaactcctcctttaatcggagcaacaatggatttgttgttcttcccacgactacgagctaagccaccggaaatggctctcttaagaatcttgataaagctctgcttttcgggtttttccgaaaccttaaatttcataactttattatcatcttcttcttctttaatttgttcttcatcgatcgggcccgaagtgaacccacgttcgatcgggcccgacatgaaaccgcgctcgatcgggcccgaacaacccggtgcaccgccttggaatgaaaggcggggcaccggttgtaaagggatcgaagcgaaaagagttgagctttcgaagttactacctgaaatgtctgtgtaggtatcaatgagagatgttgagagaggtgtgaaggtgttggcgctgacgtaagcgccggagattgatcgaaacgttgtcgttttggggctgttgttgttgttttcgttttgggggtttgaggg

SEQ ID NO: 36571 - DNA, 4040 bp, Cannabis sativa
cccaaccactatgtccggatcttgctattgaagattatataattggcatgcaatgagcttgcattatcaaatagtgagtaattaatattatttgcaatgcacgagtgcattgaacacaacctttttaagaaagaagcaattggcattctattcggatcagcatagctccgaatgagacaagagatgctcataatagagctggttgtgttttcaaatactttgaaattggtgataaagtttgttgaggattccgttggtctcctctcaacaagacagcagtgtaagcatgtgaatgttaagtttaatatggcttttattattttcccgagacaattacgatctttacagacgtgccattgtagtttaatacacatttagtctcatttatttagttttgttttgaaaattttatacacgcatgtatatacctttcagttgggacaagccttatcttaccatatatatgtaggaatggcgtcgacaccagctcattgcacacaaggaagaggcagtgaccaacctatccggatctacatagctccacgagagacaagagatatttggtatgtaaacgcaagcgtatgtgctgcattgcaagtatagctatatgttgaatagcaattattgcatatatcccatgtgacatcaaaaaagctgcttgaattaagttgatgaataagcatttctctcttgtttttggtttaactgagtatttttttctttacggtagtcacagtagaatactaatttcactcaaggaaacagaaaatgagacatagaaagtatcaaatagacaaaatgagtcttttaaatatactgtgaatatacatgtacatactacaatttacaagtgtatgtggacacttctcatctaggctatcaaaatttttggatgcgcatggtggacaatatatatgtaaatatattatatgtgatcttctaagcttagttgttgaggaaattgagaagggaaactctggttttgattaaatgcctgaacaaggattctagaatttgttcaaagtcttgaacgcacatctctagatttttcagctctggtcagctttgtttgtctcgtgacgcaaaaggacagcgtccaccttcgcgaattcatttacaacgtcttcatcacaaccgactcttttgctttgcatgatcttggaaactagagaccagccaccaagcttagactgtgtctttggtccagaaataaatgacaacaatgactcaaatgatgcaagagtgacagcttccacctctctcaaaacaattaccaaagctgtgatttcatcatctttggtggaaggagaagctgagctttttgattcagcaccttttaaacttttcaaggccttttggattgcctttttcactactttccttgaggcagagtattttttaatctcactctcaagattaacttttctacgcatggttgattgaatatctcgtgcgcattcctttgtgtgcaaaacagcatccttggctgcactgcatatgtccaagagcctaagagatccatccactaattcatcaacccatttctcttggcggctttgggagaaggcttgttgagtgaggggtagctggagcaatttctcaacacaaatgtgcaagtcttcaagaccattgagttgatgggcaatggaagatgaagatgaagttgcataagaagcccgtaatctgtgcaaatggtcattgcattcttcaataacagggtgtgatttggatggtaagctgttcgagcgaatatgtaagtttgattttaaggcagccattttgttattttcttccttaggaaagattttggcctaaaagttttgaatgagataagctttctgccatctactccatatgtgtatttatataaaaatcattaggtggtgaagacgtgaagcatcttcttatatggaatgcatagtaaacaacacatatattcagatactgatggacatagagtagcgatgtctatgccatgctccctgcccacccatttctctaactcatttcttaattatatattagaaaatctgttttcaggattacttatttgatacttaatttattacttgcaaaacatacgagtgagtttgatacatttttcaatagtttcgtatgtgccatttacactaaaaaaaagtatgtgccatttatatttttatcatattatatgctccattcattgtatgattatattttgaaaattttaattaaaccctgctcatgcacacgtttatatagagaacctattatatattgatgaggcactagtaaaatgagataagtggaagatcattaatatctttaggccattatctgaaatggatactttttgttccttcctgtttaaagcgtgtgtgatctcagcttctatatgaccaactggctttgttatgtgacagtttctgtactaactcataattaggtccaacttgagggtaaagaacaccacttattggaaaggggaaatggtacagggcattagaaaaatggcaatgtaaatcacacagaatttttccattaagaaaaaaaggtaactacatatgtatattgcgtacatgtttgtgacaatgtcaacatagaaacaagttttgttgttactacctacgataacataagcaagactagatcagataaatctactcatattgacgcttaagatgttgctccttgttagaactgttaacagtagttagttgtttttgttatgggttggtcaataaggcttcttagattcgttatgacagcagtgtcataactaatttctattgtaaaggctttcttcctctcttgtataaaatccttgtggtaccattcaatcaatgtgatcttttcctttctttgcagacttctttctctctctgtttcatttggtcgaagtggccaaaagagaactcagcactggaagtgtgggagtggactaaattttgggtagcaccttggatttgtaagtcaaaatatttttgaagacttttcatttttaaatttatgcagggcttgggcaaatatagtgtatagttagattaaccctatgggggagttggttcagctctaatagttataatttgagtggagtcagtctatgaaaagtggcctctaaattacgtcgaaatggccagacactcctagtgataattatctcgagattgaagttgctgaaataacaaagatgtataatgtttgatgtttttggttgttagttataatgaggtttcatcttaaatttgatattaagtaacgaatattcttataaatgaattgaatattctcacattattcatatgggacattatactctaaaattagtgaacttggttgagacatctattgttgtaaatccaagaaggattgtgcttgttgttaattcttgctcctggatctctgacgaaacacactttatatttccgaaaaagtattgataattgagttattcatacgagaaaaaaaatcaagctcctacgtataattatttagccaactactttttcattaaaaaaccttgaaatgaaactaagatcattctgcttttttatctttttcatattctaatcatgtgcaaattgaatttaaagcgagataacgcctacttgtgataataaggcaattctgagatgaattgtacagtaagttgagaagaaagatgattgaagaatatatacgaacgagtatttgattttgtatgttaaaactgatatgtgcaagtgtatatgaaagctggttcccagacttttcgattgctatttgaattttcgtaggcctaagtttctacataagtaagtactattgtctttatactgctagctagttgttgagaatgtttagcagagaaactctagttttgatcaaacgtctgtaaagtctctcaactccttgttcaagatcttggatacaagactccactgattgaagctcattttgtacattgatctcttcaactttgttatcggttttcttaatcttattgctgatgaggctggccaaggcaccatctgcactagcgaattcgttacattcgatgactccctcgcaagctactcttc

SEQ ID NO: 36572 - DNA, 1827 bp, Cannabis sativa
  modified_base (106)..(123): a, c, t, g, unknown or other
ctttctagcactaaagcaagtgtcaaaatttgatgtggtgtagtttaagagttttaaacacactcttatcgactaacatattgttcctcttcttaatcttaagatnnnnnnnnnnnnnnnnnnatgttcctttcctggattaatctactatactacaaatatattatatatcttcggttttcatatagaaaaaaaataaaaaccgaagatagatattgatacaatcatttttcatcaattttcggttcccatcaactaaaatttaactttatcttcagttttttcaaaaaagcaaagataaaatggaggatggcgtaacgcgaaaataattgaagacttatgtcttcggttataagggaataaccgaaattaaaggtattacttaatatatatatgctgaaactgacccttttgtcttcctagctcaaaccctcgtattaagaaaccaccgttcctcaacagccccaaagcccaaacaccgccattcctctctcgtactcaaggaccatctccttctctccactgtcctattcttcttgcaacaaccactgacagaccattggaccctgcaatctccggcgttccatagggtcctaagaacccagtcccaaccccgtgtagcttcggtcttcctttgctctaatccttctagctcctgccgcatgatttcaaaaatgtaagatattattattgttattattattattattattatcatcagttccctttcgttttctctctcatccctgtgtggaaacccccatcagcatcacccaaaccctgaaacccccatcgcccaactcctaaaccaccctattgctctctctcaagagggaagttgtaataattatttgcataagtagagactaatgataaataattaaatcttaacatattttcagagactaaaggtaagtccacagtcaaatcaactattgcaaggtgttcaactctaatgaagcccacagcaagccatttagcgaaacaacgccagcttgtacattccattccatcaatgaggttgtttatttattttaattagtaacaactcttttagggctggtttttactaaagcctaatcaataaaatgggtttttttaacagtaccttattacatgctatgaatgtaagcatttaatgtttgctattatttttttctctggtgtaaatttcgtaagaatttggaactaagattgttaaaattattagttatgtgtctaactctgtttttatttaatatcactaataaacctttaggcttcaaacaaaattaggcattattgatgatgaaagttcacataactccttagttgcagaggagaaagctactgaaagacgaaaattggaaggtggtttcttaagtaaggtacattgaaagtggacattgtagtcactttaagcatgtcattaggtatttatctattatgatccctgtcttatgcttcaagagaatttgaatgcaaatttttaataggaaattacaatcaatgttttattagatgcgatattttgtcatacattaatagggaatggagactgaagatttgaaaccatatgtataatgtacacatttgaaaaacttgatttattacaatagtttgaacttgacaatacaggttgcccaactaaagcataaagctcttttgttacacaaagaagccaaaaatgtaagacaaaactcacattttgattttatttattttttgtgtttttactgagaattattactgtgaatacttcaaaactaaattatgtggtacaatttaagtttgaatttatatatcatatcccagtcctcacaacacgatgataggcttgctagctca

SEQ ID NO: 36573 - DNA, 2859 bp, Cannabis sativa
tgataatttttctaaagtaaaattgcttaaagttctaagatatatattgtagtatatataggatagtttgagtgtgatatattatagtaagaaagttaaaagagtttttttttgaaagaaaatgaaaagttttgtgataataaaaaatctcatgaatatacaaaagaataataagagctatacaaagaaagaatacaactcatttttaattaattgaagaatacaaaaagtttcactattaataaaataaaaatatgtaaaaaaaaaaaacaattcttcaccaaccataagaaagctcataaaattaaaaaaatagaaagaaaaaattataagataacacctcaaattttgtgtatttttttttatttatatatattgatattgatgatttgtgttctattcgttttttaaaatttttaaataatttatgatgttaaaataaaattcaaaaattcagttgtatttatacaaaagcaattaaaagaggatgatgttgacttaattgactgcataatcgagtaaccaaattaattgttggcgggtatcattgtttttctctgatgatgatgcttcctttcgatcaaaaaatgatgatgacccatttgttgagtttgtctatttataagtgtacctaataaacaaacataattttgaagataatagtatagaaatagtgattaaaactgtaacttaagttgtaaaagagcaaatagtgaccattacagtcgaattccatatctatcaacattttacttattggtaaagcaattccttcatcaaatttgcttacatttcaatggctagtagctttcgacactgtgccactatcttaatccaataatcctaattctctttcttcttcttcttctattgaaatcaactagttaaaaaaaaaagactagaaatgaaaatgaatatactcagaaattgttgaaattttgggaccaagaatcctcctgaggctgaacctgaatatacagaggagtctcctgataatgcttttcgtagcaatgaataggttgaccatagcttcctccaccgtcccttttctccacgtacggatccgaacccccaaatagataatctgcagccccattccactggttcccactcccacagctgctgattccctcgtaaaaaccatactcatcatgacaaccaccgccattattattcattgctgatctctttgcgtaacgtgataaacatggccagtaaccgaacaagctttcgcaaagatccatggcttccaagccatacccacttggaatcagactactactactactaccactcacctgtttttcgtattgaaaatcattcccaaccccaacattatgagtcccatgatctccatgcccactttcatggcttggctttttctcttcttccttcttatgtgcctccatcggctttaacccattttggggctcgctcttctctttctccttagcctctgcgttggaaggtgggggcttttccctttccccagttgtagagtctgagtgaggataacaaatttcaggcgagggttgaagtggctttccataagcttgaattatatcaaagccaccatcataaggggttggatcatagtcgtcgaattcaggtatagcaaactccggagagaccgagttgtaagatattacgaactgggtactcttaggttgatgatcataataactgatcttgtaatgggagacagaatcatgatactgaaccgacagtggttcactcgaagtaaaaacagagtatgcagttctagtagtagcaatatgattaaaattagaatggttgttgtaattagcaccatagttataaggagttggaatattatagtcaaagagattatagatacttggctctttgtacgaagagtaagctactgagccaccctgatcagttataaaatgattagaattataagcataaggggtttgatgatactcacctagatcagaagaattctggtaatatccagagttgtagaaggccattgaggactaaaccacgagttaaataatttgtgttatcttgagattgagactcctctttagaattggagctgctgttgtagtaaaggctagaaaataatttggtgttttgaggtatcaaattctattatattggtccttatagttactgtattttctatccacacaacccttatctctgtgatctgtacgatgcaagagaaattttggaagaagcttacctaaattgtgggtgcacatggctacgaacactgaagacgtaggaattactactgagacagtaccgtttttaccaaagtggcccccttccttccatctttagtataataaataagacaaatatttcaaagccttgtatgattaaaagacatttaaccttttaaagggcactagatagtaatgcaaagtggattaagatgtgatagaaatggaatctttgatgacctcaaattactatgagttaaatatttgctcattcatatagtccaagaggatgaatagagagaaccaagagggatccgttaagacacactctttgtctgcttgtgaattacatggtcccaccaaaattatgaatccatttcgtctgggcctcacttgggtgtaatccaatatagatcttctaccttcaatctgcgcagtgttgacagttttaacaatttgggaaaattcctatatagcatttcgaacatgttttatagatgctctttcaagtctaaatgtagtttatttgctgcatatcatatggcacaaattacacaaattacatgagtaaccatatcatatgccaagagattattttattttggggtaagttgaaaaataccccttttattaatcaattaattaaatttgcctctaattt

SEQ ID NO: 36574 - DNA, 5378 bp, Cannabis sativa
caataaataacagtataataaattatttaaatagctatatataatttcataattaatcataattaactgttaatttccaaattaaactaagcggtctttacactgccacccaagaatcctcaaataagtagagagtgctcacacgtataacaccactcaagggtcattatcaagaaggcccaaggggatttggtatggcaagtgatcaataaaggcacttctttgatcacttgggggaacataggttatgttatggtatacgagggccatatgttatacaagcattcaaaattcttttttgcacatctatgtaagtactctcatggtaaacataaatttaagatcagtgatattactactagtaatcgagtttcttaagacacggtgtactatgcaagtattaaacaataaagcggtaacggataaagtaaaataaaaaaagtattggaattaaagttttattaagtaggaaagaatttttaatttaagtaaaagaaattctaataaaattttattaaggcttatccacattgaaaggttgctcgggaacggccaactaacacactaaagctaaatgctgaaaataaaaaagaagaatagactcataggtcctagaagcctgtcatgtcaacaatatcttcctccctgccttcactctctccaggaggcgcatcagcaaaagaaggagggaagttaggatgcttagagttgtagccttcaaatcttgaaaattctccagcaactggatcaccaccattcatagtgaagtcaatttctttaatattttctacataaaaacgttgctaacaccgcctaatgaagtctagcacttctgtgtcagggaagcctttctagttgaatgacttgtctccaccattagtagcccaagccatatagatggcattaaagccaaagccattgtagaaagtaacaacaagaagggcttgatctttaagggaagttaccttcttcttcaaaacttttacttggtctcttagatcattagccacaacagtctgctcatccagggcatgatgagaagattctttaagatgagaaaccttctttcaaatagccaccaaactctgctttaatgtactttcctaagtcttggcaccattagccccttctcgaagcttggtcatctcactgtcaagagaaataaccttctccttcaaagtagtcacctggtcttcaacaacgacagcacagtcttttgcgaccccaagcttctcaacaagctccaccactttcttattttcattatccatggtgtaggcataaccaagaaaatattgaagacaagaaaacaatgttaggagatgataaaacaaaaaaaaaaagtaaagctagaaggagacaagacaaaacacttaccccgaagatgtcagtgaaacatctttatacaatcacattttgaggcttggtcctacccaaccgttgcaacaggatgttctcagccctagcaccaatcacaccctcactatttgcaaggatccatgagccttactcacacaattgttccatcaagtctgaacctaagtttaaagcaccatgttcaattacatctagaaaaaggtcaatcagagatctctcattggcaccagtagtgttagacctctcccttccaaaatcttgagcaggaggagcagcatcagtagttctacccctcttcatgaccttcttcttcgaagcagtagaggcagcaaaaatgccttgaaccacttcccttattagaggctcagtttcctttgacactagaatcctccttttcaagttcgaaaaagatgccataggagccaagaagctcatgctgtcttcaaagaataaagactagaggttagtacaatagaataaaaacaagacggtaagttgacagcatatcatggagcatcagccacctactgattccccatccttcttcggagcagtcctagcggaggtaacttctctatcatcttggtctaagaacacaaatattctccctagatattttgtgttagttcgaatagaagtcactgcttccatcatagtctgagacaaactaatagtagcaatttaagcatcctcaccactttgctcgagtggcatggtccaatattcgtcagggaagctagtattagcatacactctctagcatgacatgatcaaccccaccttctaaagattttcaatactaaagagagtttcctcatctctctctcatgcatcaatgtgaagtaaaatggcataagctctcctcttcatgtcaataagaggagcaggtcttttgaatggccaactttttggaaggtaatgtgtctcgatagaagaacaggagtgtagaagtactcctgatagtaaaggtcacatttactcttggatatgttttctatgaatgggccaaattgatgaaagtgttaaaagtcttgctctttgcgggttggacttcttttcaagttgcaaagaaattttatctcgtaaggagttggaataggccagttcctaaggcagtagaatataaagaaggtgtcaaggatcctatagccatttgaatttatgtagtaaaggtagacaccaaataaatcagctattgatatgaaccatggatgcaagggcatgtaagcacatgcattcatgtggaatttcaactaaacactacagtctgtattctaagagcccttgaaacaacaagtcgaggctttcgaataatacttttagggagacagtaatcatctcgaattatttgagcttgaagcttagtgagggtgctataacaagaggcctaagcttaaaggctcgatctctctaatcatcactctcaacggtagctttgacaagctcactttccatcaattttccatcacgcaccttgtctaagttcttcgacttaggtacaattagcttagcactattgacctgagccacacgggattaatactcatcaggtagtcttctgtttctcttcatcctagccctctcaagttcaacaattcaagtttcttacaactcaagaaaagtcaaaaattgggttgaaaaaagtcaaagtagcttagaggaattttttaaggcacaaggtgggtgctttggatttttggtgattgtagcaaaataattttaaggatttttgggagtttaagaatccttagagaaagaccaaaaaggaggagaagaagaaaaaagaaaaataaaaaatcagcatgaacttcaagaaaaaaaaaagaaagaaaatgtgttttttctatcttaaagtgaggaaggcttaaaggcttgatgatgatgaaatcccaaagcgctctttgaaaggctataagaatttgggagtgacaacagaagtgtgaaaaattgattctcaactcacttatttatagttgagttcaatttcctaatcccaaaggataatgggagtcttttaaagtttaggctttttaaggaagaggtaaatgataagtaaaagatataattatatcttttaccttctcctttttaagccaatttcaaaattcctatacaactaggaataggaatacaaatttaaaaggtaacaataactcctaattctattgggactaaggaaaaattatagaagttaaaggaaaaaaaaaatgataagcaaaaaaccaaaagttttttttcttcttcctttatctctctaatttcaaatgcatctccaactaggattaggattccaatccaattaatcctaatgccataacaaaaagtaagaaaaattcaaattttcaaagaaagagataaaagataagtaaaaaaaaatataagatttttactctttttatttgttaattaattttcaagattcccaaggactaatcaaaagttttcaaagtcctaattcaattagacatacttgaagaatagatacaagtgcctaacaatatccaaattgatgcccatctggtagtttcaagcgaaacaggctcggttcacatcatcaagtcaactcctcacttgtgtaagtttatttaggcacaaatgttaaccccaaaaaattccttggtgatgtggacatgaatatttgacacatggaatgaaggatgacatcacaaagttaagtagacctgagtcatagcagtcaacctgggaggggaccctagccttgcatccaagttgactttgggatcatcgggatggaagtttggactttaataacatgaataaaacccactatttttcattattctataccatgaagacatggagcaccctaatccatgcctcgggagttgaaattacacgaacttgtaccgtagaagccaacttcggcaccaagggtttcacctagtgcccaagttaacatcctgaactagggtttcaatttttaggactatcttaatgaaaaatggtcaaaaattttaatagtacatcaactagacataccatgaacatatttgaggcatcagaatcagaaattagagctagttgatttttaacacccgaggctgcgagcacccagcgcccaggttgacaatttgtcaatctaggcaccttctaagtgtctaatcagagatcctacttttgcgttttcttattcttcatcaaaaatgaggaattaggtttttctggaggaaaaacaacatatcttgggcacaaataacaggggtcagggcccacgttgatattttgtcaacctaggccatttaaaatggagtttatcaagaattcttttgagcctcttctttgttttcaagaaatattgagattcaactatttctaaggactaaatggaatttccaaaggggcaaaagcgggacccagcatctaggttgacacttggggctaggcctagcgcctaggttgacatattgtcaacataaactgtttcgatctagttaacaaaaagggttccgggaattttttccgtgatcagaaatattaaagattgaagcaaactcagggaggaaaccacaatcctgagtccatggaaacagggccaacgcctaggttgacctagggctgggcctagaacccatgttgtcaatcaatgtaatatctcgataagactaatggtaattaattagggcttatatttatattatgggttaattagataataagtgggattatgatcccacttatttatttcaacataaaatttaaattttgccataagtgagtaaataaacataatttgttatttatggagatttatatagcatgtgtgaatgtaatatgagttatttgtgaaataaaaatatttttaggttcgacgaccctagagatctgattggaggacaaaaatgttacaacagttttagttagaaatattgatgggactattgggatcagttattttagaaatactgaggtattttggggtatttagagctggccaaataccctaaaaatagagatttcttagtggctaaaaaataataaga

SEQ ID NO: 36575 - DNA, 4155 bp, Cannabis sativa
aatttaaaatagaaaaataccataatttatctaaaattaaaatttatccatatttatctaaacatttaataaaaatccatactacaggtaatttccacttgtgataaatatcaaccacaaaaggggttgagataactcgtaaagtctacactccctcgtgaagggctacaaaaaaaaattaattaagttgtaaagacgaagctcaccatacttagtctccaagaacccttaaaagaattcttataaactaggggcaagtattgagccccaaaaattacaaaaattgctaaatataattttagagatctctaaattaatgagaggaaaaatctcaaagtagactttcaaagtgtatgagcaagaaaataagagcccaactaccaaggcgagataccattcaagagggagagccaacatgaggagaggcccaggcaaaggtggacctcctcgcatgagaagctccccgctccccctctctccctactccctctctctccccgctctctctttcttcctgctatctctctctccacactcctatctctccccattcccaatttctctcccctcgctctctatctccttctcctcacttattcactcccctagtcaccacctaataccacttgctccatacaaaggagcaattgtacttcgagtatatatgttgcaatggagtgactgccaaaagagattaaggaggaagttcctactaagtctaaacaacaaaactcatctctcatggacccatcacttagttaaatttcctaagtgttacactcacatcataagcgtaaagagggagatgccaagggaatgtacgacaaaagatgaagtcattgaagcatgcacgcctctgatgtagtggttgtacgtccagtagtggagacataatttgtctcactcgaagtaccaactgacactcgataaccacatcttcattacccgtctgacatgctaatcttcatggtacaaaaataaatttatcccctatttgttgggaccacttgtattctggtgtcattagagctccctataaatacctctatctttcattgaagaagaggagggatcatttgtatgagtttagagattcaataaacaccaaatttctccatcaatgttctgagtttctcttaagcttttgatcttcacccatttatattttatattttcttttctaactaaaatataattgatgagtttttactataaaaaataatcgtaccaacataaaattatttaaaattaatacaaaattaaataaataaaataacaacatttaagagtgaggactttatgtatctaagaaataaaaatttgagaacaaatttactaaaaataaaatttaaggactagcttaccaaaatatataatttagggattaatttgtaaaaaataaaatttagagactaacttaccaaaacttgtatagtttaaaaagctccatacaaataaataaaaaaaaaaatgtaataaaattaaaaaattaatgaacaaaatgaaaataatcattgttcaaaaaaaaaatgaaaataatcacaatccttccaccttggcgtttgcaattgcattatgggttgggtgggtgacgctcctcccgtgaggtaccacatattttggccatacactctacgatgaagacacgtgtcactttacacgtcatcatcagttatcactaaccagtaacccccagctcacatatttatatataataatatatattacatatatgctttctaaacggtaactattaaaaggagaggatgacccaccgacaattttagcagtataaattatttcgtgttacgtactctattgtcgtgacacgtgcacctcattcattgtcgttcacatctcctctaattatgttgaaactttctccttatatttcgtgttactcaactaactcccctccttagtttccagcgtgaggaaagaaaaaaaggaacaaactccttggaaacaattttaaattgttgttaaaaaaaaattaattgaattaaaaaaatgctcatgattattacgagatccctgattaatcaatttttgcaaataattgtacaacgagcctccaaactttatcaaatttgacaaaaagaaccttctaacgaaaatatcaaaataacaaaaattgtcaattctagtcgaccgaaaattgcatacatttttttgcaacactgaaaaagtcagctaacaaaagaaccgttaactttatgcagaagcttactcactttcacaaggtaaatactaaaccgtatgcatttatatttattttggtacattcactaataaatgtattgatttccacataaaatagagatgcatttcctaaaacataaaggagtaatatagtttgataatatttatatgcatttcacaagttaaatactaaatggtatttatttatatcaattttagtatattcactaatatatcaatttatttatactaaatgtattcatttcctataaaacattaaatagtaatatagattgattatagtatgaagcaatcttaattcttccagctatctctaaatatacaaataaaaatttttattcttccgactgggagacaaaaatattagaatttagaacaataaattctatttaaaaagaaagaaaataagtgttgaatagagtaacttgtaagcagctaagatcagtaccacggaaattccgtgcaccctgtggtactctattaagaacctgataccatcatcgccaggctggcatagtaaaagggaaagcccgatgttcgaggtgcattaacggatccatccagctgttatgcattaaagctgcgcaatttagcaccatcggggcaacttgacgactttccccgaggctcagtctacagcgtacggtatttgcagaaaaacaatataaaatcatccccaagctagctgtatattatttcagaaaaataaaacaaattcaatgtacacgtgtgcgaaaagaataggaagagagtcgaggttgtgcacgtgcgaattccaacgcgtggaggcgtacgtgctaactggtcgttgggggtgggggaggaggaagaaaggggcggaacggaagactagaatagatgaaacggagagagagagaattgaacaaggtaaaaaatgcagcttaaaaatcggcgaattttcggtgggagcgagatttcggggcgagtttttgaatctcctgcaagtttctgaggcttcgaatcgccagaatatcgcccttgttaacctccgtaaattggtcgaattcctctactgagttttctgcagagtctgccgtcatgaaataaataagaaaatagattaaaaaatacgataatatacctatttaaataaaaaaaaaatacaaatgtgaaaacgaatggggaaaatgggcattgttttagtacctagatgcttcgcaggccatttaaatcctttaaatggagccatatctgaaacaaaaaagacgaaaaagaaaaggtaaaaatcaacggtgtggagagtgaggataggacatgatctaacggtgaccgtggattaagaaaactcaccggattgggtgggactgtgggagcagaggtatagaactatgaagcaaaggagcgttaggagaggaatgaagtggatgaacttatgtggcttgatcggaggaggagaggacaagcggtgaggcttggtggctttgtggttgtcttcatcgtagtccacggcggaagaagaagaagaagaggatgaggcgaagagatccttgcgcttaacgtcgccgtcctccactatgagagagtcctccttcgggccgccatggctgtggagcttcgacaccggcgagcctagagattgtctttgcattgtgttgattgagagagagagagagagagggtggggggcagcgtgagggagtgagtgattagtgtattgagcagttatgagaggggaagatttttcttttactttccttatatattaggaaagcgtatggtagtgctactttttttattatttatttatatatgaattgtttgttaatattttattttaatcacaaaaatataaatgaaattttgtttttaaaattttatttttggaaagtaaaaatatgttttataattattttgtatttttattttaaaaataaaattaaaaagaaattattacataaaaaaatataaatt

SEQ ID NO: 36576 - DNA, 3472 bp, Cannabis sativa
agtattgaaattaacataagataatgtgaggaaaaaaatttaaaaaaatattaagagtaatttttaaaaatgatttaagtttatatttttttttaataatgtgttgtatttataactttatgtagtgcaaataaaacttcaaaaaaaaaaaaatactatgaaaaattaatttaaaaataatatattataacttaaactatattaaatataacttttgagtcacaatttaatttttttttaactaaaggtgacatttattatgaaacaataaatccaaatttttaataataattattgaaatgtaatataagatataaaatataaaatttatattaactacttataaaaataagtttaaaattaattataaagacatatttttttgaacaaaattataaatacatcttaaaataaataaataaaagacaaaataatacaaatatattataaactataaacgtgaatacaaaattttatatatttaattaaacatttcatacaaactcaactttttatggcttaaaccttattatattttatattccaagttgatgatcatttaaccaaataaagaaagtaccaattgggttgtgaaagttgaaatgtattatgacaaatttttcactatactaagccatacagaatattgaaaaagagatgagctataaatggcaaaaaggacaaatccaaaaattcttattaaatcccataaccttttaatatatggcaggctgcgataagtgatgatctaaattaattaattttttattatatatattttgtgataagattttcattatattatttattcagagttacatattggcattaatcatgtacctgcaacaccactgtatctggtgactataaatctctataattctaacttcttaaatatatccaaattcttcctaagtttgttccttaaaaaaaaaattgttcctaagtttcttgtttaagtctaattaatcctaattatttattaaataaaggacatgttctactaattttttatactgacagtaaatattgatatttaagtttttcttttttattctttgactaaactcagagaaagaatgctcatacatgattagacaaagcccggacaatatatttttataatatatatttatatccgaaaagttataaccaaaggacaattattgttttttttttacatggtaaaataataaaatttatattttctttctatatataaggaccaataattcgtacgagaccattcagtgactaaaaaaaagccccatggagtccattaatccctctcacacagccaccaacgacatcgaagaagtaaacgacgactacactcctttgcagagccataccggcgccgggaacggcgacactccgcccaatcacgggagatctataaaggggttcgccgtgataattgggtcaatcgtttttttcgtgtcgttggtggcattaattaacattgataaccaaacaggaacgttacagcaagaatccagctcagctacaacaagaacaacagtggaagaggccgaaaacgacaagtcgtttaataggagccgtgagattgagatgtcgttttggatgcctcgaggtgtggcagaaggtgtttcagctaaatcaaatccgaacccttctctttccgacttggaattatcttacaactggacaaacgctatgttttcttggcagagaacggccttccattttcaaccggagaagaattggatgaatggtaagtagtaagtacaaccatgtccagcctttaatttcattaattattaattaattcattgttgactttactagatttcttcaccactctaaatcaatgtttaaaattatttataatcttcacttcttattagttttatttttcccttaatatttgttacgttttgcctttcttttaattaattagttttaaggtaaatataatattgtactcatcattggcttatgtttttgttttgttggttatggcaaattattacaatgatcatctggctggctttgcttcatcatcagatcccaatggtaagtatattcttaatttcttacaagaaaacgacttccttttgtttaggctaattattatttatagcgcttaattactgtttcctttttcttataagcaagtcataaataaaagtatatatatatcccaattaatgaaacaatttacgataagttattaatgttaacatattggtaagtataaaagagagaaatcttcggcctgttctttattataaaataccttttgaaatatgatattggttggcacgttttataaattcgttctgcgttgtatgccatacatttacaaatatttggaattatatattattgttgattagcctaatgcatagacataatttattgtgttttggtttattttactaaagaaaagaaaaaatgtacgtataagttgtcgctttatgagttgtggaccaatcaatagagttctctagcatgaaaattggataatcatagagcccaatcatggttttattttcctggaagctaatgtgttttggtcttatggctgtggacccacactctgacgatgaattataatgcatgtggctctcctaaattgtaatatccagaaactgctcatttttagtctaaactgtcacgtgatacccgttaccatatcccacgtgacatatcattttttttttttctaacctttctcaacttccacctacccaaaattttggtggttaggttggataatgaggatttatgtgctctttaatttgtttcacgtgatttgttttaattagtgaacaaactctaatctttctaatttgactagtaaatgtgatgttacatacttttgggtgacatgtaattaaatagaaatagctgtatttgtataaatctgaaaatgtctcattcggaggacgaatattcaattattattatttttagtcgagagaaacgtgattaataatttaattaattattagtaataataattgtgtgtgtacaggtccactgtattacaaagggtggtatcacctgttctaccaatacaacccagaatcggcagtgtgggggaacataacatggggacacgcagtatcgagggacctaattcactggctctaccttccttttgctatggtcccggaccactggtacgacgtcaatggagtctggaccggttcagccacttttcttcccgacggtcagatcgttatgctctacactggatccaccaacgaatccgtgcaggtacagaatctcgcctaccccgccgacctatctgatcctctcctcctcaaatgggtcaaatccgacaaaaacccagtattggtacccccacccggaatcggaatcaaagattttcgtgacccgaccaccgcgtggatcggacccgatgggaaatggaggttcacaatgggttcaaaagtcaacaccactgggatttctcttatgtacacgacgactgattttataa

SEQ ID NO: 36577 - DNA, 2540 bp, Cannabis sativa
  modified_base (2374)..(2379): a, c, t, g, unknown or other
  modified_base (2444)..(2449): a, c, t, g, unknown or other
ttaggatgttaaacaacatacatgatagtaaatctagatcctggtaaaacaattcccaacaggtccgctattgacatgctgccttagggatttaagtcttccacttcgatgctctggttaacaaaaaatactaaggtagtttttccttccctgaatgttaggctttgatacttgagcacggtgcttatcttcttgctcgactctacttcgcggatcgattgaatggtctagccctgggtatggacgaccctttctttctacaacagtgggtcgactatatctctgttgtccctaggagcgccttgtgcaggccttggcagatagttcttcttttggggctcaaccattttgggcttccccttgtcgtttgttggattaaagggtccaatcttgggaaggttaacctttcccactagtgggttttcaacattattatccctttctctaccatgttttgcagctgtaagatagtttcttgtatttggtgtgtagctttttttacttcaccattttcctttgctagtgtaagactactcaccttaagcttaccaccttcgggtcctccttgtattctttgtcattgtttttgttgtacgcatcctttaggtcctcgtctttgccttctttgtcatcttcgttgatggaggtctcatcaatgtatttttcttggtgttggcttttctgaggtggacagctagctacttctaacacttcaccatcccctacaacatctgcttcaacgtctgccagaaggggctggtataaatcgtcgaccgtagcattttaattgtcattgggagcggatggttttttggtcacatttctagttgcaaaccatggttgtagaagacaacaatggtaaagacttccttcaagatcttaatgaaagcatcaaaatatttaccgagattttcaaaaattgaatttaaatatattgatcttaaagaaaaatgatcagaaataaagaagaatttttttacgtggtttgggcgttaatgagtcttagtctacaagtcaatattattgaactctttggctatagagttttttacacagtgtttagccaaaattcgtaaccctttgcataagggacgaagctttatttatatgctgaagtcaagttctcgggtgaacccggacccgttagggttcgtaaatgtgaaataagccactaatgggataaaatacaatataatgtagactttgagtcgagtagttgaagcccaattgagaggtaagtgtcgtctgtacgagcttgtacaacctgatgttgataggtggccatgcggcgctgattgtgtacaaaatagtggatgtttcacaaaaggtatgtcgctttttgtgttgtgcgcctttcctagatctaacacaagggacaaacctctgattctgtggaattcgttgttagaggagtgccacgtaggactgtatccgaacacctttgggactacctctgagggtatccggttgtcttcctttgaatcttcatccctttggacaagagttacccttttgggaccatagaggtctggctttgttgagacagggttttagttgaactcggagctgtagtcgaactccccttatagtctgaactattactttcttttggacttgatgaatgggcctgtaagttaattttgggcattggaagtacatgtgtcacctatccgtaaacacggttaacaattataaataatgaagcataattaaaatgaaagtaaatttattatagtattataattaagttttaatttgggtaaagatttgattttttttctctacaaatatataaaaaattataactattgggtatgaatatactttaaaaaatgataaatactattttagatttgtattctacaaaaattacaaaaattactgagacttattttttataaatttttttacataatagatcaaaaattttaaaaaaattacaaatacctcattatgaattttttttacttatactcttaaactttttttatttatacaaatacatcttcactaaaaacaataaatctttttctagtttatttttagttgttttataatttatttatagttgatttataattgtcgtgatattaatttctcgtttattttagttgttttctactttttctcaagaaaagcatatttttgaaattttaaaattttaaaaacgtatttttataaataaaaaatttttatatcataaaattataaataaaacataaaaaaatatatttttaaaaaattattcttttccaaaatcagtaattttgtaaaagagaaagtttaaaatggtattaaccaataaaaaaaattaaaatttaaaaaaaaaatattttttaaaatgactaattagtaatttttcccctgaactttnnnnnntactaaatcgtgcccctgaacttttttgaccgttaaaaattcatcctgaactattgagattgttnnnnnnaaggacttttgtctaattttagtagaaaaattctaacatggatgaaagttcaaaggacacgatttagtaggggcatgatttggtagatatc

SEQ ID NO: 36578 - DNA, 6073 bp, Cannabis sativa
atattatgtctaattattaagtatgaatacactaatatcaaaggatgacatttgtcactaatttatagagagagggtaaaagagagtataaaagagagtttccttagcacccctcttaattattttcagccccaaataaattatatacacatacaatagtctctatagatgatttatattattattattattattattattattagtacacaattatacatatacagttgacttgtaaaacaaataatttaacaccattaatagatcgagaaaggctaaataaataattgtgttgcagtgcagcctataataatttacatgggggttttaattggcatatataaatatacctactatatttaagtagttcaaaaatgtatagctaagttataaatatttaattacatttgtttatctaatataaaataaataaatttcatatacatttaattaataaaattgtaatgtaacatagtaacatgcaatatggacaaatacttaattagctggattaattttaatctatttttactccttgagtttttttttttctcctatacacatgtaaatatataatttcaaatacttatgtttatttataatattagttacatatgtgttaatatatatatttattgagataattatttttttagtaaaattattaaatataagattattaatatcatcaccaattaattatctgtcgaaatgtatagggagtactagtacatgtatatttgtatatagttataatattacaatattaataatatgcaataaggacaattattaatttgagatatatatacacgtacaattatatacatatacatgctaacatgctagatcgatatatattgatataaataataggcattcatatatgggcacccacttcccaccatgtgtattgttgcattaatattttttacataattgaaacataattcaccaagtacaaaaatataaataattatatacataattaatcaatattattaatctgctgaaataaaatttataatatttactaatcttcttttactacaatatatttatatagtttattgtgtaattaattaattaataactattcacactacagttgaataatagctaggaagaagttttattatttctttttttaaaagaaaaagaagttttattattaaaattgtctacttaattgcgtggcgtactgtcttgcatatttatatactacttctagattaattattaacaatatttttatcccaaaataaaaaataataaaaaatcagaaaatttggtttgctaacaactctgccaaattttgtctttaattaattttccaaaaaagaaaaaaaaaaaagtcttttttaccaacttctgattttaaaaataaataataaattaaatgttgattgttgaacatagtgatcataatcatgatgaagacataatataattgattgatcttatctaatgaggctaactaacttcaagtaattaaatctaaatcatatatatatagaaggaaatatatatttaatgataagtattaatgaagtaaaaaaaaaattaacgattttgaaattatactgataatttttttagcagtgtatatatatactaataatttagtattaattggtcattttgtttatattttagcactaaaaaagaaagccagggttttgtggtgcagtgtataatataaacatatatatatatatataattatatgatattataaaactcttgcaaaatattcagcataagccaactaaaatttttggtggagttcttgactattttttttataaacaaaattaaatccagctagcatgtaaaatgaggaaattaaacatatgttcaacaattaatttattaacttaattataataatcagagtgattattgattagatcgataacaaatttcacataaaagaaaagaaagaataatagttgttaattgagacgtgttgtacattattttaactagaaattattaataaaatactctgctatatatatgtttaattaccaaactgtctaacttaacaaaaaaaaaaaaatttaccgaactgtctacatcgcagtaataacaattgttcttttctttcgtacaattacaatagtcgtagtatatgttgttgaacaaattaaaaataataaattaatgattagttacattattaaattaaaataggtgaattttgatattttgttatactaacaataaataacacaatgtattgttgttgtgataatattttggatacaaagatgaaaagagtggaaggaaaaagaataaaaaaaataccaaaatcacttatttaactagaaaaaaaattagagagaaacaaaatacgagaacgaaatgagccctccccccaaatcaaatgccaaactcttattacggagttatggcttgatagttatttggtggtgtgataaaaatctcacaatttactcgcacataagtaatgtaaataaatatatataaatttatttatttaaaatagatttaattacactaaaatatcatttatctaagattatgaatctcaatcatggaattataacttagtaaaaaaaatactattaggcacttgtggtatccaaagttaacaattatttatattatttattaaattaaattaggtaagatttgatattaatttattctaatagcgatttcaatttgcactataagatgtcccttaactacattttgatattaaaatttgaatatatttttctccataaagaaagaacacggaaggaaagacgttattttctggaacgtccatcttattattataaaaatcactattcttcttaattattaacctatatatctctctctttatctaagttttgtttttgttcataccaaagaaacatgttaagtgttaaacattttatttgtaatatatttgttattttgataaaataaggtgagcgcacgtgagagaccacatggaaaaaggaaattaagggaagggaagggaaggatcgagtgtggttctctattctatgattgtgaaaagacaaaaacgacacactacggctatcctgtcttataacgtgtccatctaattaagtactattaattaattatcatgtaattgtgtatgaggaagaaaatatatatataagagaagccaagaaaaaagaaaatgctatcaaattaattattttctaccattattaataatttatttataattaattaatgagtggtgtacatgttttattattatatcattaggtgaatggaatgtgaataataattctaatatttataatttcatatatagttagtcgtagaccatattttgttttttcatatcgatcaagatgcagtatatcttgtatcaatattatttaaaaaaagaaaaaaaaaacttaatttagcgtgtgaatgggacgtgaattattaatgcattttaatattattattttatgatgtatatttgatttttgtttctttatattacttaatttataaaaaatttagagaagtaactaaatttggcatgtataattaagtaaatgttctcaaagttggattaatctaactgatgtgaaaatattataggcacatgggtctctatcattatatgaatgtagacgttctcatggaagttatgcattttctttggctaattaattataatatataggaaaaatatatatatattggatctaaaaatgaattggaaaacaattactctcaatttattattagttctaaattaaagtctatattaagattttcattcattgatataccaaactgtgagaatatttacatagctagctatgatacacatatataacttttcttttttagtaatattatacatatatatgatcttgctttgctaataaagatgtatttactttttgtataagacctaaggggctgaaagttaaaccccatatgctatttattaatttatccactaatctatttatttatttattttttttaaaaaaaaagacatgcatacaatacaaatattctagcttcatacatagagaaaacatctaaaccatgaatatttacaatgcatggattttcaaactttgaatattttcagtggtatcatgatcatatcaattactattgaatgtgtaaatgtatatatctaacttataccaaaacaatgattaagacatattcatgaaaaagttgaggtagctgtcgatctttgatctactactaattctcataaatttatttaacttatataataataatgatatagaattaataatcaattagttaattgcaaatctttagtgtaccccatataggtcctcttcaaattttaagattctacttaaaataatgaagtcttctaaaaggacaacactataaagtctatgccatataatataataatattaactttctatattactatacagctggatatatatatatatataatatgtataattattatcacacaaggtactgagaaagaatagtcaaaagagaatatataaggtatgaacttttttttttcttttttcctaaaataaattcaaagtaattaaatctagagaaaatttatagccatgcaaaaatgtaactaagaaagagtaaaaaaatatattattattattattattttcatagccgccagggtcctccagcccaaaaaaatgtaaagttaggcggccataaccctattctcaatcaatgcataaaatcatcaaaatatcacttatataaataaaaaaatacataattatgtatgtatatatatacattatattattctttgctcattgatttattttgcttcccctgctagcagccatatttatatcatgacatagatccaaaaacaaaaaaacaaaaccaagtcaataaggtccccaccaaagaaaatatttttatgcaaataaatatttcccatatgctttattttaattaagatgactattcattaatattattttactaattagatgagggggtgattaatttgtcaagttgttataattttaccatggagagagatagtagtaaagacaaaagctatataaagggtgtgctggttgatcaataggcagtaccaaacacttttctcttctcatctattctgtactaagatgagcaaaatggggtcaccaaaagccctattacttagtgctctcatagtagcattagtctctctaagcttccctttagaaaccactgcaaataactatctatactcatctccaccacctcctaagaaataccacccagtgcctccttaccactacaagtctccaccaccacccacaccggtgtacaagtacaaatctccaccaccacctcatcatcatcacgagaagcctcaccacccacccaccccggtgtataagtacaaatctccaccaccacctactccagtttacaagtacaagtcaccaccacctccccatcacgagaagccataccacccaccaactccggtgtacaagtacaaatctccaccaccaccaacccctgtttacaagtacaagtctcctccaccacctcacaagaagccataccacccaccaactccggtgtacaagtacaaatctcctccaccaccaactcctgtttacaagtacaagtctcccccaccaccccacaagaagccttaccacccacccaccccagtgtacaagtataaatcaccaccaccacccactccagtttacaagtacaagtctccaccacctcccaccccagtgtacaagtacaagtcaccaccaccacccaccccagtgtacaagtacaagtcaccaccaccacccaccccagtgtacaagtacaagtctccaccacctcctaccccagtgtacaagtacaagtcaccaccaccacccaccccagtttacaaatacaagtctccaccacctcctaccccagtgtacaagtacaaatcaccaccaccacccaccccagtgtacaagtacaaatctccaccaccaccagttgagaagccataccacccacccaccccagtatacaagtacaagtctcctccaccacccaccccagtatacaagtacaagtctcctccaccacc

SEQ ID NO: 36579 - DNA, 3951 bp, Cannabis sativa
cattcagaatttgagtaatggattttcagcaacactcatagataggattaaagcttttccataatcgatccagagacacagatttccataatctctttctcttttcgatttcatatttcaatcaacattaacgacgtttcttcaggtatttccttttctttgattttgaattttttgaaaaaataatattttttcttgtttaaatctattaatcgagttttattttattttcctattgagtttcgttatgatttttgtctcatctgattgtttttttgttattatttttgattttgggatttttctgatttatttttgaatatttaaagttcaaattttaccttctatggagttaatttttgtgatgctttcgtttatgtaggttatttttcatctgttgatttgcatttcagaaaataatttatatgattttattttttgaattttagaatattttcacacataaaaatctatacctgacgtttcatttggtaatgatttcatctttgttaaagtttcttcattttactgtaaaattatgcgatttttttctggcatttattataattttgcttaagtttcttctgatgttcagaatatttagattgacttgtgtgtgtgtgcatgtaaaaaaaatcatgataccttccatgttcatctgtactttactttcaaaatttactttcaataatcagtagatgtctaaatggtgagattatttaaagtttatttatgttcttacgtattagatcatttattgttgcaatttctgcaccaatgtgatttcaacctggttttttattatagttttcggctaaatttgatacttgtgttacttgtttgggaggttccatactgattggaactgaatgtgagttgtaggtttagtgaatcgatgttgagccaggagaaaatggacattgataatgtagtggatgtagctgaatcgatgttcaaccgggaggaaatggatattgatagtgtagtagttgtacctgatacacctgatagggtatctgcacaacgacttgttacagactctgaatctgttggaagtaagactagggatactttttatgaaaaccatatgaatggattgagatccatagataagtttgtccccgaaaatggacgtggtagaaaaaaagttatcaaaccaccaaaaggttttagaactgcagatttcggtatccataatgttatttcttcaatagaaaattcatctggttcacagaatgctcacatgtttaggagggtggacaaaaatgttggctctggccacagagcaagacaggctagtggagttagaaacatggacaaaggaaaaactatatgcactgatatgtcatcaaatttccaagatagcagtaggcattgtgattttccgaaacaaagtggtaacactgagcgtggccgtactgtttgtctatatggtccacctaataatattttcgctgaagataagagaaaaggccaaacagcattgagtgagaattcttctggagctttggtaccggacgcttctaagacaagaaatgcctcaaaggggaaagaaaagattgatgagcatccctcaaaatgttctgacttagatatgattcgtagagaagtgatcaatctgtcccctgattctgaacataaaaccagagagcataataagccttctcattctgttaccccttttagaggcaggacaaaaagtttggtaagaggtgggtgtatctctccacaaaatgtagcaaaaatgcagcaagttttaagcagttccaaaaacgttgaacaaagtgatgctgttacccctcttggaggcaggacaaaaggtttggtaattggtgggtgtatctctccacaaaatgtagcaaaaatgcagcaactttcaaacagttccaaaaacgttgaacaaagtgatgctgggaatggcgtctataattgtccacaacctgtagtagatatacgtgatataattgcagaagagaatagtagtagtgaaagagtgaaaggaaaagctgtattcactattcctgacacgccaaatgagcagaagggaaaatcatttcgtgcagctagcaggtacaccattgagtttctatttatatttagtttctcgtatatatggttaaagtgcatcattggcattaagttgttgttaggaccaacccttatgcagatactgcccactttggcacctatctcacaagaaggtggcacctttaaatatttagtgaaaagttggcagtgatacatactataagcctctcaatatatttccttacataacatattatgctattgctgctttacaattactgcctactgcctttctgtatcatgagatgttactcatatttatgtatctgtagcagttttgcaactagtactggagaggtgaaaggagtcggcaacggtagtagagatgaatctgggtgctctcaaggtttaggtggttggagaaatacacatagtaatttaaggaaactggataatagaaattcgaggcaaatggatggtcatagaaattcatttcaccacgacagaagaattgggagtagacaaaactctcagactgaatgtggttttgcagaaggcctaaatcaggtgttagcacctccttctgtgtgtcaaatggaactatcaagaggaccacctcgtgcagaaacgattttaaccaaaaggctaaagaaacagggatctccttctaggaatcatggtgaatgctctacatctatttctgaagactcagatgttttgtgtcttggctcttccatggaatcaacaaacacaagaacatccaggctccatcgttctcgatctcgtgtcatttcaggacaagatactggagttaatgtgttgtcatctccagtcagaaactcttcaccacaaattttagattgtacaaataatgatgattcagatgacagggcaagacaagttgaagcagatgagatgttggctcgtgaacttcaagaacaattataccatgaggtgcctataattggaggcagtgaggtatgtttttccagtaaacaatttgctatcagtttcctcagatcttatgattacgtgaagatttaatagttgtcccattaacagattgatgaacattttgcacgggcattgcagcgacaggagattagtacttctggtgcaggtcaaaatgaaccatatctcgtgagtgatttaaatttgggttatttgagacaattagggtatttaatttgcaatccatggtcgagtcattagtgtatatttagttggactattgtccttgaaatatcatcggaaatttaagcaatgttggagatgttaggtgttcaatgattatattcatttgtgtgtgtaaaattaaactaatttcagttgagattttactaaaggtttgaagaggccaatgtaggcttctcctttccggtgaagtagtttgtgtaatgttcataatagacaggatctcttatagaatagccttcagattatcttgcctggagtaatgactatttattttgcttgccgtgatttgctgacacaatttagcttgttatctatctgtagagaggctcagaggtgtcacagctacaaagacagccaaggtcaaggtcttctcagaaccgatcgaataggactcagaatcctccaaataggagattagtcggggctcgtgctccaacctccagtagaatggcacagctgaggagtcgcatgtacagacagcattttaatgtatcaaatagagggagaactattccatttcctttagatatggatttggacatggtaatttctattatatcagtgctctttgtcatgttcctttcttggtctttatgcagtgtagaatttatacaaccccagaatataagtgaaatcaaactttgatatagattagatagccccaccactgtaatgttcttatgattgcaccatcttttatatttgaaataagttgagtagtaggta

SEQ ID NO: 36580 - DNA, 6404 bp, Cannabis sativa
  modified_base (38)..(41): a, c, t, g, unknown or other
aggttgttaatccaacatacatgatagtaaatagatcnnnntaaaataatttccaacaatgtgtccagtggttggtatagagttaatggtcaaatttggatgtgcatgaagatcagtaggagttttctgatgtgggaagatattggtattgatttgtgatgaagaagagtttggttgtgaggtggtattgataaaggggctgctggtgtgaccatgggtgttgtgatcaaaagggacaatagtggagaaggaagtggttataggagaggaagcagtgaaactatggacattgacagtgggattggcattgttcgaaccaacattgttattgtagtttgggggcttttcacttgaagattcaccagcataaagcacacgtggttgaggctgagttcggttgtttaatgctgggaatgtggtagtaaaagatgagcgagccaatctagtaagtagaagccaagcatacccttggcaaaatcagttcgctatcgatcatagccattagatggtagtttggcgcctttcatccatgggccatattggaagtcatcctcattgccattatctatatgctccataaaagccacacaacgctcaaaaggatgtcccaaacgaccacattcacattcaaagcaaaattctggaagcggaagccgttcgtagcagaagtcgacccaaaattcatcttttatcctaggcaaacggatcatatggcctctcaacaaaaaattgttgtgcaaagtttgacccgaacccgaagaaaagggccccaaccttcgttagtggagtcctcaaatacttcaataaattctccgacaatatttccaagcgcttcagccagcgcttttgacttgcttaagaaaggaagttgataaatttgtacccaaaacgaagtaaaaatcatatcttcctttgagacattttgcagaacatctggcgccttaaaaataatgagatgattttgaaagtgccatggttctttgttaagtacccggtgcatatcgccttcacaaccaaacttgatatggaacaaaccatcttcacctttattttcaataatcaaaactggaaaccgaccattccaatggccggacatttgatcaatgaacatctgttggtatactgtctggtgagtaagaactcgagccagaagagtatgtgggctactgtcgatcagattgggacagtactcaggcagtgaaacaattgaacgctcttcctcagtgagagaaagggtgttactcatatcttgcattagtggatccatgggaaacagagaaaataaggagggtgggggtgaccggcggtaaggatgcaggggaaagaggaaagagggaacggttgagattgacaaatttaaaaaaagatagatgtaattagcagttaaaatacaaaggggagttagctaaagacataactgatacaggccccaaatggacacttcctaaattacggctttttaaaaaaatttagatagttcaaacaaaaatgaaaaaaaaaaatagaaagttataaataacataataattaattcaatttaactaagtataaaaataaatttcctattattacaaattgtaaatattatttatttagaacatgtatcacaaaaattattgatatgataatttattttctgttaattttttatatatataaattagaagaataatttaaataatttatttctattaaaaaaaagtccagatagttattaaaaattatcattaattacaaacataatttattaaattaatttttatctttttcatttatcttcttataaaaatacatgcaatttatttattaattcaaacatttaaaatatttgttacaaaatcctcatctttttttatattttaaaaataacaaattatgttttcaattttaacatcattactttattaataatatacacattcaaatgttatattttaaattatatcactcaaaattggccaacaccgaagcataacttagttctctaattataaatataaaaacaatataaaaaaaagtgcaaaccacaatataaatattttgtaaaaatgtgagaataacagtttgtatttttgtaaaataaatttctaatccataaatatattttaaaaatcgtgaatatgtccaaaaaaagttctcctgctttacgtttgggataattacactaaatactgaaattttcaatttttttatttttatactgtgaggcaaattttttttttaaaactactatgtttttttttcaaaattactgtgtaaattttataatgtgtattatgttaaatgtttactgttgttctacagttattttttagttattccactgttgtttttagttgttctgttttgtatttaagtgttgttttataaaatacagtatttttgaaaagattttcgtgtgagtatttttgtaaaaattaatccaaattccaatatttttaatattcataatcatatgggccgaaagcccaaaagtatatatttttcaaagttttctctaagaaagatgcttgtttcgggtttcgtggcatcgccttcttcgactaagcttaacagatcagggtcgtttctctggtttggtacattctcacgattacgcaaactcactgatcatctttcaacttttagtaggtatgcttttattgatctatcattaatgtaaattttcaattcattcttaaactttgctagatcttcgacgaaattcatctcgtgaaattgttctatttttcttcccatttttgccgcgaaatcgctactagatctgtttgcattacgccaattgtattgcgattttgaaacattcttttcattttccttgataaatatattattactttgctatttccatctctgctcacactctctcctaagctgattttgggtttgttttcaactaatctttatcaaattcttgtcggtttttctgtgtaaaactgtttgttttctaatttgtttggttctaaatttgctgatattcgttttttgattatttgaatttagattattgctgcagttcttatatggctaatgatttttttcttttcatgcgatttgattcggtaggccttaaattgaagaatgccttcggctcaggacccattttatgtggttaaagaggagattcaagaatctgtaagcttttaacttgcttatgattatgggatttcgtatgtatgtatcatataagcattgttttttaagatcccattattatgcattgttagtattagcagttgcgctttagatccttagagctccattatttaagttacaaaaatcatctcctggattttctcaaattccatttcaccttttgtgatggaccaactataaatggccgttttcatactaatactagcatagcaaaaataccagaaggtggtgtggctactagataattttattgcacgttggagttatttgttctttttgttttgtttgtcagattgacaaattgcaatcttcatttcatcactgggaacgtattccagccaatactggagagcaaatacatctttctaaagagttactggctagttgtgggagcattgactggcaggtacattctgaattacagcattttatgccttatggttacctctctgttgctatcataatacgtatgtctagcatttgctgttcaatgtaagaagatgaggttaggctaatttgaacttaaatggttttatctttacaatggatgtgacttaatcagcatttttttttttgataaatttctccaataccgtggctgagtaataaccaccgatcattgttttataccaacactatgagaaacatggcttgttatgaattttgcatgtctatttgtctttgtttcaaagtttcctgcaatcactgaaagcttactttcttgataggaaggtggatgaattggacaaaacgattgctgtagcagctagggatcctgctttatatggtattgatgagacagaacttgaaaaacgaaggagatggaccagcaatgcccgtactcaggtatttttagtataactgtattgaatattttctagtattggttaagagtacttgtttagaattagattcattgctattggattttatagttctgttatttattcttgacatgtagttcatttagtagcaatatacctctctgcgagcttacctaactcttttaaattattgccatatttttattaggtgagcacagtgaagaaggtccttacaagaggaaaggagtcaaatggtactggcaccacatctggaaatgcaatgcgtcgagagctaatgaagctgccaaatctgtatgggacagatggaactgacccttacgctgccaatgataatgatgatttcatagcatcagaatcagatagacaattgcttcttataaagtaccttttctttctcccacacctgtatcttttgatagaatcagatagatggttgcttcttgtatagtagagtacatgttctttcttccacacctgtgccttatatagaatcagatagacggtagcttcttataaagtagagtatcttttgctatccactggttccttttgttcttatttcttactgacaattagaattcttaggatatccttccccatgtactgatacatatcttgtttgtttataattttatttgtaggcaacaggatgaggagttagatgaacttagtgcaagtgtgcagagaattggaggtgtcgggcttaccatacacgaagagctccttcaacaggtaaaattccatggtcactcaccgtgatgttataagttgcattttttctggtgccttgaacaattcaatggaagaaattgattggaattattggaatacacgtgagttttgaagatttacttgaagagtaacttttagcgcctagttatttatagagaagaaagtgggaaagtaaagagagtaaagaaaaatgagaagaaaagataaaattgagttgtttggtaagaatgaaaaatagagagaagagaaaagtgagaagaaaaatgtggtgatgggttcaccaatttttctctctaatttggaaagaaaattgaagagaaaagtctctcacaaataacataaagactaaaacatatttatacatagtattatatgaataatttcagggataatatagtaattttgcaatataccatattttttccttgctacataccacacaattaggaaagcaatgtgttttgtttctttctgtctaattttctttttctcccatattttgtttcttctgttttccttagtacgtaacatagggtatgtcacacatacggcatttttatgctgagatttcacatatatatgtatatatatatatataatgtataaaagaaattgttgtaatctttaaaggactgaaagagcacggtgaagggcctgataatatatattttatgtgcaggaaaaaatcatagatgaattgggtatggaaatggatagcacatcaaaccgtcttgactttgttcaggttggtctttctatgttctgaactggtcattttttccaacttctgagaagtgagcttagctgtaaatctatttagcttggcaatcagaatgccatatattagtggtctcataagaggatgaaaacgtctggactgattttgttgcagaaaaaggtggctatggtcatgaagaaggctggtgcgaaaggccagattatgatgatactatttttggtggtcctgtttatcatcctttttgtcttggtcttttttacttagtgtaaagtttgaagcatgtatgccaagtttataaatacaagagtgatctgctcgtttgggaacggggctgttgagaaatacagatgatttgattagtgcacaaaaaaaaaaggaatatagtccttgaaggttctttacaatttttgagatcttggactgaaaaagtgtacgtaaatcagcttcatattatggttatttacttctgacaaatcaaatttttgagggtgcgtgccacatcatttaatgcggatggtaatttatatgtctaattaaattcgtgtgtgaatatgcaaggtcttatctttgttgactgaatttgtcactttattaatgtaactaacaattgaaggagaaaattatacctgctgcagtgcgctttaaaggtactatacctcgggatatagaatatcatcaattgcataaaatagtacatcatataaatattttattagacatctttgttcacgacaaatatgaaataacttatactagctaaagttgttcataaaatactcaatttaaggctaagtacagatatttgctcttggataaattaaattagattgaaaaatctaaaatttacaaattagatgataatgtcaatctaatccaatctaatctatacatttatatattttaaaaagaattatatatacaattaataattt

SEQ ID NO: 36581 - DNA, 8378 bp, Cannabis sativa
  modified_base (7551)..(7552): a, c, t, g, unknown or other
cctagtccaccaacagatttggacttgcataatgaatcccaagctacatttccagctctatcagccactccttggctccataggaagttcctgcagatttttttcaatttcagcaatgattctttagggaagaatgagaagttgacaccaatatgtgtgaattgtgagcaacacatgattgatgagaaccactctacccgcaaaagaaatattcctggaactccacactttgatctttactatcattttctgcactaagccattacattcttcagttgagattctcttggcacatatgggtaccccaaggtatctgaaaggtacattttgcctattgaacccagatatatttagcaccctgtgaatttcttcttcctgcataccacaacaatccacagtagttttttgaatgtttgggaaaagccctgaagtaagtgagaaggtcttcagtccttgcaacatgaggtataatccctctctttatatgtattctctattttatgtgtatattttgtttagtgttgtaacattatttaattcgtgattttgtcctttgtattatttatcattgaattggaatcttgttggtttgatatttgtattaaagcacaacaattttccaacacactattcattttagccatgtgatatataattaatggctacaaaagttttccaccggtagataataatagacattcctatcataatcattctctatattacttattctctactttcttcatgtgaatatgttaaggcaaagtagtgtgagccattaagccatgggtcaaatgagtttaaaatcgccgtacgttctctctctcagctttcttctcctcttacttgttaccatttacttctcttcatcattcaaccgagaaaaccaactcatccctcttaatctttcttctcaccatcatcccaacaatgcttctatcaaaccacaaaccaattttcaaacaagttatatttcaccggcaccggcaccggcaccggcaccagccccttctccggcgacttacctaaacaaacagtccctcacaaaacatggcattactactgctcaccatttcaaagcacgtatattatttaatctttataagttttatgagttttggaaacaagtgcttaattttagtgctttgaagaactgttaattattattatatgtatttgtgtgagcagaataagagcagtgaggagaaaattgaagaacaattgagtatggcaagagcagctatacacaaagccattcttacaaagaattatacatctgaccgaaacgagatttacattcctaaaggatctatttacagaaatccttatgcatttcatcagttgagtatactttttattattatcattattatgcattttttaaaatttattattattgttcatttatcatacttctactcatagttaattctttaacttggaaagttgtataaaattaatgctacctttttcttttcttcgataatgaaactaatgctaccttcgattggaaaaaaaaaatgttattaatcagttgttgataataatatccttggtatttccaagaataaatttattattattattattattattattattattatagaaacatgcagtacattttcatcgtgtttcttatgtgtggataactccaatttttggcatactcaaattaatatttttggtgttattaaaaaagaaatatatagttttagtggtagtcagtagtctagacttattcctttcctaaaacacaccatttgatattatttattaatacaaagtaaaggacagttgtgattttgattttattatgaaaaagagctacatttatttcgtcataatccctaaattttactgtaagagttgaattggatttgtataattggtcctttttattctttagcttctttctatacctctttttgctacatatgataatgatatgcactcgattattggatgaaaaaagagaaaaatactataacatgatcatagagtcttatttagtttttttaaaaccagaaatgattcattgagctttgtttatacgcaacgttgtgatagtgaatattatttaattttactcaatttgtggaattaggagccacatagagatgataaagagattcaagatatggacatacagagaaggtgatgtacctatggttcacaatggccctacgacatacatatactcaattgagggccactttatttttgagatggaaagtgggctgagcccattttcagcaaagagtccaaatgaggcccatgcattttttctgcccttaagtatctcaaaaatcactgattatcagtataggccccaccatgagacatttttccatcgtatggttcgcgtgtttgctgactatgtctatgtcatcgcaaataaacatccctattggaatcgaactagtggagctgaccatttcttcctctcttgccatgattgggtaacatctttttactctttctttttttttttattatttttcagggaataaaatctaagtagtctctccttcatatcactatattaataaaattagatattgaatttcacatcatttaatttaataactaataaaaaatattacctatttacagtgtcatctcataaaatatagacctattaacaatgcatatatattggaaaatatttccatccacattacttacatttctttatggttctaaattcgattattttcaatatggagaaaaatgattatattatattatgttgtaatggataactcataatttataaggagtgagagctatttagttatggcttataatttcgagggaatgaaatattatcctttaaacaagaaaacaagtataattttttgttaataaatatatcaaataattaaaaaaaaatatctcagtaagttaagatctgaagtttcaatggagtcattaattgaatatacaaatattcaagtttatatttatcaagtaacaagtttatgatttttttttttttatatctataattttcaaggagattctttcataatttaaagactgatataaaaataatattttcttaaatatttgattagtattttttttaagagacaaaaagagtgaataattttttttacataacactttaattttttaatttaaattttaaatttaatttacctcaaatttgatttaaaatctaaaaataagtaaacatgattgtgtatgttagaattgaattagatgattggttttaattagatgatttttatttgctacttaagatgcccaacatcatatcaacttggtttgctatattatttattaaataaaaatgtgtaaaatttaatattaaaatacactaataataatatattacctcttatagtgcttgacattttgagatccctaaaacattctctttttatttttttatttttttttaaggaaacattctctttttatttacttacacttatttatagctcataattaatatttaaataatattattaagtaccagtggtgttcaattcttttaagaagtgtcgacttacgattagttaacaatatttattaaatgtgtatacattaaattatatgagattcgatatttaattacattaataacgatataacacataagaaggtgctactagcatttctcttaatattatgtctattatcatgataattaaattattgtattatatataatttgagcattctagttaagcacttgacctaacattacaataaaataatatcttatgagtggttaataattttttttataataattgataaattaaagtatataattctgatattaaattataatacttagtgttgcccctactagtgtccttgttgcccccactagtgtcctttaagaaattctctcataacctagtagattttgtcaactcattaatctcaattaatatgattattaaggcatcattgattacacgtgatcaccacgaagatctctacaaaaacttcatgaaagtgttatgcaatgccaacacctcagaagggttcaagcccacaagagatgtctcaataccagagtacaacctaaaggcattcgaactcggacctcctcaactcggtcagccaccaaataagcggccaatcttagcatttttcgcaggcgcagcccatggggacataaggagcaaactctttgaatattggaaagaaaaagatgacgaagttcttgtctatgaaaatctaccaaagaagtacaactaccaacaattaatgggacaaagcaagttttgcttatgccctagtggctcggaagttgcaagccctagagtggtggaggccatgtaccaaggttgtgtgcctgttctcatttctgatttttatgcaataccctttgatgatgttcttgattggagtaagttctctatacaaataccaccaaagagaatttcagagatcaaaactatcttgaaaggtattccatactcaaagtatttgactttgcaaaagagagtgtggaaagttaggagacatttcatgttgaataggcctgccaagccctttgatgtattccacatggtgcttcattcaatttggcttagaaggcttaactttaggttgccattcaattaattaattagtagtgttattttatgcagctttatggtataatcttacgtgatattatattattattagtttcaggctcagctttgtgatacgaactggttttttatttttttaagctcaattatgacatgtttgtattgctattaattgcataatgttgctttctctacttggttttggtcagctatcgaaacttttgagacaaaaagaatcccaaaaaatcagcaaatgttgttgagaggaaacaaagtttgctctcgtcttaataaccaagtgtaaattataagtatattctttatttgtgctactaacataaacaattaacgtcaaaaaagtataaagaattgctccaaagaaaagaaaaagaaaacaagtgattgattaagcatcaaaacaatatgaacactagtgcttgtctcccttgggaatatcttctttagaagcctttgattctagttccttaggaagccttttctctacagccctgaaatttcattcgatcaagagtaattgtcaagaagtgttatcaacagtaatggtcaaataataaaaatccaaaaaaaaaaaccatctaattcaaccattacacttataaactattgttatatggtcattcttcgtgacttatactggtacctggactaaagtatctaatgtccaaacacttgtgagatgttcaacaacaatatttctctaccttaaatatcatagccaagactataaataaagtaactaaactgcctaacaaacttctttagactggactagactagtaaatatctaaagtcctgacacttgagagattcgacaatgtcctaccttaagaatcatagccgagagttgaaactaagaaacaaactacctaataagtggttaaagctgtttattagggaccactccataaatctaacctgtcaactgtaatgaatgaataaagaagaacaagagaaaatagcttatcaaatatttcaagcatatcacttatttgggattttccatatcaatacggcatgcattcttttaaagaattccttaaaactaattcaagcatttttagcaacaaaagtgatacataatttacaacccaaagtaaccaagtatgtctagaagctctcactatcccatcaattctatggaaagtgctaatgtacccttacttgatccattaacactattcaattgagtaacattaacactactcaattttatgccaaacacacttatattaacaatcccatttcaagatacaagaacaatttttgctctttaaatattgaatgaattggcctaaaatcatcatatttcagtgccaaacatacatacatatatatatactagaggcaacctacttgcgatgcacttttgttttgttgttcttttgtatttttatttaggcaattgtgtgtaaaactatggttttaaaaaaaccacttacaatcaaatataattttacaatcataaataattaaattgagcataagaacaaattctatgataaaaatgaaaacagttgctcttagggaagacttaattggtttaatcttccatttgtagaaatttagtttcagaaacaatacatgtatggtttcctctcagttccaaaacatagatcatgggattcaaatatgtttccaaactctattttccttgtgaaaatatcaaaataaattcgacttattttcgtaattaactaagcttaattaattgaggtctaagtgcttaacaatgttgggaaaaaaatgattgacaaaacttatgtgtattaaatatttatttatattattatcaaaatcatatgatatatatatataaagttatatataaatctcttaatatttaaaaatccttaaattatttaacttttatatattaattattgaaacttagaattattgtgttaattctttcatatttattttaacaaatttaataatattagtatgtgcatatttttttattagttaaatattaaaatttttgtaaacaaatcttaattaaaaaattttgtaaagcttatgttttctaaaattatacaataatttttgtaaaaaatattaatatttttatagtgctaattcaaaaatatatgtatatatgtttactaatctcaccgtaccacgtaccacagtacggtgagtcctcaatattaatttttatatgttttttatttgtagtatatagattttgtgaaagaatgggtactattctcaaataatttttatatttgaaaggtagtttttttcaaaagaaaaacactaacacctaaaagacatacatactgaatgatgtactacacattagatgatcagttacacctttatgcacactcatttagacacatatccaaattttaatcagtatttatagagtaggaggaatactagaataacttacccattttttttcatatatgtagtgtgcgttaaatgcaattagctgcatgttaaaaaatgaagtgttgttcaaagtggatactgttctatctttatgattctgataaagttaacaaatttattacaggtatattctgtcaaaaatacaacaaaatttaatgcacagcaaaaaactgttagataggcatttataataaaaaaaaatgttaatggatacaactattttatatttatgattctgttaaaattaacagatttattataggtatattctatcaaaacgcaacaaaagtaaaatgcacaacaaaaaattgttagataagcatttacatatgtatgtaagatatatatattcacagagtccaaaatagcacaaaaagaacttagaaacaagttactactgattcctctaaatttacaatacacattaaaaagcaaatcgaaccaatgaatttcccattaagctatactaaattataaaccactaagtacaaaccctacattaaaaatacacatgtctatatttatatatatattgagagagagaganngagagagagagagagagatagttacttggtggcagaggcggactcttcttcaagccaatttcttatgtgcattagcatttcgtctgaagatggaggtggactgctttacatcagacctgagaagaagaacgacggcgctaacactagctacgatgaggataaagttggtcaaagccattgaatccaattcctagcttctcaattataacaatacaaacaaccttaatctcagtatgaggattttacagagttttttagagatgaagattgtaatttgttgacaacattaatctcccaaaaacctctatgtacaaatcaagaagatgccatacaaactaactacaaggatggcaaccagccctttcaagaaactttcagaacaagattatggtcttaaagtcattaatgaaaattagtagtaaccatacgcaggggggctaagttcaaaaacgttctccacctcacttgggattcctaagcactatgataaccaagtctctgcgtaaaaacattttgctgatgaatctgtcttggtttactgacaacacttaaatcaacttctcatatatgggcctacaacaagggacccaatacacgaacacacttatatttttctttataaacacattatggtataaaccattaaattacaatgtctatatttataaaagaaaataataacataaaacgattttggttcactaatatccattacctaatagtacaaaagatttaagaatgtacaaaactaatcaacaaagcaacacaatcctagaatccactaagcaacacacaatcaaacaaatctataatctactactactga

SEQ ID NO: 36582 - DNA, 3447 bp, Cannabis sativa
ttctcattctaacttgtttgttatttattttttgctcatcactttttgaagaaaaggagatttcataaactatacttaaacaccatgtttaaatttatccttatcaaaattactaagagcttctttagaatgcctaccatagatgatatactgttattaattggtgtaattcaatatatcaagtctcacacatttttatttattaaataatataaaaaattgctaattagttaacgtgctatatttgtatcgagcacctttgtaaagaatattatatgtttctattttcaaacatttcgattgaatgctttcgtaaagaaaattgctaagagcgcatgtaattctaaagtctcacatattttaatttaataattgtacagcattatgctttatagaagaaagtgataaccaagcaaaagtgtactgtgaccaagagagagtaggagagtatccatgcaacccgagtaagaggtactacgggcgcgggcctcttcaactgacatggaattacaactacggagcagctggccgagcactcgagttcaacggcctagattcccctgagattgtggccactgaccctctcacttcgtttaaagcctctttgtggtattggatggaaaatgttcactctgtgttagaccaaggctttggtgcaaccattcagaaaattaatggacctctcgagtgtggtggtaaagagcctacaaaagttcaaagtcggattcagttctaccaaaactattgtcagcaattgaatgttgatgttggaaatcctaatctctcttgctaaaataattagtacataatacatatatctaattaagtttcaatattattaatattaaaaataatcaatattgtatgttggttttttatagtttacataagccatatattcatgtaataagctgagtttgatttaaatcatatttacgatcctcctttttaatgataggaaaataattagagaattttaaaaaaattattgacttataagtttgccatagtttaggactaatttactaaaaaataaaatttgaaaataatataatttagtaatataatttactaattttaatttgtcaaaatttatataatttagtaatatatagttttgaatatcaaaccaaacatttaggaatgcatattttttctatttagatgaccctgtagggatccgtccctaatagggcaggacttttctgtctaaatggggaacgaagcgggaacgaggatcattttttgtccccaaatgttaaacggagatgaaaatgacagaacacttcctacaaattctccgttcgtgtgcatccctacaaatattataattgcatttaaattctcttttgttttatatatagtacagttagtaattagtattacaaagtaagttaattaaaatataattacatcaattctcatctaagctgctcattattacaatagaaacaagcatgtctaatctaataattttaacttataatgcatatttcgtcaaccatgttttgttaataatcaattagtttagtatcctctcttttcttgacattattattgaaggatggatgaagaactaaaaacagagaaaagtaacagaaaaggaaagaaagaaagaaagagaagaaaaaaaaaacatgaaagagataaaatgtgtattcattaatatgaactcttgtacattatatatacatgaacgataacaactaatcaagattagttataactgaaaagctaactaactaactgtttgaaccaaacagttagaagactaacttaacagacaaacagtataattaaattcctttaacacacagcaactatttttgtccccgtctaaaacggcaatcatgtcttaaattaatggtatcaagagacattgtttcaaagttaaaacaccaccaaccataaattattatttttggtgtaaatgtgttaactccatttttattattctctcactacaatattatatttatcattaataacggcagaggagtccactgcttgagtaatcgagtaagaagcccaccaaaatctatatcagattaaatattaatatgaggattgtttgggtatattagaatcttaaatacaataagggtactaaatgagtagtttttacacataaaggagaccaattaatcattattcaaaacataaagtatcaagtttgtattttaacaaaacacacattactataatttactctattagctatgtatatatgtatgtataatagatattcacaatatatgagacattaattaattattttttaaagatgtatgagacattaattttaaaaagtctatttagctctgtttttgtggttgtaatatcctctttacttctctttttggtttgttttcaaatctgattttgtttttgagattttttttcttctttcaaatctagttttttagagttgactaagtaaccagttacctaccttcttccatgttcttctacttgttggttgtaattaagctaattttctttttcacatttagtcatttttttttatctaactaaataactagttaccgttttgtgagatcggttaattgggttaagtaacataataatttattctgataatgataattatcaattaccactatatcattgtaagaaataaaattatttttattaccaccacgtacatgactaaaataatatattttaaaagtggtaaatagttattactacaatatattgatacagtgcatgtaaataattaattatagttttttatattatttatttaattaaaatatgtagaattcaaatattaaattaaattaaactaataataataataataataattataatatatcatttttttttagtcttcaatactttaaagtctcttagcatttataattagtttatggaaatgttgaaggtaaaattaatttttataaaaaatgaaaaaagtcaaaattgtggaccaatttagaggattagaatgaggatatatagtgtgaatgtatgaccactattataccaaagacttctcaaattaacatcttaacaattgaaaaatgtcttcttaattatcatgtacatatagtatagctagccagcgcccactttgacttatctctttcacataattgaactacaaaataccaccaccattaatatgcattttcatcctcatgcaacttgcatttggaaaaaaaaaaaacttccaactttacatattaatgacaaagggaaaaagtcaactctttgacccaaccaataaaacgtacacgtcttctagaaaaaaaaaaaaaaaaaaacacacacacacaaaagagagaaatgtcatctctaactggattacctaaagttaatctatatttgatacaaataataattttgtgatatttttgtatcaatttatttatttgctttaatgtataattataaatttaattaatataaaatttaatg

SEQ ID NO: 36583 - DNA, 5489 bp, Cannabis sativa
  modified_base (558)..(560): a, c, t, g, unknown or other
atggctctttatttttcttatttgcagtgagaacacaaaaaatgtgctgattgcagcttcatttatacacatgaagcatagagaacatgcgaagtatacatcacagcttagtactgtgaacccacgaatattgctttctggtcctgcaggttagtctgattcactggttctaataataggttcatgatgttgatgcttttgcgttccatgaccattataagttgtgttttattatgaccagggtctgaaatatatcaggagatgctagccaaggcccttgcaaattattttggtgctaagttgctaatattcgacagccactcatttttggctgtaagacaaactgcattttttgattatggaatttagcagtttcaaactcagtagtcacggctcctatctaattggatctgtctttttaagaaccaacaaaaaattattgtattttacattgtattttcattattgcatttttttgtaagtcatattgagaaccaatcaattattattatattgcatcttcttttcgttatcgttttcttcttcttcttcttcttnnncttcttcttcttcttcttttcatgtacttattttcctgtcagaaaaaatgaaggctgacaagctggagttattaatatcaaatatgatgtagggtttatcatctaaggaagctgagctgcaaaaggatgaaattattgcagaaaaatcctccacctgcattaaacaaagccttgtacccactgacccttgtaaggccgtggaacagtcaactagtgaagcagagacaccaagctcttcaaatggactagaatctcaaacaaagttagagtctgatactgcgccctcttcctctggggcatctaaaaatatatttaaaataggtattaacactttaaattgtccttggaagggtcttggtgtaggattttatgtgcgctcttttattttatccttagttgctgctgctgggatttttgttccccttccccgaagttttggtatgacttcgatagttatgaatcatgcaggtgatagggtgagatacagtggtccaggttctggcttgtatgctgcaggatcttcttcacggtacaatctttagtttttattgcttaaggaattgtttcaccggctgattctgttgtttatcattgttactaaatattaggggcccacctaatggaactcgtggaaagattatgttactttttgagagcaatccttcatcaaaaattggtgtaaggtttgataaacccatacctgatggcgttgatcttgggggtatctgtgaagttggtcatggattcttctgtaatggtatggcttggtcttattactgggattttcattaaattaactgtcacttggttttgcactctgcgaattgacatgcatactgatgttctcatgcctacctcctctctgtagctgctgatcttcgtctagaaaacacgggtgtcgaagagttggacaagttacttattaatacattgttcaaggtagcctttagttttctcaaatttttattctcctccagtttttgagtgcaaattgatgtaatataattataatcttcttccaggcagtacacagtgagagcagaaattcccctttcatattattcattaaggatgcagagaaatctcttgttgggaattcagattcatatgcctcatttaaaagcaagctggataggctttctgataatgtgattgtaattggttcccatactcaaacagacaatcgaaaggaaaaggtattctatcagttttgatattattatgtctgatattagaagaatgaaactatggaagctgatttagtatttaattggggaataatagtgaaaacaataacaaaaatagattgagaaaaattattttgtgggtaaatgaatatataactaaaattacatataattttttttaagtaaaaataatcaagttgaggtttttttgtcttttttggtctctgcccctgaccatgatcaaattatctataatttctagattagtttatactaaggaaagtgttttggagattattcttcctaggggcaggtatcatgcacctcttttcaaaagctggatctgatatttttcttggagacaatactgaagcaaattttatattatcaaatgatcagactctaaaatttctttctagattcaaaatgactttccgacaatttcttgggtatctattcatggaggcaggtttaggcctgtctacaaaagtggggctgatactctcaaggcccgactagtgttgagagaattaatgcataatactgtgtgaagacaaacctatttgttaagaagaaaagttggacttctagaagcctataatgattaagactttattttctgctcattttctttagtttgttctcgaagtttcacatgtttttttgttttatctttaatactttttcagtcacatcctggtggcctgctcttcacaaagtttggcagcaaccaaacagctctgcttgatttggcatttccggtaatgttctaagctgttaaagttgttatatttctttattcttgtgtcggctatctttttaatatttttgggtgttgtttttgttgttgtttttgtgggtatcttttcttttggtgttaatatctgtttaactttcacaggatagttttggaagattacatgatagagggaaggaagttcccaaggcaacaaaacacctggctaaacttttcccaaataaagttgcaattcatttgcctcaggtttgtatagctctaaatgattaagtttcaactttagaattttaggtgctcataatggatgaattatgatacaatgttggtaatgcaggatgaggctctacttgtttcatggaagcaacagctggatcgagattccgaaacccttaaaatgaaaggaaatctcaatcacttacgcactgtgagatcttttctcttgctcaaatattgttgaatttcacttttttttttgggggaaattagggggtctgtgttgtggtggtaggagaggaggtacactgttgggggaagctgtataacaataacactgccattgttaatttactggtcagagcaattattaagtaaataatatttaatagttacagttgaattctgtgtgtaggtgttgagtcggggtggagtggaatgtgaaggacttgagacactatgcatcaaagaccagacacttacgaatgaaagtgtgttttttttttgaaaattttggatcatgaattctgttgatttgttcccttttcccctgctaatcttttgtaaactttgtcatttatttcaggtgcagaaaaagtagttggatgggcattaagccaccatttgatgcagaatcctgaagctgatgcagatgcaaaacttgttttgtctagtgagaggtgattgatagcttattttgtgatgtcatatacggtagcggttatagctgaaatattataatagtggctagtgggctattactactgcacagttgtaatgcaatgttgtgattctggcagcatccactatgggattggaatactacatgccattcaaaatgaatcaaagagcttgaagaagtctcttaaggtgataattgttagattttgcactttttttagtttttagtattatttacatttttattctgtgtgaaagctagtttcagaaataaattgtcagatatgtcagctgcatttgtcatttaggaaactgattggtttagattaaattaggatgttgttacagagaatgagtttgagaaaaggcttttggctgatgttattccgccaagtgatattggagtgacttttgatgatattggagctcttgaaaatgtcaaggatacgttgaaggaactagtgatgcttcctttgcaaaggcctgaacttttctgcaaggggcaattgactaaggttggaattcatattaaaatgcttagtgatgtcaaggattccttatttgtccagtttcagaacttctattttttcccactgatgctgatttggggattagctgaatttagttaattgatgtgtactttattttggttctgaagttggcatgtgttatatgacttttccttcttgttcatttttaaaaaagttctattttccctctttttgcagccttgcaaagggatactactatttggccctcctggaactggtaagacaatgcttgcaaaggctgtggctaccgaagctggtgccaattttatcaacatatccatgtctagcataacatctaaggttggtaattctgccaaatatttttgatgattcaatctctgtattgattgcattgcataacatctaatctggcattgtcttctgttaatgcagtggtttggtgagggtgaaaagtacgtgaaagctgttttctcacttgctagtaaaattgctcccagtgttgtatttgttgatgaagtaagtttcaatggatccttattgaccaatatgcttatgtacacacacacacatattatgtcatccatattatacgtaattatttctttgcttttcataggttgacagcatgttgggtcgaagagaaaatccaggggagcatgaggcgatgcgtaagatgaaaaatgaatttatggtgaactgggatggcttacgaacaaaagataccgagagggttctggtgcttgctgcaacaaataggccctttgaccttgatgaggctgtcattcgaaggttgccgcgtaggtaagacattgtgtcaagactaaatatgtggaaatattttattaatgtatttgcttttgtttatttgtttttatggtttgtcaataatggtcctgataattttctatattcttccagattgatggtaaatttgccagatgctcctaatagagcaaagatattaaaagtaatcttggcaaaagaggacttatctcctggtgttgattttgatgcaattgcaaatatgactgatggatattcaggaagcgatctcaaggttacatatattttactttgttattttaattttggctttctcctacagacaagttgagtgactatattaaggttcacttcttgcagaatctatgtgtagctgctgcacaccgtccaattaaagagattttggaaaaggagaaaaaggtacgtttcattcgacaacaatcgaagaatttttttttttaagtggttgtgtgtcggaaaggggatcaaattcccattgtgtgtgtctcggaaagaggaaaatagaaaaatgacggttggtgcaaacttcctactttctaccaaacacaaagttttccaagttaccaatttcaaaatgaaaaatgatttttttcctagttatcttgagggatgaatgtctgccttcactgatgcatctccaagtctaaaatatttgtttttatcatttcctacttgcaaccatcttattctctaaccgtaatgaactgaaacttttagaaatcaataaacgaaagattttttctgtgttgtgagctgctgaatggcaatgcttttt

SEQ ID NO: 36584 - DNA, 4225 bp, Cannabis sativa
aaaaaaaaatatgttgttacgtatttttaaactgacacttaataattaaaaaaatatggctgtaacaaaattataaaataagataactttgttatatttttttaattaagattatatgtattaattgtaaatattaagagaatttcatcacaaatattacttattattatttgtctaaccatatatatatgaaaagtgttaaggaaaacttaatgtattaaataccacataaaatagcatatgttattattgatatatttcaatattaaatttcatacattttaatttaataaataatatgcataactctccaccaaattgtaaaatgtaaaataacaatactatatatataaaaaagaaaagaataagggaaagaaagaaaatgattataataataatttcatttctctaataaatgactctcaactgaacaacaattttaattgtcagacaaactggtggaattagaattcgacctataaatataaatatatatatttgctatcccttcctactactacttctactactacacaaaaatcttacaaatttatttgtttaattaaagagaatgatgaggagaaatgaaagaaacacgtcgacggcgtcgttttgggtcattattattactatatttttgtggtgtgtattattgacggaaggtagggttaagttaccggagaacatgacagtttcagcagtgattatgttcggagattcgattgttgatacaggtaataacaacaacaatatcttatctccggcaaggtctaattttcctccctatggtcgtgatttcagaggaggaatacccaccggaagatactccaatggcaaggttccttccgaccttttaggtacttcattttcttaattctaatcttttgtttttggtactaatttggatataattatacaataaactttttgttttgatatgtttacaagtttaactaatgaaaaattaatttgattggtggaggtacataaattagaaaaggatgagtaactatcaaatcaaataatattaaaggacgaggaaattaatagtgctggattcttctactctataaaatagaaccccttaattgcacaaagatcgaaggaaagatctatatatacacataaatatgtatcactgttactattttatttattacaattctgttgcttctgtgccctgtggtcccttttgttttttcctctcttattcttgggagtggaaaaggtttgtttttttttcttttagctgtttccctattttcttatttcattgctctaatttcataggtctcaatttcatgtttttcggaacaatttttagtattcgtataattaaagattctgccgtacatccctctcttttgtttgtttgctttataatcactttctatacagtgattttcttaatactctgtcttttattggttgttcatttgcctatttggtccattccaaaaacatattttgttgatttatatattacaagttcttaatgctctgtcctttgacaacaaaatcattaacttattttcaatttcatctcagtggatgaattgggaatcaaagaactattaccaccgtatgctgatccaaatttaacaccaaaagatctgctaactggtgtgtgctttgctgttggtggagtaggatatgatccattgacttctaaacttgcggtagatatataccgtttttaagtattaattgtttactattaattttctttctatatatatctctagatcttaattattgtatatgatataaaaacagaatgtcccacctctaagcgaccaattggagaagttcaaagagtacatagagaagttgaaaagaatagctggagaagaacaaacaaaggtgatcctggctaacagtgtggcttttgtggcactaagcagtaacgatattgccaatacatattttactgcgggtgttagaagattgcaatacgatacttctgcttacactgatcttatgatcagttatgcttctgacttcgtcaaggtacaaaattaagaatcctatattttactaaataatcatccatatatataaatgtaactattttgtaaggaattaaatagaaaaaattatatattgtgcaagatcatgatcatttaatttactagctaaacagctagatagggttgttatctaatgagaagataacaagtataatatacataggtgcccactatgttggtgcaacccctaactatttcggcatataaaaatttttttagtttaatttttttatagtcgggtatggtataattattaaagatatcatttaaaattttgagaaattcgtactaatatacaatatagaattcaatgtttaaaccatctatttcacacgcatgcaacagactcttttaatcctattttttggcatgttaaatttttttgaagttttcaaaattttaaaaaatatcttaaataactaaaatatataagatcatataaaaaattttttttttttgttctttatactcaaatagataagagtgcaccgaatttttcatatatatatatatataaatgtgtgagatgacttataaatataattaatttaattatttaaaattgaaaggaattgtatggattgggaacaagaagaattgggattcttggagcacctccaattggatgtgtaccatctcaacgaaccctaggaggaggcatagaaagaaattgttatgaagaagagaacaaagtagccataatgttcaattctaaagtctctgctatgttggattcacttaccaaaaattatgttagccctgatacaagacttgtctacgttgatatttactatccactcctagatatcattcagaacccaactcgatatggtgagaaatataattaattattaataaattaataatcattattatacttaattattctaaatattgtttttgtgtattttaggatttacaatttcgagaaaagggtgttgtggcactgggcttattgaggcagcattgacatgcaacaaattcgacactacatgtgtggatgaaactaattatgtattttgggatgcttaccatcccactgaaaaggcatacaaaattattgtcagtggtgttatacaaaaatatatcaacaaatttgtctaaaactacattaatattagtcttttaacaaaaagattaataatatatttatgtatttctcctttgttggtgttgttatatataattggggacaaaattatgcacctaatttgtttctcatgtaattagcttcacaaaaatgtacttctatctatttttaatgtcaatgcaacttcattccatgttttatatatatttattaaggatatttaaatattattcaacaattttttaataaaatttacaataatattaaacatatataaaatattatttttgattcaatactactttttgtaaaatatattatatactttgatattttcatttgattttttatattttatttaatatgttataactaaaattaaggaacttcttttagaaatctttaaattgttggaataatttagttttttttttttttttttttgttagacttatcaatttgttattagttaaaaagtatatatttatgaaaaaaggaaattataaattttatgagttttaatactttttgtacaaaaacatgacctttttttttcaaaaaggttcttttataagaaattgaagaaaaagtaaaatataagaaaatcaagtaagggtaactaggtacccttatggtaattagagagataactagttaccataagagagtaactagtttctatactgttttttccatatatatttgagtaatttacggcaaaattttttatattttaatttttatattcttaactttcttatctttttatttagtggtaaaacccccttatgttttaatttttatacacttaacctccttatctttttcttttggtggcaaaatccccttaagtttacttttttttacaaatttaaagttttagttagatactaccgttaattactaactagattactactactgtatcgatttcgagattttactgttacctatacacaagtgtatacagtggtcattcagttgatatttgacggtaatatttaactgatgtatcaaatttgtaaaaaaaaaaaataaacataagggagttttgccacaaaaaaaaaaaaaaaaaaaaaagggagttttgcccaaaaaaaaaaaa

SEQ ID NO: 36585 - DNA, 3494 bp, Cannabis sativa
caggtcactggaaaacaagttctccccatttatcttaaagtagttgaaagttcatatttcaacagctcagacaaggtaattttatttggccaacaatggtaacttgttattttctatttagacattttaggagcttgttaatatgttagccacaaaatatatcaatttcttctgagtaattttccgacaatgtcaagtggccattgatcctaacaatttttgtctgagacaatggatatcattagatatcatcatataacaaagtcagatatgcttgtctgactcatactgatttaaagtccaaaattttgtagaccaacaaaattatattttctcattagttagaaaatgacaggtaataaatctagcagacgaagttgaggagctattcatcaaaaactttgctgatgaagaccgaagaaaggccatgaagtacctcaaaccgcatcagcgaaaagaatcacactctgtaacattcttcattggtgagtccttgtttagaactttaataacaaaatctacaattaaaaagaagaagacgaagaaaaaaacaagaaaagccacatcctttttcattagaccccaaaatttgtttagtggacaactttaagctcaaccactttatgaaagtataagtgttaacaagccctggtgaaaaagaaaatatatatatatggtcccacttggccactaaactaagatttgaggcagtgactggtttacttttctttggtgggatgataaagctaggtcccattctaccccatagccatatttggagacaaacttggttgtacaaggttaaacaaaagctcattagagcctatagggaaacattatgttttgtagttgtggagcttgtggaaaatcgtataaggattcttaatttggaccttttcttttgtattgtattgatttttctatctattacgatctactagattttcacactgttgtcaaagcatgattgagtctgatctcattgatatctagtggtaaagagggcctagtcaatagggtgtactagtttttcaccatattattattttttactatgagaaccaaattagaatatgacagtttgcttaaacattatgacaattgaattgactttcttatttttctttgttctcaatcagggttatttactggttgtttgatagcactcttcactggatatgtcatcatggctcatattttgggattgtacaaaaagcaaccaaagacttccatctatatggaaacttcctatcctgtacttaggcaagtatagttagaaaaaaaaaaacaaacaaacaaacaaaaaaaaatcttctgccattaaaaacaaaaattattcaacaaatcatcattataaacctgacccttgttctttttttacagcatgtttactctattgttcctgcacttctttctgtacggttgcaacatctttgcatggagaaagactcgtataaattatagcttcatatttgaattggctccaacaaaggagctcaagtacagagatgtatttctaatatgtacaacatcaatgactgtagtagtagggactatgtttgttcacttgtcctttctaactaaagggtattcctatactcaagttcaagcaatccctggccttctgctattggtaattttatagctctttaataaacttaatattactccttaataaatctttcagaaaactatttattgatttctaattaatattcttttccatatgaacaggccttcttactcttgctagtctgccccttcaatatcatttaccgatctagccgttatcgcttgctttgtgtcataagaaacatcattctgtcccctctctataaggtatatgttcattttttctcttaaaactttataccaacaaggcaccaacaaatatttaattgtgtttgtttacttgatttttgtaggttgtaatgctggacttcttcatggctgatcaactatgcagtcaggtagataaaaatgcacaacaccgcgattccattagatttttttttaaaaaaaaaaagtaataataattgtaatgagaatttctttctcttcatattggatatataggttccaatgctgagaaaccttgagtacgtggcatgttactacataactggaagctacaaaactcaggattatggatactgcatgagaactaagcactacagagatcttgcctatgcagtttctttcctaccttactactggagagctatgcaggttcattaccattaaagactatcctcttttatctattttgtgcatttgcattcactaatttcttaattgtaacaattttcttaaaactggggaccctgcagtgtgctagacgatggttcgatgagggacagaagaatcaccttctgaacctgggaaaatatgtgtccgccatgttagccgcggggacaaaagtagcatttgagaaagaaaggactgtgggatggctttgccttgttgtgatcatgtcaagttttgcaacaatgtaccaattgtattgggactttgtaaaggattggggtttactgcaatccaactccaagaacccctggcttaggaatgaattaatgcttcgccgaaagatcatttactacttctccatggtataatgtcatggccctttttctatctgccatttaacaacataaaagattccaaatctaattcaaaagataaggcaagtcaataaagggtgtgttgtttagaatatgcggtattgaagtatggattattggtatgttatgcagggattgaatctagttctcaggcttgcgtggttgcaaactgttgttcattcaagttttggacatgttgattacagagtaactggactatttttagctgcccttgaagtcattagaagagggctttggaactttttcaggtaaaacaaaatacagaattacataagacttgatttttggctcttactttatacagtggcatgagaaaatttacaaaattattctaatgatgatgattttttaggttggagaatgagcatctaaataatcaaggcaagtttagagcagtgaagacagtacctttgccttttcatgaagtggatgaggaagactgattttgccacattggctagaacaaaatttagtatacagaattggattctggatttttaagggcatttttcttccaacaaatgtttccaaaaggaactcttgttgtactaattcatgtgtggaacaaattaagaagtgtagtaaacgataaaactcgagagagaaaaaaaacattaagttgcttattgacttaaatttaggtggattttggtaacttagtcctccatacttgtatacaaaaaatttcctcatcaatgaaaagaaaaataatgtaaaaagaaaacgcaattgcgttaatacctacttaacgcccttgaagtgtgcatatattgacatgtcacccgtgtttaatttatgtatgtgttagcttggacataactcaaaaagttactgtaaagtccaaaattagat

SEQ ID NO: 36586 - DNA, 5706 bp, Cannabis sativa
  modified_base (1957)..(1961): a, c, t, g, unknown or other
  modified_base (2711)..(2712): a, c, t, g, unknown or other
gatgagggtgatttcgatgagaatagtcatgtatcaagtacgaacactcacatggcaaggggtacgtggttctcgaaaaaccacgatattttccattatggattgccatctccattgctggactacttccgaagagctcaaaatgcaatgccacactctaaaacccttgtaattttttatcttattttgtctcagtgcagtattgtgcttgatgttcatattaggcaactggctttttttaatttcttttggttctttttccttatcattgttccctacattttcaggtgcaagaaaacttggagaatgaaatagaaattcttgaacaacttcgactcaactttcatgacatgatggagagactcggcgaagcagaacttgatgacaggtcaaatagtttcttgattcagcctatcatcatatcatataatttgttgttgttgtttttgacagtgacacatggtttgtgtgtgtattttcatctttgtagagaaaacactcgctgggatgtgaagctggcaatagagtacaaagatattcaaaggcgaatcgtctcttcaatcttaacttcgtgtaattcgggtatcgagttagttaaagacaacttgtgcagatgcatggcctaagggacactagtggctaggtaagtgtctatgactaaaatgttgtactttcaagacaaacaatgaatcagttcattttggtatgaagggcattagattattaggccatttgattttgggtcaatgagatttgtcattgtctagtctaacaagagaaattttatttgaaatattgttattaggcaccagtagtccctaacaccatcacgaggtggtgttttgcgaataactaacaatattctaatagttattaaattaaattatataaaattaaatacttaatttcactaataacgatatggcagattaagtggcttttagcatctcttttatttatttgcctccattgtgatcagatggtgtataagcattaactatagaatagtactttatttttttcaccacaattaaattcttttttttttccatttaatcatgaattaatataaaaaaaaagggtgtttgtggattggttatagacaaggcatgcaaattgcttttcctaaaaaaaaaataaaaaataaatgagtggtcaaggtatttattaattcaactttatttgatgtggggtagggaagaaaataactttttgtttgtgataaagataagggtgtgactaagtatgatttattttagccatattatatatgtgtcatatatatagtataaaacatttatactatatatatacatattattattatgtggtgtgactttcttaatcatttatctttaatgtatcaccattaagcatggtagtggtaatgtcatcctcaagtttggtccaaaataaatgcttttcataatggaaaaggagttttcactctacaaattaacttgggaatgattgaaataaaaataaaaattattgagtttagtaaattttgtatattttttaaatcaacaattaagattctatttaaaagcaacaataatgtataacatttatctctataaatatataaatagatattgtcggttggcctaatctatctaaatggttttggtgtataactttatatgcaaaacatttatgatacattttattgcataattattttacaacgttgccttcatattataccaaaacataacttaaaaccattgggtatggtagattcttatttgttttaattttaatcaattcttttttttataatggcatacgttatagttatttaaaattatttgtaaattttttagaaaatttcgagtaatttataatattgaaataaaatttacatattttgttgtattcacgattattttttcttgtatgcgtggtaagtagttgtttaaattaatttttggcactgtaaattatttaaaatttnnnnnaatttacaaataattttaaataactaccatatacaattacaaaaataaattacacaaaaataattttctggatatcaaaataaataatctaccaaaacaatctcttaggagattagtgcaagttattggattaaactctaaaattattatgaaaataaacaaaaataaaaattaaaaaatccaagaagatatcttattaattttaacaactcatcatcatacctgtgaatattagtattactcatttatcaattataataaattatcattttttttttcttgaaaaattgctaaattatcattgttgtatgatagtcaatttactaacccttcaattatttatgaattgactttttaataacctttttaatgtaataaactatatggcttgaccaaatacaatgatgcaacaaatataagctgaaaaattaaattctaaattaatacacattgatcataatttaagtaccattaatagtaatattatctttttttttccttttctttcgaatataaggttgtttatctgctaaaaacactaagtttttcggtaagattaaattatgttcaaaatattgatctactttcttttctattttttgtcggtagtgctagccttgaacagcaatacacctaatactaatacgatatagcataataaattataaaagtttggaaaattttataatgcatccccttaaaaaaaaatatattgatacatttctatatccgaaataattttttagtcannttttttctcatggtcatgtaaattataattactttagatatcctgtaaaattttaagaaatttgaaaaaatttaacacgtcgaaaactgcattcaaatagtgtgttgtagacatgactattttattttatacacgtgtaaaataaactatttaaacattgtttcgaatttcttaaaatttgtagaatatcttaaatagttataacatacgtgaatataaaaaaaaataaaaaatagactaaaaattcttttagatattgaaacaagtagagaatgatcagtacattgctttgaatgagatgcattgtaaaatcaccctaaaattttattgtctaatttttcatatgttattaatattgtagtttatggatttattaaatatttttttaaaataaatgataatttttaatagaagaaaacctctaccttttctattttcctaaataaatacattttcctaataattttgttgctattttttatcgatatttctatatagttaaaacccaatggcttacaataaattataattaaaaaaagggtggttaagaggttaaaaaaagtagttgatgatgaatatggaatatgatgtttacatgtttccttcccaatccattagtctcaaattcaatcactataataatttaatacaatgactaatagtagcaccaaactaataaattactcaatcataacaatttatacaatatatatgttttatatactctattattattattaggaatatttgcgataaaattctcataacatttataattgttatacatatgatcttaataaaaaaatatagtgacaaaagaattttatcttacgattttattaccgttgtactatttttttatcattaagtgtcaacttaaaaacacgtgacaacatattattagactatgtattaaataagctaaaaaaatatgacagtatgcatttctgagttggtacttatcgagcttaattgacaatgatcaaaaaatagtacaacagcaacaaaatcataaaataagatatttttgctactatttttttttattaaagtcatatgtgtaacaatcataaatattaaaggatttcgtcacaaatatccctaattattattatcattattattattattattattagtacattatatttcaataatataaaattttcttaatttaatcattgatatatctaattgcatgttccactcggcgcaagattccttttcactgtcaaattaagtgttttctttttcttcctaaataatatatatcaataagaattgaataattttttaagaaaaaaaatgaataatttgttaattaatcaaatacgaaataaatcaattaaaatattgagaagcttacaaatattatcttttatttctcgtctttattatgaatttaaaatatatgtaacacattatgcactttagttttaaattagaatgtataataattaaacttggtgttataataatgttagttgtactaaattgtttggaataaaataaattataccaatcattgctagtatattttatatatttttagaggagttttgttttctaaaaaaagatttatgaaaatatttgttgttatatatatatatagatttttaaaaaattaaatttattttaaataatgtaaattatttataatttttaatatttttatatattatatataaaatatcgtaactacaataaataatgagataaagtaaataaaaattattcaacacgtttgggaacaattattataagaaaaatgttgaaatagtatgttgtgtaattcaccattttgagaaacaatcacatttagaaaataaatataaaactggacattatacttatagtgttattttttaaaaatattttatttaccattttataagataacaataaagaaaataatgagaaaattacactgtatacccactttattttatatattttaatttttacctttattttttatattttttaagatatactcacttttatagataatgtcctcattatgccccttaagttaaataaattatgtgttaaatttaagtgaaaagtaaagatatattgggtaatctatttataaaagtaggtatatttttataaaatataatataatagtattttttattaatataaacaaaaaaaaaaaaaagtattttttcaattgtttttttaaaaaaataacgagacatacatcaaagcaagaaatattattattattattattattattattattattaatgatttgtgtagtcaaataatgtccaataattattggaataagaaataatgttttctcttaaactacaatgaaatgaatatattttttatcatttaaatttttatattttgaacagaaattgggtgatcttctttatcttttaaacatataaaagtagaagattcacaatttctatttcattctcattttatttaacctcactttttttttctgaattattcttacacttcttaaattgactccactttttgatcttaaatacaattatacaagtcataatacaataaaaataagttaattaagatttctaccttttaaattttaacataaaaactttttttattgtaaaaaaattcttaaatataacaatctcattagttcaggagatttttaactactttaaaagtttaaaaagatataattttatatatctcaaagcttagagggtaaataatactaattagccataaaaatataccgtaaaagtaaactattatcattttttggactgaaccataataaaattttaaaaagttatgtagtagactcttaaaattcgttctaatagattctctatctattttagtgaaaatatttttaatctttttttttaattttttttttttttttgaaatatgtaaaccttcaaaattccttaaaaatttacaaattatcttataaaaaatctttccaaataggagtctaactttgactaaatccatagtcaacatgatttt

SEQ ID NO: 36587 - DNA, 4423 bp, Cannabis sativa
  modified_base (4377)..(4386): a, c, t, g, unknown or other
cttttgaatttgaaacttgcttgaattggactctttcgatttttttccttttttttttttaattttgttttcaattttttttttcatactttatatatatatatcaaacattttaatttttaaaataacactatttataaaattaaattatataagacattaattattgcaacaattaaaattatgatatatttttttttaaaaaaagcatatatattgtaacgaagtaaaaagtgtattgcatataacttcaacctagtataattttaatattaaataaagaaatctgaagagattagatttggattttaaaaaaaggataaacatgatatttatactggttggaccgctaatgaaacatattttcaatataatggatcatatctaagaataacttgcaaagctcaaattttattaagattttggcaaggtatgagcatagactaaaaatagattcccattacaagtgatgacctaataaccctatttataggcagctaagggcttagcactattagaaaaaaggattattaggggtctataacctaattctttgtaattagcataagttcatgaacaattcttgttgtggtacagttagttttattcgtgatgcggttatggttaatcttttttattaatgtcgagtgtgtagttaagtaaaatacattaacaaaattataatattcacacaacatcacatatataataattttttatacattattatattttatatatatattttaaaaacctattttcatatattagtattatacaattatatttagagattcaattaaaaactattaaagattgtggagatgttaaattatcatatcataataatagagtaaatctaaaggggagcttctaaaaatatatatatttttatatatattttatttataatttttcggtctaaagcttttatttacaaaagtatgtttataaagttttaaaattataagaatacactttactcagcaaaaagtaaaaagataacaagaaatcaatcttacgataattataaatcaactataaataaattataaaacaacaaaaaataactagaaaaataacatcataacaactataagtaaaccataaacaaccaaaaaaaatagtttatgttataattgaagaagtatttttataaagaatttcaaagagtaaaaataaattcttttttgtattagcgatttttgtaaaatttttcaaacttttggtctattatgtaaaacttttaaatctaaactcacatatcatctccaagttgaatcttatcaatgaattaagggctcgtttagtaggcgatataaatgtcgtattgtattaaataataaataacactatatttggataaagcaatgtattgtattaattattacgaccaattttttttttggtgaggggggtgcgaggtacctattcattgaaaggaaaaaatagcccaagaactacgagaaaacatgaaaaaagaaaataggccacgctatagccaatacagaaaacaaacaaaaacaccaaaggagaagaccaaaccagaaataaatacatacaataaaagcaacattaactcgggtcgagaaaccattccacatgatcagaaagcacgccttcatctattgaattcagagctatttcgccaacaacagagtagagccctgcctacttagcagaattatgggccatataattttgatttctcttaattttccttagcttggagctttcaagggagggaatagcacgtttgaatcgagttgaagcaccttccaacttagtggggcagttgtcattgtgtggattattaaagttggtgcattgtcacaaaaaaaaaatcactcttttgaagtgattcctcactgcatattcagcagtacacaccagcatgtgcgcttcggttagagctagattcgtggcggtaaaacgctatgagaaaattgcatgtatacggtccttactatctctaaacacggccgccccgaatgattgatctgagaaaatataaacatcagtacaacaaacaagccaaccagacggggggattatctgaaccgagtcctcatagatgtgtagttttcgacatgaaaggtggtcctggtaccgaaggcacactgctttaattgcctctgaacctgtaaaagatgggagacatgaacaacgttgttgtgcgctctccatataacttcaaaaatacataaggcttccagcataaagtcatcaaaaatgagattcaggggcccgttgcagatgcaacgaaaccaaagcatccaattaagccagttctcacactgaatgatatatgttctaattccccataagcttccaaaatagattgctttagcatacatacactcccaaaaaagatggaatgatgattccacacccccatcacatatggggtagtagatagacgggatggagatggccaaagttagcttatacctggtagggagggcattgctaagaatttgccaccagagtaacttgagtcgcgcatggaagggtgcattccatagtagtttccactgccagttggggtaatcgctgaaggcattcttctttactaggtggtacactgatttgatcaaaaataatccactctcctcacctagccaaagccacgaatctttctgttggtgggcaggaagaccaatattgaggatatgtttagcatctatcgcactgaaccattgtctaactcggtcttcattccaagtgaggtgtcattaataaagtagtgcacaaggttcgccccttttgttgcatcctttagagggcgaggtttgtggtcacctgtaggtacccaagagtcaaactagatggaggtagatcttccatcccctatcttcttacagataccttcatttcgaagcgttttagatttcaacatccctttccacagccttgaatcagtaggtttaatctcgacgtcaaaaaagcttgctcctttcaagtatttttcctctatgattatactccaaagactagaggaatctgtgattattttccagctccacttgaaaaggaaggcgctattaatgtctgacttgacagaatccgtgacccccattaaactttgacttacagagagtactccaagctatggtatagatagatttttttgtgtcttgatcaccccactagaaatttctgagacatttatcaatctttgttgcaatcctgcacggaataacttcagaagcagtaacataaattgataaagatgcaccaactaactgaattaggtaggctctctgagccttggacagcagacgagacttctaaccatcaattctagctagaactttcttcacaaagaatttcatatcttgtgaacgattgattaaccgaaagagaaggaggcctaggtaagttacatctttcttcattttacacattcccagaatgtcagcaatatagtttgcacgatttttagacactcctttcgagaaaaaaactattgatttattgaaattcaccgcttgtcctgaccaagagcaataggtatggaggctatttaggaatgcctcaacttctttcacagttgcttatccgaacaacatgacatcatccgcaaacataaggtgtgttattggaggagccaatcttgacactttgaaactgcgaatcttacctttatgcatgtaatccaatatcaatcgagataacagatcgacaacgagcatgaaaagggccggcgatagatggtcgccctgcctgagcccacaggaaggggaaataactccttgcttagctccatttagaatcaagttcaacttcttagtatgaatgcagtatccatccaaggaaaggatccttggcaccatgaaattgaagagcttcacgcaaaatatcccaatccatcttatcgtaagccttttccatatccaacttaatcatcatgaagcctctagatcctttctttcttgccatggaatgaacaatttctcttgccatcgctgtgttttttgtaatagattgtccttttataaaagttgtttgagtaggggaaatgataaatggcagaatgtgtcagagtcatagagcaaggatcttagatatgcatttgtacaccacattgcacaaggcaatggggcgatagtcattgaccataatagggttctcctttttcagaattaggactatattcgtatcattgatgaagtatgacagctttgaagttgtgaagaaatgagtaaccaactctagcaaatcgtttctaatagtgtcccaatgagaacgaaagaaagccaccgacaagccatcgggacctggagctttgttaattcctatagaaatgagagcttgaaaaacttcttcctcattagtgatgtaagttgtattatttaatgttggaaattattttannnnnnnnnnctttctactcacaagtatgttgattaacaccctagat

SEQ ID NO: 36588 - DNA, 2002 bp, Cannabis sativa
tgtattttttgtaggctattgctgtagcttcatgcgtacgtgagtcttggcctgtactaatactgaccccctcttccttacggttgcattgggcttcagtaagtatctttctcaattttgcagtcagtaattgtgagggatagttgcctaagatgaatatactaatcggccttttctacagacaattcaacaatggctgaatattccatcatcagatatacttgtaggcaacctgtcattcctctattattattattattcttttatttcattttcatgtcattttgtattaggaacttgatatattgtgttatgttgtattaacaatcccaaaaaagtctgttatcaggttgttttgtcacaatgttctggatcaaacaagagtggattcacaatagtatcctcaagtaccaaagggactattcatctggacggtctatttaatataatctcctacgatgtagtccctaaactacaaaacttgctcatggcctcagagtttaaggtaggagtgatcaaattatcttgtaattttgtagtactgatgtacacattaagaaattatctaagacgaataaaaatgtttattatttatgttggtaatttacatagatttcactagctttacatcaaatgaagtgagtaggtagttatttggcctagtttgattatggttggatattgtgttacttacaaaaaatatagggctcaatcggtattaccaaacttgctgatttgatgagttgctatctttctttttcttattcaggttgtgattgcagatgagtctcactttctgaaaaatgcacaggcaaagaggacaactgcttctcttccagtcattaaggtctttccttcttgataattgatcactacttattaatttcatattgtttacaaactgataaactacgacggatgttgcaaactgttaactttactcttatcctaatcttgacattccagaaagctcagtatgcactattgcttagtggaactcctgctttgtctcgaccaattgaactattcaaacaggtatatcttgaatccccgataagcaattcattgaaaatgctcaagtatctttcagctatattagttattttgacaacttggtgccaattttacagttggaagcattatatcccgatgtatttaaaaatgttcacgagtatggtaatcgatattgcaagggtgtaagtaaaatgttatcattataagacctgctatatcatcttgattgtatcttttcctgtcttaattattttttgctactatttttcttttcaactggatgttgcagggagtatttggaatgtatcaaggtgcaagtaaccatgaagaattgcataatctgataaaggcaaccttgatgattcgtagacttaaaaaagatgttctttctgagctacctatgaagcgtaggcagcaggtgagtgtatatctgcaatgtttctgctagttgatgtatggtgtggcaagtgatgcttttgagatttggttggtcaacgaagtagatgcagttcgtattgtcatgcatcatactattgcaacattgctccctgtaattcgcgtgggagaagtgcatatggtccacctcgtgattatcattaaatattgacttaacccaaccacattcctcttcttttgtgtaaaataaactactattcagctctctaagaacttttgtgtgttaattaatatcaggtcttcctagatttagctgaaaaggacatgaagcaagttaacgccttatttcgtgaggtattttactcatcaatccttaggagatgttcaaattatatcagaattctcttttcttattgagaaaagaaagtataaatttttttatcttcttttttctagttggaggtattaaaaaggaaaatcaaggcctgcaattcaaaagaagaggtcgatacattgaagttttctgagaaaaatcttattaacaaggtgatcttttctactaatcatgctgataacataatgtcatctgtca

SEQ ID NO: 36589 - DNA, 6325 bp, Cannabis sativa
  modified_base (67)..(73): a, c, t, g, unknown or other
gtgaaccatgcaacataaaagcaatttctactctttattaatcagtaaatctgattatattgaaatnnnnnnnatttagggcacaaaacccagcacgagcttcatatcaatcttcataggctactaggagcagaatcatctgaccaaattatgaaatatgatacacgtgtttcctagtcagatgtcacgtcatagtgtaaaattaaaataacacgtgtatcacctatccagaaatgcagataacaaactctaacgaagactttaaaagtctcatatgtcactaacattcaaagttgaagaaaaatgtaatatcccaaaaaataatatggtatttaattgagcttattttattaaatgtgtaattctcttgataatgaagtaagatgatgatcttacttaagctaattagtgtgaatttaataaatgattaaataaaacgtaatttattaattacagagatttttttgaattatgtgggtaccgtagataccatttttgaaataaaatgttttcgggcccgacgaccatgggagcacggtggagtggtcaggaatgtcacgataataaagtatagattgaattggaattataccagactagtttagaatattaagttgtcgagttagcggattagttaagaattacctaaattacccctaggttatgttttggtttaagtgtagtattgagggcaaaatggtaaatgtgctaagtttgactttagggttttaattattgtttaggtattattttgttagttaaaattgtatattattaatattattaagttagatatacatgagattaaaattaaaagcctagaggaaaaaaattataaacggatcaccattctctctcctctttttcagctaaagggaaccagttgaacgccaaggatagaatctatagcactaggtgttagccaagttgaggtaagttcttggtacaatttcctttgatttttcataagttttaagttgattttggttagggttttatggtttcagggatgtgatgttaatttgagtttagattgtgtttataggtttgttttagggtatgcctgagcttaagttaggtgatttaagtggttgatagagttggagttagcaattttagtttaggaacttgattttggctctaacttgaaattttgtgtgatttgataaattatggtgttttgatgcattgaatatgttgtatttatggtactataatgttctggaactgttggacaggttcgggagggttttggttcgagtttggggagaaaaacctaaggatttgtggcctaccaaaaccggtcgacaggttggttctggtgcaacaaaactagtcgaccggttgtcctgcaagggaaattcttgggttttcctcaagatcatttttggcttggggcggtacttagtatctaatttaaggttatttaggtgtcatatggcctattttggagttattggaggttagggtttgtccaaatacgagaattagggtttgttctcaaaattttagtttaagatatttattgaattttgttgccgtgacataggacccgggatcgtcaagctttgtttccactcaggtcggcccgcacgcctgatactgcattgaggtaagaaaactgttacgcaccgctgaatggttaattaagaagcgattatgattgttatagtctcgattatgatcgatatcttgttatgtgtttgttgtgcctcgattatgatcgagggttggaaatagtcattaccattatgagtaattactcgctgaaatcgcagatagatttcttacttattgttcgctttatcgggcaacgatagtgacatacatagctcatggataacgtgcggtaagtgtgctttatgaagcactgagattatgtgaatatgaggtgtgattgtataagcatgttgtattatgattgcatacattttatcacagtataattacttgaatttagtcacttttcttgctgattctctgtgactctcgggtgcttaatggtgcaggtgaagggaaggtaaagccgagcaaccatgagtttgaagcttctgcagcaatgtacatatcagtcgcggtgccacagctttggtggacagaatccaccctttttggatgtattttgaagcgtgatcttattttgtaaaattacttttaaaacagattgtaaaagtttttaacacagggggtcctcgtatttaccaatagtcatcttttatcaaatttatgtacttgacttgattaaagttttaattacaccactttttataaactacttttataaaaatagtaaaagattaattttgtaaaagcacacacgtagcgtccatgtggggcagggcgttacaaaaaatatttaacatgggcacaatcttattaatgcaaagttcaataagcaaaatacatatttatttcatttttaattactttggtatagatatgctacttaacaaataggtaagttagtaaaaagaaaaatagctaagaaattaattgttactacaaataaatttatttattactttatttataaaatataaattaaataaacagcataagggtccatagctcagtggtagagcatttgactgcagatcaagaggtcaccggttcgaacccggttgggcccttcaattttttttcttaaaaatacattaatcataaaatgagttattgataattgccaaaagttagttacaccgaagtttgagttctgcaacttagcttcttaaattttgaaaattacgaatttatataaataaataattagataaatgttagctaacacgttattggctcattaccatgtgaaattggtggacatcccttcaaacttcaatacaaaagttttgtttaaatgcagttaacatagcaattggaactaccaatttcaatacaaaaagttgtctgatttgataattatcattttacaaacatgttaaaatgtatgtggctcattacttatcagcatgcgagtgatagaagcacaaagcaattgaaatagcacacttggaaacaaccaatttccataaaaataacagacagccatgatgagcaagggagctttacaaaaattacaagaagaagaacaccatcaataacatcatcccataacccttttcaatgtaacattctaaacaaaagttgaatcctttacaaaaatataatctgtttctgttactcccatgaaacaggccaggcagcagcagcaacaacaacaaaccatttgcaaatcctgtcgtaaacaataattttccccgactcaacccaacccgacccaccccaccaacccatggccttgccaactcatccacccaataccaataatgttacgtagcaaaagaatatgcttcaagatataacaaatgaaccagttcataatgccatagaagataacccattaaccatcaccactaccactaccaccacccatttctaaatgtaattctgagctgctttgattttcgacaatattagaaactctgatcaatttgctcgactcgaatacaaagacgatgcctgtacgcaatctggtgctcgtcttcttcaacaaaagaacaattttttaaaataaaattttgtttttgacctttcattgttttggtggtcaagcagtttaatattttttactttcgaggacagaaccctctttgagggctacttgtgcctcattttcctttccttgagccaaaagcgatgcagcttgcaagtaggatgcaatatgccaaactggagaaattacttgggcttgaattgcatcattcaaggcttcttgtggcatttcacttatgagataagacaagctacgccgtgcataaactgttggagataccatagttccaccctctatgaactgcaagtcaaacaaaaaattccatctgtgaggacatttcaaggtaaactaaaacctcattggtgaatgaaattgtaaggtacatgggacacataccacctccatcaaatatagactaggatttagcaatcatattatactatcattcaaaataagtaaccacttcaaaatgttcctttaaaatttgagttcatataatgaggaaaagacaacggcaaggctgtataatataagggctggcaattggagtacgtaatgctttaagtgagaaaatagtggccatcccctaatgcttaaagttagagttcgaatcataccggttgcacccaaaccagttcatgtgaattcaatcgtaccattctcacacaacatttgttcttactttgtcatgtataccactaatgtatatttgtaaagataatcaagttcccaaaatttcagacatagcagatctatcaggtattaatcatgccttatcaggtgaataactttttatggtgaaataatctttaccacggtgtagcactcaatggcagctttaaaatctttatgccgaaaagccacatcacccttcttctttgagtttaatgtctcctgcatctggttggtccacatctggaaggaaagctacaggtaaaaaaaacaaaatagcaattagcttttgcaatcataagaaatcaatagcataatatgaattaattgaagagggtaaaacacgttgcttgctagtttatttaccgccactctaaagtacatatgttaagtcccaagggcacttaatttaccatcccctaatgactatataacttttgctaaattacaaatcaagaatcatagttgtaggttaaactgccagaatggtgcatgtattatgatattagaatgtgattctatgatagtaatacaacaaaacaaacatcattacaaaattaatcatgaaaataaattttcattatttttcgaacatgcaccaaatatcctatgttaaatgataagatccttctgtcgttagttctgttctgatgtattgaaaacatacctcagttgctgcaccttcatcatccttgtatccaagcttttctaggatctcatgtatagctgtcaaatccattctaacacatgcttcaccaagtggtgaaagaggtaaggcagcaccattctgagggatccccattaattcatgcgacggaacctgcccaaaattttaccacagctcattcaagatattgtaaaagtagtattcaaattggatactgtccgcaatgacacaaagagagcaacatgcctataaatgatagaacagatattttctgacgttgaaaacttaagcaccagatagactcctatataacatcttggtacttacagttgactacattaacaaaataatataaattctaataggttaagcaagtaaggaaaatttctgaagacagttatctaaaaaattgtctgataacatgaaaaggcaaaactaacctcagtgtccttctgaagaggatctagagcagtaaccaatgatttcggattaggacgttctctgggttcatattgtaggcaacgcgaagctaaacgtactaactctgttccctcatcatttgaaaactggccttctaaacaagaatccgttagcatctgaagattcctgtcgcgtattaggtcgagggcctgaaatttatttaaattaaaataaatatattataaggagatttaaatggaaattagagttgcatgtctcggaaaaactaaaccagaaaatgagctcagtatataagagagctaaaagaaatttagcatggtataaaaggcatataaccatttatttatttgcactaggaatactttttattgttaatgagacttacatggcttggaggaatatgtttaccgctgagaaggtcaagcaaaagagtgccaaaactatacattacactttctggagtaactcttcctgcagagaatcatataaatagtatttagacatatagaatgaaaattatcatgcacaaaaacacaagataaaaataattttatacagaacagagaatatccgtggagagcagagaatcagaagcaacaaagataatgttgtatgagactaccaaatgaagaataatgattggatagaaagaaaaatcacagcaataacatatgtgaattacattattttgcattgtgctttagcttaaagagaggaaaacataaaccactttgttaagagagagaaagggagagagaaaccaatgagaaggaattacagaaattttatagccaaccagccatggcatatttcaaaaagtagacccaacaacgcagtaacatcataccatataaagaaaacaaaagaaatggttataccaacagaatatgctcacaagaaatcatcacatgataaacacttcataaaaacatgtcagaaagttaaggtcaactgccacatacattaattcactcaaatacatcacactatta

SEQ ID NO: 36590 - DNA, 1533 bp, Cannabis sativa
acgagagagcgaggacgaagagaggaggggtggggatggttgctcgttgttcgaacagagcgaggagggagaaggaggaggtggcggtgattgcgcttgattgagagagtcaagaaagagagatacccttcacgctccgtttcaatttttggacgctttcaatttttggcttgtgattgttttacaccgtcataaatactaaacagctgtataaaaccgtcgaaaatactcaattatagccgatagttttaaatagtaattttttatattagcgatggtctttgaaagaaaaataaattaaaaaccgacgagaataatgctttttgtagtagtgtgatagagttagacataatcagtgataatataacaatacactcttttagaaaatagagattctaaaaatatataatataaagaatattgctattaagaattgacactatatatttaataccatcacaaaataatgttttgtgaatagttaataattttttataaatatatgagattgatacttatttacatcataatggataccctatatttcttaattataaactataatttataaatattacttaatagagaggttgagggccggctgagattgaaagttttgacttcatataagatcaagtcaaatagttaggccaaggaacttgttaatttcataacctcttaaactataacattacaatagtaattaaatttcataatcaagtacattagtctctataaatagcctaagaaacaacctttatatacataaaacaccgattaattttcattttttctcttctagttcttttttccatagaaaaaaaaaatgaattctattgtaggtgaaaatcattcgcatgaaattccagttatagatttttcgaacaaagagttgaaaccgggttcacacgtgtggtcttccacgtgtgaggaaatccgacatggtttagaagagtatggttgtttcgtggcaaaatataattattatgaaacacaaatattttctcaatcaaaagatcttttcgatctaccggtagagacgaaaatgaagaatgttagtgaagaaccctttcgcgggtatcttggtaagaagcctcaaattccactctatgagggtttagctattaacaaagttacaagtttggaggaaattaagaagtttgccaatcttatgtggttagatgggaatgatcaattttggtaagtacttccctataaatagatattatattaaattgataattttgattttaaagtcatatccttatggatactattagtacttttataacaagagtaatttaggatataaatatctaagtttaactttcagttataaataaatatttaaatttaattgttgatagtattaatacctaaattatatatttctaaaattttcgtaagtactcaataaatttttattttttatttaaaaattaatgtaaatatagcaataaaaaaaataatacataaataattatttgacatttaatagttaagtacttacagaagtttcagaaatataactta

SEQ ID NO: 36591 - DNA, 6564 bp, Cannabis sativa
ctacaagttgaatttattttaatatatttcacaaattctcttgtagtcaatattttacttcgattaagagggatcacttagtaacaaattcataaattagattacatattaaaaatataattaatatactttgggttggggggttaagcccaccctcagtgtacctccgcctctgagtatcaaatagaactaaaacgataaagagaaaattagcatgacctctacacaaggataacacgcacaaatcaagaaattatttaaattttatttttaatgccgtaaaatttttaaaaactttgcaaaattaataagaaacatgctatagttacaatgatttccacataaaaaattaaattataatttttactcatactaaaaataaaaaatttctctagataacaaaaatgatatcttcactatattttatcttaaatttattatatatgtagcaggaattttaatttaatttattaattaataatgagccattcaacaataataataaataatagttctacctttaaaactataattgtcgagttttattatcttattttttttatcgtgaaagtttcctccaaactatacaaatcgttgtaaatatatttctctccagttacatttttttttttttttaaaaataaattacttatgtaactatgagttatacataattgcactataaggatttatttaataactttaagttaatttataaaaattaagtttattgacattaaacatacaaataataactctaaaaataaacatacatatattttcataatttatcattaaactataattatgtgtagtctcatttgatatatttattaaatcgtattgtattgtattatattaaattgagttaaatgatatatttttatataatattatgttaaattttaatttatactaaaatatttgaactctatgtatttatttttttatttgaactcttaaatttatctagattaatgttatgtataaataaattatttaaataaatggtcaaaacagaaattatatttgtaataatttttataattcgaaatgaatttttacaataaaagataaaactctaatgataatacttcacgaataaataataataataataataagccttggttcatacatggacaagtatggaaatcgggttgtgtcggacaaaaattgtaagagggaagagaaatgggatatgtcagtatgacaaggcgttgcatgtcaaacccataaaggattagtcctattctaatggatatgacggtgttccttatttcatcgaaacttctcgcatagtaaaatgtatggatatttctaaaccaaataataataataataataaaaagataagtttaagatgagttgtatttacatttaaaacaataattaaaatgtattctactttttttttttttacacaaaattagtgatttgctctatttttatgatatatagttgtgaaactatatctgtatatcaattataatttaaattatcaaatatgccattttaattaaatagacacctcattaatttttgatctatttaaaagaacaaaattcaaattcaaaacttttattgcaggtaatctgtactagaaatttttctgtttttttatttatatatagatatattatatttatatgttgtgaatattgaaaaatgaagcatggaattcattttcattttcaaacacacctgcactacaatgagatgcttcttattatttttttttaaagaaatgttgtaatactatattaatgatattggcataatattgtgtggtataatattggtataataacctcgaggttttatggtccaaagactttatatgcgagtgacaatagagagcccacaagtccatgtgttaagaaagtgaacagtcagtatgcaacttccaaagtcgcatacgttcggatattaactaagaacatttgaaattgttctctcatttattctgtaaatattttctgccttaattaaatataattaattttgtaacggtcctgtctaatcgattatgtaatccaaaagataacttggtttctatataaaagagtgatccaaccggaagtaggatctaatcacaaatatcttgctaaagtggactaagcagactaagctctgactgaactactataattatgtgtctcctttacgtatactatgttttcgttctgctattcgttattttattttgagtatttgccactctaagtgaatactcgcaattctgtaagtgagtgttcttgttcatctcgaatactcatgatttctagtgttgatgtctattttcctccgataatatttttaaacccaaaagaagatttatcatatataagagtattattatacgcgtcagaaatactaaaaaaagaagattttaagaaagtgttaatttcatcatgaacaatatgattggaaaggaataagaaaacccgtgaagtgctataagtaccccacaccaagttaagatatgaatctcctcctattataatgaactatgttgggaaagaaaacaaactaagaaaggaatttaagatcaccacactagtgagcaaagtaatgaaaaggcaaaaattcatagttaaactttatgtgaattcagcgatatcaactcctcaaaatgtgatcaaattttgagcatctattttctcatcagattaacaaatgaaggtggtcttatccgaaccactataaggtaaatcattctagtacaataggtttagctccattgtagttgtatttggtgttacgaatcttttgaggcttttgatttttatctagttaggcttcaataaaatttaaatagttttttgataaaattaaaagaattatattatccatttcaacttgatggaattttaatattttatactatatttaatcattttaaatgttatcattaagaagtttaggtgaagagtcaaaccaaaatagtatgcctttaattattaactctattataattatacgttataatgattaaggaggtgaaaataaaaagttcttattgtcttaactatttttttgcatattctttttcaaatttccaagcaaaatcagttgttctattggtaggattgcatttgactcaagatgtgggagtttcaattgaaagggtcttctcagattcatatcgttggtcttagttttcgagagtcaggcagagtatttgaatgaattcgggattatctttttttttttctttttttttttatattaaaattatattatatagctttcatggggtgtctctctctcatattagtcacaactttaatgttgaggctcatagattggctaaccatgctcttaagatagataataaattttcttagatagaagaaactcccacctcttgtgtaatttttattaccattgtaattaacctttcaccggtttaccgctaaaaaatatatatgtattttgatacaacataaaggtgtaattttatgagaaattagaaagtcataaagatttatgaattctttaattcatatataattccaaaagagaagagagtgataatcattaacgactcattttgtacgtcatgtcatattgtattgtattgtgttgtataatattaagttggattgtagtaatgttatttaatattatatactatgtttgatattgacttgattgatattttgaaattatattatatttaccataaactcgacccttgctccaatccccatcctgggtcaggatcagggtctgagtgtgaggtttgggatcgggtccgggtccgagattttaggtcgggatccaagaccaagtgggatctgggtttgaggtccaggtcggggcccaggtctgaggttcgggatcgggtctgggttcagagctatgtcggggtcctggttcgggttggggtctataggttggcgtccgggtctagggccgcagtccgggtctgaggtctcgggccaagtctggggtccaagtctgaggtccgggtctaggtccagggcccgagttcggggtccggggttggggccagggtccgggtctggatccggggtttgggtcagtcatttgagtttggggtcgagattcccaacctcagaccttttgtaaatattataatacaaattaatacagattatttgttatgtattaaataatacgattcacatatattgtattaaaatttatgatcataataattaatattatttaatattttatctaaacttagtgttgtttgttatttaatatacaatacttttataaagcctactaaataagccctaaaataactagtttttttctttttttttttaattaaccctaaaataactagttactaagtagggcatgggtccatcttagtgttggaggttaggctggcaatcagtagactcacagatcaatcacttattttctgaaagccaaaatatagctaaaatacacaacaatatgaacaaaagaaagaaagaccctttttgaatttttttataggttccctcatccaatattttgatcacataaaagaatttaaatataattagtgatgctttctttatcgtcatgcttgacgctgttttgtatatttattaatatataaaaatatacgaatattaatattacaatatatatagagagagagatgacataaacgttaatataaggcaatactttaatgacaccaagagaataacgattaattagatcacggcattatatagtttattgctaaggtctgaatcaatattactttttatctttgctagctaccaaagattatatatgtatgtatgtacaaaaatattacttttatcatttttttatatttgatcaaaatatcatatacatgcatgattccaatattctaataacttattgcacccaactactatagattcgttttaaaatattcttatcttgtataactgcaattatggaatctattagtatatccaatacgcaattttctaggttcttttcctaatttatgagcgtttataaaggcacataaatataaactaataataataatattttttgtttgagcattgttagtaggtactagtagtgcgattgactagcgatattctttaaaaactattttattatactatataggacacgataattaattagatcaatagcaatattgacacgtaggagggtgcttggcaccactggtggcttttagcatttctctttttgttttgatcatatgcaaatgacgcgctcttttaattattgtttttttttttcattttagcgtttataaaacaatattgacacgtaagaggatatttggcaccactggtgacttttagcatttctctttttattttgatcatatgcaaatggcgcgctcttttttaattatttttttcttttttatttaagcgtttatatattatattgtataacctgggactcgaacccagaacgtccaacatacacgcaccctttaagagcgcggtcttttaattagaaccatacgtaaccaatcaaaattgaaaacagaagaactagacatacatatatgtagtcaaaaatcaagtagtgcggtgtcttttattaacaatttcttttgtgttgattgttaatcacaaaatcaatatcagtacctttcaagcatgccaatctttcgagtggtaagtaaaaatgcgattatatatattaatatacaaaaaatatctaaagcatatatatatatatatttctatatatatactgtacaaaaattattgtgggcatttaaaaaaatgcaacgacctaccggtgtagccaaaagtcagtgactgaaatttgcataatcgaagccgttttgcgatcgagagttcttttcattgccctctaaaggccaaatttgagagatagcgatataaaaattccagtgtacagaattatatgcaatgtcattctttcgttcttaacctaaaaatatatatttatatataatccatgggtattaataataatggctttttcatcaaccaaaagccactgataaagagagattaattcagtcgttgaccgatccatatgccatgtaaaaggaaaaaaatacatttactggcctttaaatttaagatttttatgttttacatacgcacattataactttgaaaaaaaaaaacatgatgtgaatacatagtaatgttactatcattatttttttctttgaaacaaagtaagaagataaaactattaattgtttggataagtattaagagtagtactggtagaagtgtatagaaccataataaaaagatcgaagatgaaaagtacacggaaccaacagtaggagtagtacaataagttaactacttttagtttcgagtcaaaattacatttaatttgaatgacatttgtatttattgtaaaagtaacatttacttgtttcgttttgtgccagcttacacatgtaagtgttagaaactgattatcagttattctgtttaggctttagtttagttagttaattcctagctaattctggtttagcttctttggtctttgtataaaagggctttcttgccctctttcattttgcaacaatttcatttttacggtaataaaata

SEQ ID NO: 36592 - DNA, 7653 bp, Cannabis sativa
ttcgaccttgcacttacatgaacactatattccgaaacggttcgtgcacttgcgagtataaatattaaaacactcacttttgagaacaacaatatgccatgtcgaaacctattttaccaccgccacttacaaaatgatacatactatgaatatagaatttttagatatttattaattatatttttataattaacatattaatttattttatattagtattatactattatattttctaatatattattaattaaatacttcctgcatttaaatcataacacacatcatcttttgtacctgaaatcgtataaaactaaaaaataagaaagaaaaagtattaaaaagaactctatacatgtacaatattaatgtatattaattaaattgtcctaatgctaattttttttagaatacttgttactcttggtgtgtttggtagttgagacttttgttaaaaaaataaaaaaacaacactactagtactctacatctaatttccgccatttaaagtagacatatttaaaataaaaataaaatttagcacgctcggtgggactcgaacccacaatcgtttgattagaagtcaaacgccttatccattaggccacgagcgctttgcatgtcttattgtgcttcaaatatatacttattcaacacataacgtttttgggtttttaaaacggccagaacgtaaagcatcatcttttgaattttccatgaaacaaaactaagctcgccatgagtgtcttacccagactccactccactacttacaagctccatcgttttggcttctcaagcttgtttcgggttgacccactttcaagcattgctagatcatataagtctaagaaacccctggagaccaacgtgaagaaacaaacggaaagcagtaccattgcgtcgctattcaatgagattactgagattttaggcgccgattacttcattgcggatgggaactcttatgggtttttgatatccgctgaaaactatgggagagatgatgtggttagtgaaaagagcttgccttgcgctccaactgtttgtggaaatggtgaggagagtttattgcaggaaaaggatgatacgttgattttgggagatacccagttgggtgtgattgatgttagtccggttgttcatgaggttacacagattattcgtgctgaaaatggtttggtttcaatggaaaatcggttagaaaagttgggttttgagttaaatccggagattgttgggaaagtgttgaaaaggtgctttaaagtgccacatttagctctgagattctttaactggatgaagcttaaagatggttttgatcatactcttgaaacttataataccatgttgtatatagctggggaagctaaagagtttggattgatggaaacactggtggaggaaatgggggaggtttcttgtcatatggatctcaagacttggactattctcatctcacattacgggaaggccaagaggattggcaaagccttgttggtttataataaaatgataaaaacaggacatgaaccagatgaggtggtttacaagatgatgataagatcactttgtgtggctgggaaagcagatattgcaatagaattttacaaggaaattgttaagaaggagatagaacttgacctgagcttgtataagatgctcttgagttgcttggcaagatcaggagatactgctggtgttcatttagttgcagaggacatgatgaaaatttcccagattccagatcaaattgtttatggttgtgttcttaagagtttctgcttatcagggaggataagagatgctttggaatatataagagacctcaaagataaagaggtcacatttggccgtgaatactttgagactttagttaaaggattgtgtagggccaataggattggagacgctttggaaatttttgaaattatgaaaatgaaacagcttgttgatgaaaaggtttatggagttattatcaatggatacttaagagtgaatgatatttctaaagcccttgatgtgttccaaagcatgaaagaatctgggtattgtccaacaacttccacttacactgagttaatgcaacacctcttcagattgaatcagtacgagaagggttgcaggttgtacgatgagatgctcaatgtaggactgcagcctgatagtgtggcaataacagcaatggttgcaggtcatgttcgtgagaatcgtatatctgaagcatggaaagcttttgagagtatggaagacaaaggcatcagtcccacttggaaatcatactcaatatttatcaaggagttgtgtagaatttctagcacagatgaagttcttaaggttttgaacaaaatgcaagcttctgagatagtcattggggatgaaatattccaatgtgtaatatctcatatggagagaaagggagagagaaataatattgagaaagtaaaacagatacagggaacctgtaaagttgatgctgagagcaagaaatctactgatgatacatctgtggaatggggagccaatatggatttgattcacaagacagagccaaagatcgcagatttgtatcgattggagccactttcaaaagtttataatgagagagatttggaggaaatttgtagaattttgtcactgtcattagattggtccttaattcaagaaactttggagaagtccactgtaaaattgacgccggaacttgttgtggaggtgttgaggaattgtaacacgaatggttatgctgcatttcagttcttctcatgggtaggaaagcaagctgactacaaccacactgcagaaacttacaacatggccattaaacttgcaggacgtgggaaagattttaggcacatgaagagtcttttctatgagatgagaagaaaaggttatgcagtaacatcagatacatggacaatcatgatcatgctatatggtcgaataggcttaaccgagattgctctgaacacttttgctgagatgaaagctaacaattgtaacccaaccgccaatacctacaaatacttgatcatatctctttgtggaaggaaaggtaggaaggtaattgaagccatacaattatttaatgcaatgattcgcgatggacacatcccagacaaggaattagttgaaagttaccttgcttgtttatgtgaagttgacaaacttttggaagctaggaaatgtgtggattctcttcataaggctggtttcacagttgccctcagttactccttgtacatcagggctctttgccgagctggaaagatagaagaagctttggctatggtggatgagatgggaacagatagagcaacactagatcagtttacttatggaagtatctttcatggactattgaggaaggggcgagttgaagaagcactcgaaaagatgggttcgatgaagcaggctggtgtaaacccgactgttcatgtttacacatccttgatagttcatttcttaaaagaaaaacatatagaaaaagctttggaaactcttggaaagatgagagaagagggttgtgaaccaactattgttacttattcagctttcattcggggatatatcgcctcggggaatgtttgtgaggcttggaatgtgttctatcttctgaaacttaaagggccttcccctgacttcaaaacatattcaatgttcatccattgtctttgtaaggtggggaaatctgaagaagctctaaggcttttagatgaaatgttgagtagtggcattgttccaagtactgttaattttagaacaattttttatggcctgaacagggaaggcaagcagagtttggcgcagactgttgtgcaacaaaaacaagctttaataagaagtcgcaaattaatgacataattttatttttgttcttgttaaatgtttcaagcaacaattttatttttgtttttcttatagaagaaaaccactagtaaccaatagcaatactcgacgttaaaccgtcatttataatatgtgtagccagagaaataagccaaggtaaattgcaatacacgaagctttaaaaccttttctttttttttttcgaggaaatgtggctttgaactcttcaaacttaataaaataattgttttttttaatctatttaacaatcaaattttattcttacaagccttgatatatgttatgtgatgatattgataatttttcaacctgcgtctctgcctttgtaggaggaacataaattacatagtgtaagactgaacaagaaatcagctaggctaaatttcgtcttctttctttctttcttttggagcctcaaatggataataatttgaactctacctaaaaaaaaaaaaagaccatattagattaaagtgaaatacagcttatatttatcataactggaatgaaaagaatattcagaagttgctgctggcaccattattaaatcaaatatgaacaaatcagttacaccttccacatctttctatttttactctccccaaaatagtaatggccagtttagcaatcataaaaagtaaactagaactgatgagacaagttttgatcactgaaagtggaacaaaaaataaacttaccaagtgataaactggtagcagcatgagaaacagcaaagcttacgtgttgagcacgaggccagtaaagagtctgaaaatgatttggttggttagatatatgtgaactgaagatttgactccatagtaacaagaaggtgagacatacatgctactttcaagtatcgatagagaaggacacgaaagcggcaaaatcactatttctattcttattcgcacaatagagattagtcagaaaagcatattatccacagtagcgcagcaatgtgtagcaaagattagtcaacaataaacaatatttgaataccttaatttaaagctttctcacaatttcttcaataacacgctcataatatctcattctccttatagtgttcacagcttctccaaagttccgaccatgatatgcatttgtaaacaaactggacaagtgttttagttccttttgcatctggacaaacataaactcggtaaagaaatgacaaggtatagtgatttcacaaatgtagaccaatgaaacggttttagaaataatatgctgggatttctagttctaaacgtgaccaaacaggttcatagaaaaaggctcagtggcttacatcagcacatatatacatacatacatatgtgtacacatatatgtgccattcacttgacataaatgagcaactacttttcaatttttcaatgcatagtaattgaatatagtgatattcaaatttcagaaaaggaatgaggaacagtttagagaagtgccccagaatctagcatatgagaaatgaattatatcctagaacaaaattactctactccttcctgctactttcagagtggcaagaatgttaaaatgaaggctcactgtacctcagatcgaattttatttaaagcctgagagtcagcagcctcttcgacagattccctgatttccattatctgcattttgaattcaggttaataagattacttctaatttttcatcatattcttagtaatacaaaacatcgaaaatccctgtactagactagtaagtaaataagaaaattttacgcaacctcgattcctttgtagtcttacactttatggaacaacagaatcactctctttagtatatatatttcttaatatgaaattctaaatatgaattaaattccattgcattgggcaaacatgccataccaacttacctcagcaagcaaatcaggttctgaaatagtttcttcttcatcaacatttagaccttcaagttttagctgtcacaaaaatagccaactttagttttcatgaacttgtacatgatttggttcacacacacaaacacagaaaaaaaaaaaacagagcccgtgaggcaaacaaaaacactataaaggtccttctaaaagtaaatcatgggatctcctccaacccctcagtttgagttttcaatagaagcttttacacaagaaaaataggacatgaaaggacatatttcatataaactctcatatagtctaataaaatggataaaaattggaaagacagaacacttacaacatagattgcccttgacaaaggcttgcttagagtgcggtatgcatcaatcacccgagcagactgttcagcagcatattctcgttctttctaacaaaataccagaaagatcaacaaggagcaatatttgtcatattaacagtctcaaagtgtaacattatagaggacaaacctctgattttgaatgcactaaatcagggtgcaattgcttttgccagtctttgtacttcctctccaaattgtgaacttcaatatcatactttttctccctaattaccaaaaacaaaagaagctccaaaatgattacagcaacttaaaactatatacttcctaatgacagtaaataaatttatcagctttaatctaatttcataactcagcctattacaaaagtttgagcttgaaattttatataatccttgcgtgttcaatcttatttttttcaacctacaaactagaaaaaggctaagaaaatttccaaaaagataaaaaaataacttaatgcttgcttactacgaaaccaaatctgaaacccaacttcaaaacattcaactaaaaaaaaagaatttgattgacttacaatccaaatatttgaaagtaatcgaccgagtgatccatgggttgaatgcaccgacaagactgacacacaagaaacggcgccgcttcagccttcgcattacagttccaacatttagcgaggacatccgaggtcgattgggaagaaataaaattaatcccagaaattctgcgcccaagaaaatcgaatccaggagtagggaagagcctgtgattctccgagaaagtgggaggtgaggatgataagaatgaaggtcgagatggagatttggctgcgaagtcgaattggtgattagggttgggagaaagggttcgccggagaatggcggtggaggagagaaggttccgcagctgtgatctcgtcatcaccggaaatgtacggttttgttttccgtgaacttaccgtgtacactagacaaaccgccactttgcctttgctcgtataaccgattctttttttatcttcaaaattttaaaatggctaattaagatttacatatacttccttcaaaaaaaagaaaaaagatttacatatactaaatcttaccttccaaattttttaacggattaaaatttcttctaaattattaaattcaattttattaacgtggcaattatcaaagggttaattaaaaaaaatacttcaattaaccaaatttacaactaattcatatttaattaaaatatatttcgttttatatgaagagtatattgaagtgacagggtcaaaattagtaaagtatttaaaaaaatatggcaaaattgaaagtagacaatataaaaagagtataaagtctaatttcctcaattatcaatgtatccagggtcgtccttaagttgaaatgagtcataggtaaaaaaaaaaaaattaggcttgtattataaagatagaaaaattctacaatgcacccccttaaaatggatatattgatgcacccatatctgttttagcatccgaaataattttttctcatggtcatgtacg

SEQ ID NO: 36593 - DNA, 4404 bp, Cannabis sativa
tttaccagttgcgtttttcttcttctccttcttcaatggacctctcgaagaaacgcaagatagaggagaacggcgtcgtatcaggcgaagtacacgactcctcctccaattcaaaactctcccctcacgacgctcgcaaaatcatcgaccgattcactcccgaccaactcctcgatattctccaagaagcaatgattcgccaccccgatgttctcgaatccgttcgttccatcgccgattccgatacttctcagcgcaagctttttattagaggtcttggttgggacaccacaaccgatggccttcgttctctcttctccgcttacggtgagttagaagaagctgttgttattctcgataaaaccactggaaagagtaaaggatatggattcgttacttttaggcacgttgatggcgcttttcttgctcttaaagaacctagtaagaagatcgatggacgtatgacggtgactcagctagcggcggctggtaattcaggtacgaacaccactgcgcctgtttctgttgctgatgtttcgcttaggaagatttacgtagctaatgtgccttatgaaatggcttcggataagcttttagctcattttgctttgtatggtgagattgaggaaggtccgttagggtttgataagcagactggtaagtgtagaggctatgctttgtttgtttacaagactccggagggagctcaggcggcgttagtggatccggttaagactattgaaggaagacagcttaattgtaaattggctattgatgggaagaaagggaagcaaggtggtggtggtggtgggtctggttcagatgggaatcagtcttcgatggggggtggtggtggtggtggacattcagggaatgcttcggctcatcaacctggtggtggtcaattttctgggccaggaggaatgggatcttacgctggcttttctgggcctccttctatgggtcatcatcatcataataatccagtgggaatgtctgcagtgggtaatcaagcggcgtcgtctttaggtggttctgggggtggatatggtggcccttttagtggttatggtggaggacctggttctgccggttatggtggattaggaggtggtccgggtggtgttggtggtggtgcttcgtctatgtatagattacctcctaattcaggtggagggccttccggtgggtatccagagagtggtcattatgggttatcatcttcttctgcttatccaggtcaacaccatcaccaatcgggaacttctcctttgccaaggggtcctccaggaggaatgtacccaccaccgccttattattaaggtattgttacggtttaatttgctctgtatggcttacttatttagttgcttgtctttttgattttgtttattttaatatggtttagttctatgtggctttcacatgtttttgcattctgggtgattgaaagttttgcattttgtggttgactactctattggtagtttatattcttacatgtgatttggattttatttaatgtatgttactctttgtttattcatgatgtactagtatgtgttgtatatatggatgctcaactttatgcactgtcttgttctatggatatgttataattgatcaagtttggtttgatatgctatttatttttcattacttgattttgggggttctagtctcttaagttggctctatgcaatcacagcttcattggatggatgtttcgatatgtatcattttaagtcacatgagctgcttttcttatccaaatgtggttagcccatttatttttttatttagtgtgtatgaaggaatgataagaaagacataaaaatggcattttgctcggttgtattattatgtctgactgttctttggtttctttgtattctcaatcaattgtttctcaagaaaatctcgtgttctccttggcttttgtaatttttttttaatcctgatatgacactgtaatcttgcttttttatcacttattttgaatagaagaatgatggaggcgaagctagctacctaccaatgattatgtgtttgcactctcttctctttgatgcttattgttatctcaacaaaattgtgtgttattgttgtttggttttcagtgttttgaaaatctctgttgaggtacaattttttttttctgcaggtgtaaataaatactattaaatggaagttgttggttatttattcatttgcattgcttatatagttccccatgtttgctgtttttgttttaccaagttctatgctcaaggattgtttatgagtacttttatctagattatgattcatgatattgattatctgttgtgctgttgtgtgtttcctttctctctgtttttctccacttcatatgatgtattctgttgctgttgtttgtgtgctgatttctattttcatgccttggtgcttccatgaatattgatcagtacgtataaatgttatctattaatttttacataatcttgggagagttgtttgagttgaggtgtgctgattttatttttttcatgcctcgctttttgatttgagtgtgaatgttgcattggtatccttttgcatgagagtgttgttagtctgttttaagattctatggaatgataaattgagtttttgatggatgtttaattcaggtttgtaaccgcttgttgggccgcagatgctttttatggttctggtgattgcagactatgttctctggtttgatgattgtatgatctatggttttaaagcttacttccctttcttccgcacctttagtgtgtggttcatctctgagtgtagtagaaaaaattaccgaagttttgtttatgtacttttggaatctatgtgtgccatcaggcatttttaataataacatagtttagaaatacaagttctgataatatttaatcttttttcgatgaatgtcttgtttttccctgtgcatacttatttttgcctctttctaaacaatgatatgttgtagccttcaataaaactattgagttatttgtagtgaaattaatgattgcagttttatagttacatcattcaatgtcttcaaacctataagtgcataaaaattaaaagaaaatactagtgtaagtatatataatatatatttcattgtgggctggcttttctttttgagcatttgctttatcccataccaatttcaaacacgttgagtatctatgctggatattttagttactctgtcaaatcttgcattggacttcaaaattaatataattgacagcttgatggaaaatggtagcttgggagcgctgttctgtcgtgatggtgaccttggatatcttgattgtgcaagtgatttagcaatgattgaataacaatatatatatgatttagttgctgagttagtgctcttctatatgatttagtgacttttgggtttaatttgaagcatgcaatttggttgtgaactccaatacattttgtatccatccagtttgaggatgggttgaaagaattgtcatgtgtcacatttcttaaatcattttctacttttggcattgtaatgaactgatgagatgctatgaaacctttagatagcatagacttcgaaagccatgatagtttttgctttgtgacaattgctcttgttcatgcaagccccatccccctattctcactctgatgtgtaaatttgtttgatcttttatattgagattttgttgcatcgactggcatattcatggtctttggtgattctcgagagtggttagttatgcttcctttctgtggttcaaaatggcttcataacagtttttctacatttaactcttggcaattatgagcgcataatgcttactaagtgttttaattttcgtttacaccgatgcttcttgcttaccattgactgattcgatccacccactttctacttatttcctttgtaggttaaaaaacaaacataaaatgattgagctatttgatgaagcctattattaatacttgcaatgttgtagtaaatttgtattccaaaattgagtttcttcatctaattgttgaatttgttgccataaatttttgagttcataaatggaaaatggttggtgattttgagttcatagttttttttacataatagattagaatttgataagtttattttggttgcttttgttgttactgcattgcatatgtgtttgattactttgttggagaaattaactattattaattttaaacacccacctcccaaattggtcattacaatttttaattagtcttttatggtgctatatatataaatataatgtatttgattttatcggttgagattaattacagattaagctgaatgtgtaatttgagagtagctattggtaatgtgaatggtatttgggattttggtgggaatattatgaaatgagttga

SEQ ID NO: 36594 - DNA, 11157 bp, Cannabis sativa
aaaattataagaatggactttattctatgataatgatactgttttgaactggaattactttattgttgaatagctcggcatgggagtcacatgctttgattatagttttgtttaatctatagttggctcttcgaattgtttcggataataaataatggaaattgatttgatcttgtggatagtacgttctttctaaatgtatttatggattaatactcactggaatcgttgtgcttaccaattgctttagcatagattgtttttatttgttttgtgggcattttctttttagatatgtgttctcaaaattacatgatagcatgagtttcttgtgtgttagataattaatcattgttctgttattctgtggctgttagtagtcagtactaggtttccagtacattatgtctagtaagtgttctttagtgttaaatcttgtctggatgtgtatgacactatattacattcatcaagctttagtttgaaaacttccctcaaaaaaaaaaaaaaaagctttagtttgaaaactttggcttgaattgaactatacattatgttgtaactcgaatataaaattgtcaattaaaaacctggggagctttgaaatttgttttatacatgtattctttcctaacctgtaatcctataacattttaatttttcatcaatcctgcaacctagaaactcctgaacagtgtttgttcagtcaagtgctatattgatcaaatgacttggtctagcctgatttaggggtctggtgagttcatgtcagtccacttcagtgtaggagttagtactagctggtgcttatttgacattgtatgtagtacagtcctgattctctgaaccaaaatattctccggaagagtatttttgtagttaccttcctctactcttccttgttaatcaccgtagcacgaagaaagagatattcgaaatcaaatatacaataaataatattagttcttgggattcctttgtagaactgcaaaatattctcatagttaggagttgagtgaatataacattagggacatctttagtatgtgttttgttatggcattcagagtaccaagctttggattgttgcatgtctttgaagttagtcagtcagtgactgtctaaaggactgatgcccaaagatgatccccagttgagcgaattgagcaggtgaataatattgtctgttatatctgtatcagaaaacttattcatagaacattctaacatcgcaagacattaggaaccaaaattagtaaactaaagaaagtaaaagaaaatgtttggttaggtcgaatggtcaggtctttgctcccatgaggtcatggttcaatttcttaaggacctagagtaacaacctgctattttccgagtgcatggtgtagtggttgggacgcttcttcataagccccctcattgttgccttctggagttcgtgtccctatggtgacatctggaacttgactttaaaaatggcactcctttggagctacaggtgaatagtgggtaggctatgggttccctgtgtgggagggcctcagttggcaacctagtgcacccctcgtgatctccaggattaagctggaggagatgacgatatgatgtaccacttttgcctcccaaagattatagggttcatgaaatagtatgagcccaaatgcgtattaaagaaacaaaggggaatagtcgtttactttcgaacttattttgtgattcttcaggacggtaggctatgccattgttaggagcatggggcaccaaaatgcttaatgccactatgagatggcctattataattagttagcggttttcttataacatttattaaagtaaaatatgtggggtcgtgagactcgatattgaattatagtaacaattatattaaacatcacaagggtgctagacactatgggtgtcctttaacattttttcattgttagagatagagcttaatggaaggtaggtggtgtctatagtgactcaagagagggatagagtatagattttgagccaagtgtaacttgtatttaatttcttcctacccctttctagataaatccattaaatccttggtgatgaatgttacatctatttcttctacatttggaaaagtgttactttcattaaaatgcattaaattctcactctgaggagtttgattcaagttttcatactaaacaggaaacgatatatgatatattcgtacgttttttaattaagaatcgtggtgatagtatttaaatattcgaaataacaactcacaaatccagcttctgtttatatttcaaatacttctaatattttatcagtttacctataattatttttaatttatatctttcttctttgacattcatgataatttaagttttcttattagtaactgttgtcaaatcttgaggatacgtccattcttcttcaccaagttcatcagttaagttttcttagatttggcattattgtttggaatgcagttaattgcataacaagtgtcaaatttattgtgcgttttgtttagtataaatattgtcatgtgaaaatatacaacttgttttaacaagggtggtctttgtttattttgaagacctttttgctctcaattttggaaagattaaaatatagtgaaccctagtttgttttcaatatcttcccatctaaatattgtgaggtgcgacctaactaagtagttaagtaccaactttcaattgcaagtattggatgctagtaatagtaacaggaaaacaaaattttccaaatattcacaatgatcccagagaatgaatacgggacaaaatctagtgtctgctcatatacaagggggttcagcactctacatgagcaaaattcaaagcctcaatcaaccccaattattgcaaaaaagaaaaagaagagaagcttggaacagatactacccaaggatgaagaaatgtttatcgccaatgcaaaattagtcaaatctcattttggaactcggggatgaacaaatgggacttaatttaaatccctctttaatttatgcgagaaattgggaaggaaaaaaaattatttgatgattagcctccagttttagagcaacattgactcggggttctcgatgtagcctttgaatgcttttagccactctgcaccaaccgcacctgagaaaaacacaacaggtaattatttacttggtaaacattaaaaagagaaaggatgaagtgtccacatatctaggtgaactacttgaaaaacttaccatcaataacgcgatgatcgcaacttagtgttgcagacatgaaggaagcaaacttgtattgctcgggcccggagctaggcacaactctcttctcagctgcgcttatacaaaagggcaaaaaatgtcaaatccaaggagaaaatatccactctaaacaaaaagacaatgtctagggttgggcttaccagatccaattgcaagaatgcctgattgaggagggttgatgatggcacagaattgcttgataccgaagggacctcccagatttgagactgtaaatgtacctccctgcacaagaggataaatactgtacatgtaaattgatgtaatcacaacttttgcattgaagttggggcaaaatattcttcttacctcataatctgcaggttttaggccgccatcttttgctttttgagccaactgcttgacctcatcagctatggtggacagacctttcttgtctgcatcctgcaagttaaatgcgagtagagcaagttaaacagataatgaataataacaagatacattttatcaagatgtaacagagccaactcccaaacatacccggataacaggggtaaaaagtcctttttctgtctgcactgcgacattgatattcacattatgaaacctaaaacaaagagaaggaataaggttttgctgaaacatgatatgaaaacacaactttcatataaatgttttcttactggcggatacattcgtcagtccatgaactattgcattgaggaactttacgaagggccaacgcagcagcctgcagcaataattacataggagttaaatctgaagagtaaacagaaaataaatgatatacatatacttaaatacattacattacttagcaaggaaaggaagaaaagaaagggctgaaagttcttgttggcagcatgcacagggtacagtttgtaaatacattgtgttggaaatgaaagcagaatcagttttgaccagagagatgcttcacccctcatcttaagcaagcatgagttttgtttcattcacttctctaaccatgaattgtttcaaactatcttataatttattgatattcgattagagaaaattttcattactaattagttgcccaacatctaatgttacaaaagaaaaaggataaatccaatacctttagtacaaggtcattaacagatatccgctttccacctgacgcttcttgtaatgcattgagctgcccacgtaacctgcaagaagagcagccatttactaagcacaagacatttaatcacagcttaacttcggaagaataaatgttaatgcagaatagtttgcttactccataaggttatcaacacatgaatctactgtcaaataataatgaggaatagtttgctttgcgaataataaacgtgatgctgtgacctgtcaaattatatcagagaataagttcagaaatcaaaacaattaaaattcaagaaatatggtccatagagtgcagaccaatataagagaatctaatcatcctggattggaaaatagttagattatttacaacacaatagtgagaataattatgagttaagaaactacctttcgtatttgagagtgaggaatgtcagtgtaatctacatctgcaggtgctgcatgcttagccttggcaggtgcctctttgctgcgagaagctacaccattgaataaaattagtatattaaactctggcattgatctaacttcactatacagaaaaattgaagagagaccaatgcacttatacaattaagataatttacaaataatcattaaccaaatgaagatcaatcatggttaaaaaagacattaatacccaagtaatcttcaatatcagctttgacaatacgtccatcaggacctgttcctttgatacttgaaagtgacacctagaataacacaaacaaagcaccagttatgaacgagaggcatctctaactgtttatgatagacttgaaacaaaaaaaaaaaaaaaagtgattaacatttcacataacatactttattttcctcagccaaatttcttgcaagtggactggcaaaaacacgatcttcggcagaagcttcactgggcttcgaaaccttaggctcgggagaagcaactggttctttagccacctctttctggggtggagtggagacggatggtccagtatctgcagcagaactggcatctggtgccgaaggggtataatctttaaacttggaaatgtcctcctcctcttccacagttatagcaataacctataagcaagcattgaatgtcaaatagaagcaactacaaataaacttgtttttccatgaattttctttacaaataatggctgaggttgtgaagctgactttgtctgctataagtctaattcattggccttctaaaacatcaaccaaccacacaaggaaggaaagataaatgattaatataatcatgcatgttccctacagccaaatatcattaatacctctccaactttaatttctttggccccatcaccgcgcactatcttggcaagataaccttcttccatgcattccatctcaactgtagctttatcctacagaaaaattgaatcgatgaagagtaatatgtaagctaaccattcaatcagcatttcagcaaatgtgtgcgcgtgtgtgcgcgtgtgtgagagagagagagctacaacttacagtttcaacttcacaaagtacttcacctggagaaactttctcaccctccttctttaaccaccttgctatattaccctacagacaataaaagtagtacttagaaggacaaaatggagataataagtaaaaaaaccaacagaaagataaaaacctctgtcattgtaggtgaaagggatggcattcctatctcttggtgaggtggaaggcctgaaagaaataaaaaaatattgataagttgtatttttccaagataatatatagcatgaccagatctgactgaacactacgtcattggttttggatgatgatgtagaggtttattgtaacaaatttaaatctaggagatgagtttgaaagctgggaaaaatttacttgttcatgaccgaaattaggggataattgggaaacatcattataatgcacagaaaaagataaaaagataaaagaatcttggataagtaccagatgatgaaaagcctctccttaatagcacctgtgaactgctaataaataaatcagtattaaggcatggagagggaaaacgaaaggagagagaaaaaactcagacaacttacactgaaagtttgtttaatcccagtccagcaattgaatttccacctttcactgcggtggtagagaaatccctacccttaggggcaccaaacaatgacttctacaagacacaagataagctttgtgagctctatcagatttttaggtcattttattaggtaaaaaataatgcaaaacagactgcaaccactgcgaattttatttcctactaacgccactaagacagaacttacagtgatgaaagatttagtaactccgtctccttctgaagtcacataaccatggcagttaaacctccgtatctctgagattaaaacaaaaccatgtatgaataagcaagtcaatattttgaacgaattcaatgcaaaagcaacaaagcagtcattttgcaacatgaattttccttgaaaacagaactgagaacccagcaaaatgtcactaccatctgcagcttgtgcataacaatatttacacaattgcttaaccacaatgaaacttaccttaatacttgttatgaacattgaaaaatgataatcagctcttaacaacaaataagcgtaccatctcttttaccgacagaaggttgaccactgaaagaaaagcaacgaactaggagagcttgctcgtgcctcagcaagtttggggcatttcttaactgctaatacaattaatgatgatcaatattttttagcatacaaatagaatcatagcgcgaagaaatattgaaaaaatcctgttccaataaacataattcaaataaaaaacccgaacactataattctgcaaatgacagttcaactagaagtcactatatctacaagtgccaaacaaaaacggacagaaacaaaaacaaaaacggacagaaacaaaaggcaacaccactgaattttagcataatctcataatcaaggaactaaacccacgtccattgttcgaacccatgatcttttatgctgacaaaattaatcacaaacacacatttctatcatttaacataaaaatgaacattgaagtaatataatacaactttcaaaatccagaataataaaatattaggttcaagattcaaatttgggcaatcctaatctacccagcaaaaaaaaaaaagtggggacaaaacccaaaatcaagtagggtccaagaaaaacgaaaagttcaatacgaaagtacgaatccagcatcagatgcaataaaattacagcaaagagagactacaagtaaatccatattcaacataacaatacgaaaaagagatacctttttggagtgactgataatacgggaagcataagccatatttcgtatggtatagatcaaaataaactcaattgaagctcaatgatgaattcgaagataagagaaatgagaattgtttggttagacgggagataggtaaggcttttccttagggttcagtgatctatacagaatcacagatcgcgcactgattcgattgttcttccttttaatctatttttagttaaaataagaataaaaataaatactattatgatattgaaggtaggagaaggagaaagagaaagagaaaagaggagatgtgtgagagagagggagacgagaaattgggctgggctgggcttagctgggcttttattagttgggctaagcagatgccgcgcctaccttttaggattttgactaaaatcttgcttctacctactactcttcttttctttctatctatttgtcaaagtaaatttctttgttggatatttttagtaattatcgtcgtttaccttgattattgtcgtttttaaaagttaattctcattttaaaactgttgtcgtttcaaccgttttaattgtggctctattcatagttgctgctatacttgagagaacctcacttgtatttctttcgcacaagctctattgcttagatttcattaacagatattctctactcttttgtgtatctaattttttaagataccagcaattaaatgcactagtcccactattattattattgttgttgataggagtactagtcccacactttaatgaaaatagtcaaatttctatttttggaacaatgagctatcatattttcttgtttttggaatatataagggatgctttaacaatgcactttcttacctggatttatcaatgagagttcactgatgtaatccaatatgttttagtatatgatagaattttttattttaatttttttaaagtcgtttacgttataattatttaacacatttataaaattcaaatctaataatatcttgtagagtaatatcatggtagacacaatgggtgtggttcagaaaattagtagtaacttagttatggatttttattaggaaattttattttatatgcttaaataaataccctctaacaaaatttagatgcttaattaatttatacaattgaatactttgtttttaatttctactcaaaataccctctttttcatttccttctctctttgtctttttttcttcctcgctatctcttcctcttcctcacaccactgagactacccagacccagacaccaagaccaccaaccaccaccaccaaacctcctttccttcgctactaaacctcctcatctacccaaaaacccagacaaaacccagaggcccaagactcggacctccatagcactcaagcgtccaaaaaacccagaggccccaaacctccatctccgtcttcgtttgtgagcgtcgtccatactgagaaggcaaccccgtctttgagcccaactagatgctcactagatttcaccttcgtgtttatttttttttattggatttgtgtttgtttcatgccttagatagttgtagctatgatactttttggccaaaacgtgcttgtcgataggttatcgatagtttatcgatgatttatatttgtaaacacagttttgtcaatttgacatatatcgataggttatcgatggcatttatcgatagtatattgatgacatttatcgatacgttatcgaggatttctgtttgtgtataaaaatagcagtgcacacacaaaaccattgataaagtatcgataacccatcggtaatcatattttggccgaaaaaccatatcctctaccaccctctaatgtctcaaataaatacaaattcaaaagaaaaagataaagcgaggaagagcttctggtggtatatacaaatacaaattatgaaaataatgttaaaaaataagtactcaaattagcacaagatagtgttaaacttattttattattattttttttttgctaattaggatttttgcctcctgaactttgacatgtattaaatcatgtcctttaaacttttttggtcgttaaaaattctcctgaactattgaaattgttggatttaaggacttttatcctatttcattcaattttactgattcagtgattgtccatgtactaaatcatgctccctagactttgatatttaccaaattatgccccttggactttaacatgtgccaaattatatccccgaactttcatcgatgttagacttttcttactaaaattagataaagtctttaaatccaataatctcaataattcagtgaaacttttaacgcttttcaaaatttagaagatataatttagtacatgttaaagttcagagctaaaaatactaattaacattatattttttttttaatattggctacaaataaagacaaaagggtttagcttaggagaggaaagtttgaatataaacgcctcttatttcaacattgacctcacttcaactccacgggcccagatccgaagagtttgggaaaccctagctctatcttcctactattttcgctctatatctctctttcgatacggattctacagctcgcaggtatccttacatttgtaactatatgtatgtatatatgtttcgaaagtttgtatcaacttattcatatcacagctgcatgtcgaagtaatttcttactgttttttgttgttttcggattttatggtacctctcagtttgaatcatttgatcttagaatggttttggttgagttttgtttgagatctatttgtttatgtatagttattttcagataagcagatactcagtccgaaatcattcttaaattatttttttcacttgcttttcaccggggaagaacaaattcaaacaaaacctaaccaaaaccattatagcatcaaatgattcaaactgtgaggtaccataaaatccgaaaacaatggattgtgagcacgtgattttcccccttttgtttggtttaatgtatatgtatatctgtatttatattatgtataacaagtttcctttttgattatacctaaaatcagagtcagctgtttgggctttttttttttttttttttcaattataagtgcaatgcattgtgttttttctttgtgtgaggatatattcaatgcagcggataggcatatatttcatatttgtttcatttgcaagctttgtttgtcacattttactttagatgtaataatagatatttctggttaatggcttttattttcaaatgacatttttagaaggattgattgttttgtggaggggtgggcaatgtgtttgtttgcatggtgtttatccacttcaagcagataaactgtcttctatgttatcttctcgatacattaacgcgggattttaatacttgtattcataattgt

SEQ ID NO: 36595 - DNA, 3226 bp, Cannabis sativa
taattttttttaaaaatggacaggacattcattaactttattgtattgttagattagattatttaaggtcattttgcatcttcgccctttttaaaattttattttggacctcactttatttttcaaaaaaagaaaataagaagaacaagaagaagttaaaattaggaacaaaaatccatttttgatcaaaatattttcaaatataacaaaactacttttcaatttatagttgaatgaatgacttaacaaaaataaaacttttattgtacaaagtaataatgaaagttttggtgaaccgtatgaactcctcatcttcgataatgttctcatttcttttgaattgcttcattacttgaagaggaagagggaaggaaaagagggttttataactttaaagctagacatgtgtaaagcttacaacagaataaagtagaatttcttagaggctatgctccgtaagttaggatttgagatctggtggatccatttactgttgaagtatgtgtcttctacccgttctacggtggttcatggagatcgtgagatgggaccaattctaccttttcggggtataagacaaggggacccctctccccgtacctcttcattttgtgcacaaaaggcctttccgctttaatttgtcgttttgaaaaatgaggccttttacatggctgtaagttcgctaatggggctcctcgaatatcctacatgctatttgctgatgatagctacctttgttgcaaggtaaccttatcggaagctacacgaattcaagaagatttgggcaaatttgaagcagcttctgatcagaaagttaatctctctaagtcctccatttttttcagtacgaacacgaccttggcaactcgtaacagcatcagtaatttgcttggcatgacaattgcgggagataacattttgtacttaggcttgccgagtactatgtctaggaacaagtcggcagtgctgggatttctaaaggaaagagcttgaaaacatattcaagagtgggaatcgtagtttttctctcgagtagggaaggaagttctcattaagatagtctctcaatcccttccaagttatgcgataagtttgttttacttcctttagacattactcgtgatatggagagggtgatgtctaagttttgatggcaatcctctggtaatactgagaaaggaattcactggcaatcttgaaatccactttgagttcataaaacaaagggtggaatgggttttcgtcacctttagaattttaatttggctttattagaaaaataaggttggtgcttgatttctcgaccgactctttggtggtaaaagtattttaaggcaaggtactttcccaatgtttcttacctcaactcttcactaagaaacaatcctagtattgtgtggcgcagcgtttgggaagcacaacaactagtttgcaagagcattcgctggtatgtggggaatggtcgtgatattaaagtagttcatgacccttggctgccttgtaataacaatccatttatcatttccttgcacccaaatttgatgagcgctactgcacacaatctgatgagaataaatggtgggggttgggatgtggagcttttggaggatatgtttgtagccagagacatagagcttattagaagcacactttagcttccttcttttcccgaatatagtttgacttggtattatgcaacttcaggcttatactcggtaaaaagcacctacaaactattccaaaatgttcatggcaaatggaaaaatattgaaattgatgcttctaaattttgaactttattttggcacttaaatgtacctcccaaggttaagaacactgtttggcatgcaagaagtaattgtcttccaactttatgtcgcttgcaaacgaagagagtcaatgttagctctatttgccttgtttgtaggttggaagaagagaccattatgcatgctttagtgacatgtccgggtgttaaacaagtttggaatcaggtggatattggcacatcagttccagagggttgttcttttttggacgggtgcattctggtttttttggtgtagatcggacaacaagctcttactatcgacactctgctaggcaatttggagtgccaggaacgaccttgtttggcataagaaggtggtgggagtggatgatattgtagtattagcaaaagattatcttgattaatggacaagtgctaacaactctcttattgagtcgtcatggtctgatttgcagatgagtgatggtgttgagcaatggtccactccaaatgaaaatagtatcaagatcaatgtggacgctggtatatttaaaggttgaagcagttatggtattggattagtagcacaagaccaccatggatattttgtagaagaccgaattgattactttttggggctacaactcctaaactggctgaagcgattagtgtccgtgaagccttgagctggcccaaagaacacgcctggcaagaagtggtcattgaaatcgactgcttaaccgtgatttaagctcttcgtagttcagttcaaataattatattgtttggtcaaattatttctcattgtaaacaactctctattgagttgcaaaatatttctgttctatttgtaaatcgatcagctaatgtggtagctcagagttttgcatgagcttctatattattccttgattgttgttgcgctgtagagtgtgttcctactgagttgttacattgtttgaaaatagattttgttggttaataatatcacatgttccattcaaaaaaaaattaattattaaaaatttatatttaaatgatactttgttacaacatagaattgcaaaaattgtgtaaggttatatactaaaagtatagtgtttaaaatggtataactcttattataattaaaagtattttagtcatatttacaaatattttgatcttagggtccttattgttacggaacggttacttcagtgtatcataatatacatttaggtacccaaaccccttttttattgctcatcttaggccactcccatctgatgcatcaaaaccttaagagaggcataaaaagatacattcaatcagatgcatcaaagacatgtataacataaaatgtcttcatactttctctcttccactaactactttttaattattcttcatatatgctttactttaactaataaaaatatattgtttagttaaagaaattataaaaggactgat

SEQ ID NO: 36596 - DNA, 5130 bp, Cannabis sativa
cttcatttatatagataaataaaatttctgattactattatgtcctatttttattaattaaaaattaaattataactttcacatcaaaacatgtatgaaagtattgataaaaccaaaaaaaaaaaaaatataaaaataagtttcaatatatataattaaaataatatatatatatatttatttttactaaaatataaatatatatattttttctctttactttctctttctctctccctttatatatataaatatatattcattgtaaaaatttagggggggccatggccactccatggcacaaagaggttccgcctctgtctgaacttgtcttccaattgtattactcgcaactgtattggatccacaggctgttgatctgcattttgattgagttggttacgcaaatttggtgcatgacgatttaaatgctcatgtaggtctggctgccttcgatttaaatgttcacggagatcaggttcacgacgtctctggtcgtaattactcacagacctagtccttgagtaactttcaaattgataactacacgagttactcatactttcttaatcagtaaaataatgtcgtgacctatcctcgtctcgtgtttgtttgtctatgagtcccagttgacctactgtgcctgtgagatcttgaccctcctgaattcgtacttgaaccggtttcacataactcatctcgcattggccttcttctccgaaaaagatttaacacatgacatctactcaggtatgtgtgtttgttttctctgtcattgcgagaaggcctttgtggatgcctcgggggttgatctgtcgcaggttgatttccagcatttctcccatcatgctgaggaatttctaggtttcctggtcgtgattgccttacatttgcattcatgcgagatgattatggtatatcaggttgttcattcccctagtttgcaaatccatgggaagttcctggaacatcacgccaatgctcctaatttcttgtagtgtcagtattgggtggattttctctatccattggactgtcccttgtattcccaagttgttcttccaaagtatttgtgggattcctttgattattctcttgcctcctagtcctagaaccttggggccttccctgtggtcaccttgcagatggatcatgttgagtttgaggagtggttccctttgcagccctggcggccgaagactctcgttctaactcggcatttcttcggtttgactcagctaggcattgtcgaagttgcctcttttctaattccactagtgggacatatctggtgggatcataggcgtcttcacttcacctctctaggatctattcaccagttgggttgaaatttccataatttcttcctgaacaaggggttttagtcgtgttggttctttatgatccctgaggttcctttccagagcgatggatggtctcctctagatggctttcttcgttatgagggatattatccgccttagatacagatttgtagttgtgtctataaggagggtattttctgagtttttattacgaatgctcttaatgaaagaactaaattactaatgcaaattttcgttaactaaatatataaaccttttttgtaataaatataccacaaaattaattatcgtaataaatgaacaacagatatttttacttggttttgtagttaaaatctacatactccacgagtccatattatttgagataatacttggtacttgggatacaaagtaaaataatctcaattaatataacatctagctttttctctcaaattagccgtctttttttacccttgattttgtccctatttataggtgtataaggtgatagttacttttccttaggatctaatcatttataattgttcatgaatcgtggacatttcccacgtttcatttttatgcacatggaataatattcaataaccacccaactgctcttttatcattatccttaaacggttatgttgactatgctagttgttcctcgctaagtactagttgtccttctttaccgtctttgtaggaaaaatatagatataatgctcctcacaatcctcttttaccatgatgatattagcgaggtggttacttcagtatggagggtgagatggatgaatgtagttattttctctatgtacaaatatgtggatcaattagttgcaagctcttattctcaagtatgtgggtcaatgagctggaagctcttggttcttttgccttgaagaactttattatgtactctatttatcccgagatggtcttattgtctctctagtcgtacttgtaaatagtttttattcttatctcgcatctacttatgtgacagcgagtttgaatatttttatcaactgtaatttcttaaacaagttactaaattgcatttaataatataattattccttccttggtgcacgtgtcaacttctagttgttagccgaaatttgagtattacattagtctttaatcaaattaaggaataagttttttttttttaggcacatccaaaggcaacacgatattgaaagaaatgatatgatcattttatattggtggaactaatcttgtcaatcaactgctactattgtgcattatcgttctgttgcttcaagtccacccaatattaatgatgaaggagagatgaaaaatgatttagatcataaaaacatacatacgatactgatagtgctacttgtataggctctcatcttattgatgatatttttaaatgtttgacaaaaaaaatcaacaagtgtagagcgaagagttaaagaacatagatcataacaaatgagtgatgtaattatactgagataactaaagtaaaagttgagacaactttaattaaagtcaaaaaaaattcgagagtacaagtgaagaggaagtcaaaaagatgacttctatctcagtcaaatagtaaggtattcttttttcaaacattatgccttttatatgcatttttcgtctaaattaattgtttgcatgctaatataatcttcagaactaccaaacggataattttagctttagttcatcttctacgtatagcaattttgacaattttttaaatttttaatgctatacctttcaagcaatcataatgagaagtttattgagaaaatcccataacaaacatttattttaagtagagaggattttgtgaaacaattgttatgtagccaagagaacgtgttacaaattgttgcgtatgaaatatgaatgtatttgtcgagcttgtacttgaatttgttggggaaaggagttaatattattggtagtgatacttcctctattaacacttaatctaaagttagaaaatatacatatcaacgtatatgtcgagctttgtacttgaatttgttgggaaaaggagttgacattagtgatagtgatacttcctctattaatacttactctaaagttagaacatatacaaagtaactatagatttttggtgaggcaattatgtcttatatataaacctggagaaagtatatttatataaataatatatgaaaaaggctagcaataccagctataatattactttcgtataagggtcactatatttacagattactagattaagattgcaaaagttgacaaaatttagcaaattctgtcattgtcaaattaccttccatctgtggccaataggataagcattactcaccactgtagaagttcaaagaaactgtacgaaaacctgttctatgtaaggttaccaacttctctgtaagcaccaattcctaatctcacagaagaagccaagttaaacatcatatacaggtaatcgttgctcgacagaaatgcggcatattggacattttttgcacttctcgcagcaagtactgcagcaccatccaaagacaaaaaacaaaacaaaagatgacgataaacacaaggccagaggcaatcgtatgctgaggttaaaattgaagcagttcattataaaataagatagtaatacctgcaaagaacgcgatgcctgcatggcagcaggaccacactgatttctctctcgaagcaaatcctgcataaaactttttcctgaccaacaaaagaatgcagcacttaggaagacaaaaaacttacacacaaaaagtcaagaactactagaagaaagtgcaaaggatctcaacaaagatatagacagacagagtggatctgcagaaaaagaataaaaataaataaaagatgatgaaaccagtgaagtaaacaaaatgtatcaaatccaaattcgagcggctctgtagaaaatgagatgatgaataggcaaatcttacattttatatgcaccaggtatcaaccaacacaatctaatatgctccctaaaaagactgtacaacaaaaaagtttaaaattaaccctacaaacatctagtaattgactcatatcaaaatacagaattttatatgctgaacttcaaactctacgttaagaatatgctttaaacagactacatgcaattcaaattgtcaaaacaaccatacacgtgcatattttaagagccattactaaccatatacataccctgcattctgaacccaaggaagcttagtaataaaattcacataagagattcatgaaaagaattcaaagaaagaaattaatcaagaatgatataaattacattttggagtctttcaaactcttgttggctgtatttagtgatttctgtctgttcccccagggctgcttgaagtctccagacctgtgttatttagatacagaaacaaatctgtatagttctcaaaaaaaaatatataaatatgtatgtatgtatttatataaataggatggagaataaaacaataactagatcttcaatcaaaatcaaatgaaatgaacataaactacatgtaaaaaggaatagctttgaaattaaaatagtagatgcaatataaaatgcatcacctcctcagctaaatcctttttaggcatttttttcacaatctcaggtggatagccactgaaagtatcatacctggacggtagaaaccaaagctacaaagattagattaaagtaattacagaaatatataaatatgtattacttatatggcattttacaattttgtatacattattttaattaattacaaaatatgtgcaaaaa

SEQ ID NO: 36597 - DNA, 3722 bp, Cannabis sativa
  modified_base (651)..(653): a, c, t, g, unknown or other
ccaaaaatggaccaccatttttctggattctgccctgtatgaatgatccgttcttacaggtataaaatggtaagtcgtttttcttgcaaaacagcccaaactcgggtttttcactttaaagctcgccaaaacttctccaaaccaattgaaacttttctcatcaacttaatctcatacaaataacatatttcatcattcaaaatcatcatttcactcaaatttcaaaaataaccattaattggtgagctttgagtttttaagctcaactcactcaaactaaatcataatagcccttaaaccagtgtgacacaaattaccattttatcttcatttctacacttaagttattgtatacactaagggtattttggtcaaagctatctaccccaaataatccaacaactcaagaatactaaaacaatctggtacaatcccaataaaatttattctattaccgttgtgacatcctttgccaatcgatcgagtttccacggtcgtcgaacctgaaaatttattatttcgaaaatggtatatataatactcacatgtttcaataaaatctccataattaataaattacgctcaaattctcttataattgacttaagtaagactataatcttactttaatattcatataattacatattnnntaaaatatgtctaattaaatataattatattttacggaatattataactatctcctccttacagaaatattgtcctcaaaatttatgtgaaccactcgagatactgcttctgcatctgtgactctaactcccaattcactttttcgaccttgttgtttctccatagcaccataactagcagaatgatcttgttctgcaatactttttcttttctgtatattcaagatctgaacaggctattcctcatatgataagtccgtctgaagctcaatgtccttataatttagaatatgggtcgaatcagacacatatttcttaagcattgaaatatggaacatgttgtgaactccagataaaggagggggtaaagctagccgataggctacttgatctaccatctccaggatctcaaagggaccaataaatctagggctttgttttcctttctttccaaatctttaaattcccttcattggtgacacccgaaggaaaacaaagttcccaatctggaactcaatatctcgatgcttcggatcagtgtagcttttctatctactttgtgaggcaagcatacgagctcaaatcttctcaatagcctcactaattctttagaatcctttgggtcgaagatatctccgttcaccgacttcatcttagtgaataggtgaaggacactttctttcatataacatttcatgtggtgccatgctgatagtactctgataaatattgttaaatgaaaactcaatcaaagaaaggtacttgttctaggaacctttgaagtccaatacacatgcacgtggcatatcctaaagtatctgaatagtcctctcggaatgaccatcagtttaaggatgaaaagttgtactaaatcttaatttagtacccattgctcgccgcaaactttcccagaacttagacgtaaactttggatctcaatatgagacgatcgactttggagcgccatgaagccgaattctttccttgacaaataaattagcatactgatttcttgcatacgtagtttgcattagtaaaaagtgcggtttgtatattgatccactattaccgagatagaataatagaatcgcattgttcttggtaatataactacaaaatccacggttatattctcccatttcctctcgaaaatcttaagtggttgaattaatctcactggtcattgatgctctaccataacttgttgacaagttagacattttgacacgtattccactatatcacccttcatatttggccaccagtacaatgctttcacatcttgatacattttagttgttttggggtgtaatgagtatggtgtggtatgagactcatcaaaatttttttgtttgataccatcgtctgctggaagacaaaccctatcttgataccacagtagcccatttgatgaaattgagaaatcctttgttgatctagcctcaaacttctctttatactcttgtaacactggatcactttactaagcggtcttgattctttctaataaatcagactgtaatgtaatatttgctaatttcccaatcacaaactcaattcttgctctagtcatatccttagccaattcttatgagatcttcttcagttcataaacttgtcttggacctttttgacttagagcatccactacaacatttgcttttccagaatggtagatgatcttgtagtcatagtacttaaccaattccaaccattgtcgttggctcatattaaaatccttcggagtgcaaaagtattttatgcttttgtgattcgtgtagattttgtactttttgccatgcaaataatgacgccaaactttcaaggtgaaaaccaccactgtaatttcaatatcatgtttgggatatcactgttcattctccttcagttaccaacacgcataagcaataaccttaccaaactacatcaagacacaacctaacccttgttttgaggcatcacaataaatcataagtttctcatcactgattggcaaagtcagtactggtgtagtaatcaatctttgtttcaactcctagaagctactttcacatttattagtccaaacaaacttacaattcttccgagttaattctgttaaaggtgtagaaatcttggcaaacccttccgcgaatcttctatagtatcatgctagtcccaggaacttctaactttggtagcagacatgggttgaggccactctcgaactgcctcaatcttcaccaggtccaccaaaatgttattatattcacttaagagaaatgttacatcttttcataagagatgataaaagtaatttgatcacaaagttcccatgacagagaagagtgtttctcttgaatattcaacatgacattctgatgtgtttaaaggcctgctacaatgagtcatcatggctttggcatctacgctttggacatctcaattttggcgggcttaaactcttagagaagaaggagatggtgagaggccttccatgcatcaaccagccagatcaactttgtgaaggatgtttgcttggaaatcaatcccaaagaagttttctaaaggagtcactatcaagagccacaacgacgcttgagctcatacagactaatgtttgtggcccaattaaaccaaactcatttggtaagagtaaatacttcgtcctctttattgatgattttttaagaaaagtatgggcttatttcttaaaggagaaactagaagtgtttgagaatttcaagaaattcaacgctctggttgaaaaagaaagtggtcttcctattaagtccttgagatctgaccgaggaggagagttcacatcaaatgagtttaacaaatactatgaaaatcatggaatttgtcatccattaacagtgccaagaccctccaaaaaaaatggagttgtatagaggacgatttgaaccatactaaacacggcaaaagaaagctaaatgagctttgggctgaagtgatagcttgcgtagtctacttggtgaatcactctccaacaagaagtgtacatgagaagacacctcaagaagcatggagtggaagaaaacttggaatttctcacctcagagtctt

SEQ ID NO: 36598 - DNA, 2971 bp, Cannabis sativa
aaaaaaaaaaaaaaacaaagcaatggcaggggaaaaagacataccttatcccaaaatgccccaagcatgtccctacttttagcagagtcctacaagaaataaacactatcaggcaccatggagccaacataagtaacaagaataacaattataattgcagatatcaaagcaaaaacaatctctatcgaagtcatgcttattaaggaaacaagacagtccagatccaataacacagtcaaatggtgaaagcatgaaaacagataaaagcaatatgaaaaccttatcaagcttttttaagcgatggtgcactcgaatgtgccttctgtagttgatgggtgaacagaattcccgtgaacatttgtcacacttctgcatctgaatctttgttggcgagaccaaagaccaactttggtggtggtctgcaaaaagtaacaggagtggcttaaaaccaaagcacgtgcttacaattattaatgaagtcacattaagatcgtgtttgccctaaatagtggtaaaccaagaagattttaagcacccacaaacttccaaaatctgtttagattttgggtgattaccataattacatggttcaattgactcaacttcaacctgagaagtcagtaaagtataaacttttgatctatttaatagttcaatttctgaggagtgaaggatagctacctgataaataactatgcgcttcatgtttcccaaagattgtaggggttgacagggactcaattcttgaacttgaacctgctaaacaggttttagaaagaaaacaaaaaggttattaaaagaaaaggaaaaaaaaaagattaataatactcaaactagaaataatgacctctgaaagccacaaaaagattccctaatgtagaaaatctttgcaatccaatttttttaccttgctgctctaaagcgtgaagtaattgaataaactgggctgagctgtccccggccctagagaaattaagaaaagactcttttccaatggcttgtttgatgatagcatcaagagaatcatttccctcctctggtttcatcacatctagggtattagcggccttgagttttgcaattggcatctgagcgtcctgaaagtagagattcaagtgcaaaacaaatactcaagaaaagccaacatagctcattaacgaaacgactggctggaaaaatgaaacaaaaaacagatgctaacacattatacatgtgcagcagcacattagtgaaaaagagacaatcacgtaactctgttaatgtttcataatccagaaatctactgatcaaaacttaatataacaaaaattggctatatcatattaaaattagttttcactatcagaagaacaaaaggcaaaagggcctccttttctcctttcaactggtcttctcccctcccagctaaagaggctactccaagcacccataatttacaataattgcaaaattagataagaaactaatacgggttgaatatacataaacacatatatattggtatcaatattatatatacacctagcaaaacacagatccactaaaaggaatctagcatagccaaaatctgaaaaggaagcactacaaatgttggtttaaagaaaaataaataaataagcacaacattttctccaataaatttaggaaaaaaacattgagggatttcgcaagcaaatagtattcagttaccaattagtgccgagaaatagttaataaagatgattaaaaatgcataattttcatacatcacattaaataataatcaaaacgtaaacccaaaaatctgttcaggtgaaaataaatagaagaatacagagaaaatgaaaatttgagaatgtttcctttccatccaccaaacaaaaagtaaataaaaaatccaatgaactaaacagaacagaacacaagtatttagctaagttcctcaattgaaataattaataacataaaaataaattaactttatcacatcgcttaatacactgaacagtttcgagagtaaccaaaactgaggaacataacaaaagaatacaaagctagtcaaggttacgaaacgcgtgatccgccatcgatataacataaccatataaattcaaacctaaaaaaatgagaaagcaaaagaagaagtacaatacttgagagaggtgatctgttcacgtaccagtagatggaatagaagagtgagcgatcggttgttagagagagagatagactaatcgtaagcgatctacgggattcaatggtcgccgtgaagatatgagtagtcgccggaactgagaatcgggaaaaatgcgggaagggagaaaaaacggccgagaaaggaaaaggaagaatggagaagagagtttagagagagtttgtgtattattatgttatgttgttgtatatatgaaagttcgtacagagaaaaaatataaaggcgagaaattgaaatggaagatggaaccctctgtactaagttaatataaatataaattgttgtacgcgctgatggggcgcgtgacactctgtttatggatatgggaagatgggctttaggcttgtttatgtagttgggctttcactgtatccggacttatgttgaggattacacacatgggaattttttacattttatacctattttactttacttgttctaatttttaccttcattttcgtattctttaagatatatccacttttataaatgatattatcattagaccccttaagttaatataaattatatgttagacttaaatagagagtgaaggtatattaagcaactcacttataaaactagatatatttttaagaaaatataatataagagtatttttgattaatagatacaaaaaaagtatttctcaacttatcccaattttacgagggaagtttataataatatgttgctttttcatctaatttataataataacgtactgtttttaagtgctatgtcagctaaatttgatatttgatgacgtttttt

SEQ ID NO: 36599 - DNA, 18505 bp, Cannabis sativa
  modified_base (11483)..(11484): a, c, t, g, unknown or other
aatagtcacgcgtgcaaaacactgtttgaacataattttcgacatgttaaactttttcaaattacttaaaattttgcaggatgtcttaaaaaactataacgtttatgacaatgagaaaaaatttaactaaaaaattatttcggatgctaaatagataggggtgcatcaatatatccattttaagagggtgtattgtagaattttcctaaaatttttattttgtaaaaatttcatcaaccttaaataatttctacaaaccaaatacatataatttatttaacaaatttcatgaaactatagttaattttattttttttttttgaaaggtttcgtaaacaatatatactaattttgtttccataatatagtatttaatattctaaatttgagtcgtcatagcataacttagtagtttcacacttaatttcctccataataataaaaaaaaaaatctaaatttgaagtctaaaaataattagccgtttcaagagtaaaataaaatagagagataccgaagaaaatagtaagtctatatttttaatttttattaaaaaataaacaaatgagtagtttagtaggtcacacgttaatgatgtatgaatctataaattttttaaatgaaatcgaggtattttcgaaaaatatttgtggaaaaatgatattgggctttataaaagcaaggcccattatgattgggcccattagatgatggggatgtttccccccttttccttagtgtttccctccttttcttctttttccatcatcatcatcatcatcatcgagttgtactatcactaccagatcagccgttgtaatttccccgataatatgcaccttttctagggtttcaattccgatttcaaaacttctcacttcttccatggccgattccaaaccttccaattccaatcccaatcccactgccaatgccaatgctagtgctgcccgttctcgcttcgatgatttctgcaaggtctttttcttaattcgatttttctcgtactattgctacggctactttttttcttattttaattcttttcactttcgtactcgtttcaatttagggtttttatgtctcttttttgtgaacgcagaataatgggtttgctttggatgcgactgcttttaatgaagccatgaaactttttgaagaaactaaggatctagtacagacgaacgcttctgcaattggcggtggaacggtagaatttgtggatttttttttgttttgatagtgtgatttgttgtgattaatttgtgatgttgaaatatggcgggagatttctctctcattgttgactaaatgtagaaacttttttttttaataattatttatttttattttttaatttttgggggcatagcctgaagaagcagaacgctactggttttcctttattttgttctcggtgaagaggctaagtaataaggatgaaagtgaagtgaaacgtggctctgaggatggtggggttacgttatggcagattttgagagctgcgaagcttaagtatgttgatgttgatgttgatgtgtgtcttttttgttttgtttaaacttttggttgtttgttgcgggtttttgaattgtataatcgtttttgttggcttaccagcattgtcgattttttcaaagagcttcctcagtttgttgataaagctggaccagtcatgactgatgtttatggcgcggattgggaaaacagacttgaggtatgacttggtacaggtttatgtttacgcttcattaaggcggtatcattctctattataatcttttatgcagtttatatctctatatgcttttgctcatttattgtttgtacattatttgatcttattaggccaaggagttgcagaccaattttgtgtttttgaacgttctaagcaagtgagtattttgcttctccgtagtctttctttgtctaactaaatgttcatgaatcttccttgaaagctgtatggtcagtcatatgctgtaaaatgtaaatataactcttctgttgaattatgtggagatcatatttcctaacaattgattttgtttatatgtaaacttttgtttctcaatgtgcccttcctactcttgcccaaataattaaatatctgatttttttttcttcttaactctgaaaggttctataagcgagcatacctggaactgtttattacaagcggtgcaaatatggaaaatcagttaacaacggcaagcgatgcaaatatggataagcaatcaactgttggcaatcacactggttatctgtcagagtaccatcgttttggatggttgatgttcttggcttttcgctcgcatgtgctcagccgctttgtagacctggtgacttgcaccaactgtttgattgctatattggtcagtcatgcagcttttttttcttcgttctttctttacttgatcaattttatcatattaacgtgaggatgctaggctatgtatttcatacaacatgtattgttaagtcttattgcttgatgtttttttctttctcgttcttcatttttcaggccgtactagttattcatgtccctgttcgcttcaggaattttgacatccatgacttttcaaaactaggtcataatcttttgggtttttagaagttgtgtaagattatcattgtattttctattaaaatgtgatgctaattccattgatccttgttcagttaaaaaggaaaagaaaggggttgatttgcttgcgtcactcagcaacattcataatgcctcagaagatgaattaaaaaggagaatggaagaggccaatactttgataactaaaattttggggaagaagccttgtttggcatctgaaagtaaaagtgaaacgctgaagaacatcattccaggttcagttgaaatctttgtgatacatagaatatgttttgttatgccatttattgaaatttgttgaatgttcctcgttaatgcagatggtttgacctattttgatgatctgatggatgcatcactatcatcaaatttggatattttagaaaaggattataatgatgctatctggaataagtgtggactggatgagagggtatttgttaatgaggatgacagcgttcttggttcagggtgcctatctgcaggttctatgactatgtctggtgttaaggtttgttcccacatcaagtagcatctttcaagttatgcataaatattagtggtgctttttttactctctattctcgaggtaaattgatttggtgtggctcttgttctatgtagaggaaatttgatttaatgtcatctccaacaaagacaattacaagtccactctctccgcatcgttctcctgcatctcactctaaccgcactcttggaggtagtagttcaaagatagctgctacgccagtgagtactgcaatgacaacggccaagtggcttcggactgtcatttctccactaccagcaaaaccctcaccagagctggaacgcttcctggtatcatgtgataaagatgttactagtgatgtggtacgtagggcacacataatacttgaagccatatttcctagcagtgcactaggagatcgatgtgtgacgggaaatctacaaactcccaatcttattgacaaaatttgggcagaacaacgaagattagaagcacttaaactatattacagggttttggaagcaatgtgtagagcagaggctcaaatactgcatgcaactaatttaacctctttattaaccaatgagaggtttcatagatgcatgcttgcctgctcggcagaattagttcttgctacacataagactgttacaatgctgtttcctgcagtgctggagaggactggtattacagcttttgatcttagcaaggtgattgagagtttcattcggcacgaagaatctctcccaagagaattgagaagacatttaaattccttggaagaacgacttttggagagtttggtatgggaaaagggctcctcaatgtacaattctttgacagttgcaagacctgccctctctgcagaaataaatcgcctttgtttattagcagaaccaatgccatctttggatgcaattgctgtgcatataaacttctcgtctggagcagttcctcccatacctttacagaagcatgagacttcaccaggtagacatccaaactagattccttggtgcactaaatggtggtgcatgaccgtattcacttacaaaaaatcattagatgtatcgaaagtaactagtatttttcaggtaagaatggtgatatgagatctccaaagagattgtccacggattatcgaagtgtactagtcgaaaggaatacatttacatcaccagtaaaagatcgttttctagctttaaataacctcaaatcaaagcttcctcctcctttgcaatctgcgtttgcaaggtaccaagttcaaccctaggaagaaaaaatataatttattttcagtttccttttacatactttcttcttccaaatgtttcctgagttgatattattttgtggtttttgttgaacagtccaacacggccaaatccaggtggtggaggtgaaacatgtgcagagaccggaataaatgttttcttcagcaaggtattatcccagtccaaagactacttccattccaccgactcaagaatctaggagattattattattattgctgttgctgtgcttttgttgttgttgttgttggtggtggtggtggtggtggtgtggtttttcttacaatgatatatcaaacaagtgggtactcaaaaacaaacattaaatggtgaaaaggttgttggaggtttttcatgattatgacgtggttgacatttgacaactttagatcttaattattaaaggcaaaaatctactttctaatgtaagcgctattttgttttttatgcttttttctttgggatttattgttgtggtgtcatacctgaattacctttaagcaaccttaggaatcaattttgcgctgtagttcctctttttagttctgacttacattaacagccttatttatatcttgtatcatatagataaataagttggctgctgtcagaatcagtggtatggttgaaaggcttcaactatctcagcagattagggagaatgtctactgtctcttccaacaaatactcagtcagcggacatctctctttttcaaccgccatattgaccagataatcctctgttgtttctatggagttgcaaaggtgaattattttagtaaaccaaaacctttgtgaatatatagtcatattgttatattatgtttacccgtcaaatgttctggcttgcagatttctcagctgaagctcacctttaaagaaataatttacaactataggaaacaaccacaatgtaaaccccaagttcttcggagtgtttttgttgattgtccagcaacacgctgcaatggggtatgttgcccaatctaaattctcttagatctccagttttaagctttatctaatctttcaaatgcatggctggaatgcagagatctgctcaagatcatgtcgatataattacgttttacaatggaactttcattcctgctgtaaaacctctactggttgagcttggtcctgccgcggcaaacacaaaagccaacagagctcctgaggttaataataacaacgaaggtatgtgtttgtgattttggtctgtatgccttgtcagtgtacttttgtcaagatgcattgccattctttgaatacccatccctgataagatcattgttgtggtaaatcagctcaatgtcctgaatctcctaaggtgtctccattcccgagtctccctgatatgtccccaaagaaagtgtctgcatcacataatgtatatgtttcaccattgcggtcttctaaggtatatgtttaaatattattcagatatgcctgtttcttagtttttgaattacttaatattgcatgctttaccaaactcaagagtcataaaaatggaaaagaactggttgaaatttgattaaattttcacatcctcttatcccttgttagtggttggtatgaagctcatatgtatttcattgttaataagtactttttaatagtactttgggcatgttcaatcatgatatttgctagtgtgtatacctagttgcataacatattttaatgctatgattggtacttatgcatgttttttctttggggttctattgatcaccatttgtagacatgtataaaaagaatagcttcgaaaaatatagataaatatatgctctttaaataatgaattcataactttgggtacacttgtgatcattaaaacagatggatgctctaatctcacatagctcaaaaagttactacgcttgtgttggagaaagcactcatgcatatcaaagcccttccaaagatttgactgccatcaacaatcgattaaatgggtaatgtctgagctcttctatatgttgtgagggtgttctcatttgttcgagttcagtagttaatattttcctatggtatccagtaatcgaaagatcaggggcattctcaatttcgacgatgttgatgctggcctggtcagcgattcaatggtagccaacagcttgtaccttcaaaacgggagttcagcatcctcatcaggcgcaccaccgttgaaaaccgagcaacctgatttctaattcgacagcttcccaacctttttttacttttacttttgctgtatgtaaattctaatctcatgttaatcttaacctcccctatgtatcttttattatagtaaagtaaagctttcgtgacacggggtaatgtatgatgagcggtaagttattgtagaaaggccgccacccgcccctacgcgcccctcttctttccatcatgtgctgctgatgtatgttatttgttagtaattaggtgccaaacttggaaattgtagcctaatctctactcattcaataaaaattgttgagttgaaattagagtttttctttttcagctagaaagagtgtttagaaatttacttaagagtgttttgtaggttggtgtaacacgttaactgaccattcaggaatggattttatgattgcttgtatttaattgtgttattttgttttattatttcagagtaatactaaatcacaatatcaattatgggtattttaagtggagattatataatattaaattgtagatagtgcatttatacgagttgttaaaaatgtctatcattactctattatatatttatcattattctattattgttggtggaatttgttaattaaagaaaggtgaagggttattttgtaatggtcacccaatgcacccataaaaggggaaatattgctataattttttatttattctttatatattataaatatatttaatattgatttgagatgggttctactaatttaaaaagcagtgccatatatgtatgtctaataattttggtgtaaaaggtgtggagatattattactctttttcttatttaggaggagaggtgacttggccacaaaattaataaaatttgtaatacaattttttttttaatttaagagagatttttaatctattttttttttaataattatatatgttataattttttaaattttcaaaataaatgttttaaagtatcgaaaataaataacaaatatttgttgtgactgtttttctgcttaaactttattatacaatattaattaatttatttttagtatttatttttgaactaatataaatataatactatcgtgcatcattttgaagttaatattgccactcttattaaatgagtgtcatacactaaacaaaagagtgtaaaaagtgttgcaccataaaacaaaatgttttatttaattttctctaataattgaaaatcatatatcgttttccttagaaagtaattattattattattataagttcacattcataatattattattcaattctgtttggttttattttgttttcaaacttaatttaggaataaaaatatattcatatcccaatatggattccctatgtcccttggccgaaataacgattagtgaaactttgcttttgtagttttgatgataattcacaacattttgcaccaattcacttcaaaaacttttataggaaaggaaaaatggttaaaagaacaacaagatgaagcagaaggcctcgaccaaaatcgaacagcaccaacagacctgaaaagtagctgctgcctttgaaagaatcagatcatgacatattaaaaagttgcaccggccagctacgttttcgaccatcagggccaactccgacagtttccatggaaatgtcaatgctgcgatgctgtgatgcacgggcaatgcttatacgtagactgatctttacagcaggacagccatcactaccaatctctgccgatttgtccaagttagatttacctgatgaaatggcaattggttcgcggaatgttaggattgtctgtgaccaatgtgtttttggggtgtaaggagaagtggacagattggctggcatttctttgcagaatctgcttgtaaaaccagtctcaaaccacaaaagagcaccgtaacaccacgttgttttggatgcaaaatcaagtgaattggtttctgtactgcacaaatttggttctaactcaacactggctgtaaaatccacttcatctggtttcatcgtcaccaagtcgaatgtctgaatgggaaaaatataaaccaaatcaagaaaggagtacaagatgtttaataccgaatcctaacaaaaaccctaccacataacgtggaaaagaactaatatcttaaatatcaaataagcactaaccttaagaactgcagcatttgttactaaatcatctccttcaataacatcaacgatcggcatttgagcagcaccttcaacaagttctttgcctacacaagacatgttgaaaccatatacattttcccaaaaaggtatactagtgccaccttttccaaagccagcaacaatctaaaggaaaaatagaaaggcgacaattagcaacagttgttgggataaaatttaatccgaacaaacaaggaaacatatagaagaaactcacaatggttgctgtgtcaggaagtattgcacctccaggttttaaccacttatcccgtgcataaagcacagaactaagcatggactcatagagtagacaatatcccatccattcacttaataatacatcaacactatggggttcaattgatgtttttttgtcaagttcctcaaccatacattgaacaatttctactactccagtggattggctagtaccatcagttggtttcttaatccgcaaatgaccattttcttttgctatctgcaattaaaaaaaatctgagaagcattcgacacacaactcttaaaatcaagaggtttaacaacaatagtattgaaaaactttacttgagtagcaacagcagccatcttctcacttgcttcaactgcgataaccctagatgccttggcttgagctgaaaataaactaaaggcggaaaaagattagatccaaacacacagacacatagagagagacataatacaaataaaacaaaaatgatcttcatggtaagaagtggaatattaaatataaatgctgatttaaatgagtactagatgaaactccaaaaagcacccagtacaaaattccacattagaaagctaaacgaacgacaaactatgatagtgttaatgatgatacagtgaccaagggggaaatgtctcaacttgatttgctcaaataaacatatggggtaaccaaatacagctctaaaacttaaaagaaggggtaactttggcttatctctttaaattgatctgaaacagatacctacacgacaatcagcttcagaaaagaaaactcgaggaccaatgagagtagtataatacaaaaccatatcagagttgagaactttagtgttttctgaatcaagacataagctccttagagcaaatacgtaattacaagaaaaattaaaccagtgtttaggacatcatcattggacaaagtaaaggtcaaatttttccaataggaagaacccatatctacacataaacacgtataacgataaatacacaggcagagggagccaagccagccatctcaccttagtatgccagttccgcaaccaacatccatcacaactgcaccattcaggagagaagaattgtccacaatagctttcctataagcatccgttcttacctgaacaacaaccaaaaaaatcttggtaaatctacatacatacacacaacttgcatttagaaggttaaaaatcaaatcttagtcatccaaaaacccatgccttatcactaagcatctctctgtggattccaaatgagctatacgacccaaaataatccgcattgacaatcttcacatccttcagatcacgatttggaaaataagctcttaaagctttatcattagtatgtctttcgggttcccttgaagtagacccattcacagcactctttccagaagaactgcccacattcaaatggctacccgaaatagagtcaacatcttctttcccacattggtgatatgtatcctgaatctcactatcaatgcaaatatctttaaacttcctcagattggtcataagttcctctttctcggcgatatcaacaacaacaacatcatcaccatcatctacagcttcctcatcttcattaaaactgtacaagagtgaatcatcttgcaaaaaaggttttaggtattgatcattctccaaaagaggtttaatgtcatcaagactgactgcttcatgtaaatgattccaaagatcttccttagactgaaaattcagtccacaactccaacatctcttttgggaaacctggtaattcaaaataataaataaatacaagtacttcacaatcctagctcaattcactgaaaattgtaagtttgttcaagaagtcaccattttggtcaaccattcaatctcaagttcaatatcaaagaaacccaattgaaggaaaatgggagtgagagtgtattgtacctgggaacggacatagttaatgagcttgaaagaagcatagaaatccaaagtaagagttttcctaatgctctgaaaatcaaaatggtgagtggaaatgcagtgatggaacaaggcttgggtatcagtgtaagtggaatcgcagaagagacagagaaaggcagagtcttctgtttcgtcttggtcttggtcgtcttctctccagtcatcccagccatggaggtcatcatcttcttcttcttcttggtcttcgtattcatcatcgtggtcgtcttcttcaatccgtttgggtcggagtgtttcttcatcgttcgccattactaaccgaaaatggtgttctgttaaaccctaagcaaaaccctaacaaccaacaacatgtaataataattctcaaatcaaatctcaatacatatatttacttagacacacttaactaagttttttcttagccaaaaaaaatatatatctaaactaccttaagtttattattattattattannatttttttttttgtaaatttgaagcatgagttgaatatttccgttaaatgactattgtgtacacccaggggcggacgccgcagttgcctctcgaaaaaaaattagaaaaaaatgtatatataatttaattaggtacgacacatatttgtaataaaatcattatatttataggcataatattaactttaggataatagttaaactagattacatatagggtagaggttaatggtttaatttctatgaagagcattgtttttttttctttttatgtttttacaaaaaaaaaaaaaatgcccccactttaaattctggaagtaaatctttaaagataatacaataataatttagttgggatctaacagtgatatccaactgacacctcaaatttgcaaagaaaaatgaacataaaaaattttgccacaaaaaaaaaaagataagtgtaaaaaaataaaacataaaagaatttcgctacaaataactcttttcttttctaatataaaaagtttaaaaattttatttcacgtataaaataaaagaaaaatgatcatgaaaatctatcatgatattgtatcatgaatgacatgtcatgttataattattattttattaagaaaaaattatgacaaaagttcactttaataccgataagttttcaatctcaaaaaatagcaataatagtatctaaactcgagatttttataagtccgttggtcttcattttaacaaattcgttagttgctctcaaaatgtcacgtgtcgaagcaacataaattctcaaaaagttcactttgatgtaaataagtcctttatctcaaaaaattatagttatagcctcacgctcaagattctcgttagtctgtaggtacataatttaactattacatttgtagttcttaaaatttccacatgtcaaaattttatttgtccacatcataaagaaatgattaagattttaataactttttttttattaaagataaaaaaaatttatatataaaaaaaataaaaaattttacaaacttctacaattttccacccacccttcttgctagtggaggcttactgtaatcccctactaatttaagcgcgttacagtgctttcttaattattgtgcgttcctttactaataaaagtttttatcgaaaaaacgtatttaattaaaactttcttaaataaacttaaactttaataattaaacataatttacatagttttgggatcccgatcccgttaaaagtttcacaactgctttcaaaatatatttattacaaagttgttgcctagcgactattaaaaaatgagtctaacttgttgcgaagacccgaacactccaagtctaattttcttgatatgtacaatcttcatccagctctagactcattctgatttaattccggctcttatctgcacatgcaaataataattgtgagtcaaaagtataaaacataaacatgtaactgacgtataaccaggcacccatacacctacctataggtctaaaactaggtcatgaacgttcttgattaaagtatgactaaccacgaatttagcctatactcagtactctagtcgtactgatgtggtagcaattagttcatactttctgaaagcctagtatatatttattgatatctcagtgcaactctatgtacacttcaccaatatcctgaaatgctaatccgatggctactacttcatctagcatatatctattgatatctcagtgcaactctatgcacacttcaccaatatcctgatatgctaatctgatggcaactaaacatgcatgctaaatatgtatacatatatgcatctatttatactaatcttaccttgattctgaatgaaagtgtactggtaactctgaatggatgctaaacatgcatgctaaatatgtatacatatatgcatctatttatactaatcttaccttgattctgaatgaaagtatactggtaactctgaatggaaactgttgctcgacgatttaaggccctaagtcacaaatttacgtaaaactgataagtgacccgctaactcacttttttgaggacttagacttaaaactaaaaaaattcttattgataaatactgtggcaatacctgaaatatcgataaaacatgaaaaactaaacactaaaatttgaaaaatctagtgaatcgaaaccccaaacggtgaactattttatggggttctgtcttggaaaacggttcaccatttctggaaaaacaatggaccatttttctacaaaaaaaacacccaaaatttgattccaatctcaattctaccccaaatttcgtgaaactctccaaaacacctaatttgagtccaataaacatatttcaaccacaacaaaacccaaaaagcctctgaattgagttttgccattaatgagctaagtttgagctcataaactcaaacttaactaaccaacaccaaactctcaccaaaactagaggaactagctccaaacatcttcaaacaacattagaaatcaaccctcaaacatcccaaacactacaaaaactaattctcaaaacagcatgctcaaacctaacttttacacttaaaaaatcaaagaaaatatgagtttaaaagcttaccttagcttggctatcacaatccttgaatcatacattgaatactccttgacttatggtctcaaaatggagaagttggctttttcttttagactgatatttatcaataataaagcttttattttattcagcaaagcttatcctaaaataatctaaaggttactacaaaaaatccactatctcccaacaaaatcaattaaaggccaaaagactgatttgccatttacttcactaagaagtattctaataacttagggataaaatagtctaaaatcataaccacgtgacatcccaatattccaaatgtcaaattatcttacctcgctaattctaagatactcaacagtatttaagtgactctaatgaccaaaccgttgcactccactatcactgggcacaaaacatgaaaaacataaaattttatatataacatatataattacttagaattcaaatatatctctataattgagaaattatttttatatacctatttctgacaataagccctaatttctacttgaaaacacataatcacaacacttactgcagactagtaccatcccttcatctctaccttcttcctcgtcctatcccactatcccactatccccaaaaattaatttaagtaaaagaaaaaagaagagatatgatcgtgataggaattaggatcttagagaaagataaaactttttttttttactttatatttctaaaaaatcgagagatatggatgtagtatgcagtatagaaagagagatatgggtagtggtgagtagtgagttttggtggccaattcttgacatcgaattttctggagtaaggtttactcagacaattttttgtttttttgtttttagagtcgcccctattcttaatggaaattggagagtttcagtagaacaaatcgggactagacatgttgggctgaagtgatcgggaagaagaagaaagaaaaaaatatgaaagataaaaaaaaaataaagttaattaattaattttaaaatttatttgcaaatttataaaggaagagttcataaatcaaaattttgactaataatcatagttggtaatacaccatacaaaattgttatataaatatagagataaccgttatacaataatctggattaactagagcctagttttcccaaagtagatgtctttgaaaattggcatgcctaaaatgtagaagcaaacttgttttatataaacaaaattgttttgatccaatccaaccacactgtctcactattcttttcaacgcttccgctctgccctccatttgaaaaccggtttggatgttggcgtgacaatctcatcctcgcgtagtttgcgcttccgaccctttttctacaagtttataaagaatggtttatttctagaaactctaatttagtttcatatagagaaagaaaaacatggaaaagtttttgtatgtcattacctgcaattcctgctgcattgacatatccatgtagattttctccaactcattgacccttttctttcttgcttctagttctctgtaggaagctgctgttttcctgtccatgaaagataaaatagcatgagacatgaaaataataggtgatgtttggagaataataggtaagaactaattaagaatctaaatagtgagtttagtcagatttcacaatgtgcacactgacaaatataaaaattctgttctacaatggttataccttttaatacgctcaggaatgtcctcagacgctaagggtattctaggctttgaagaacgtgactggatatctttagcctcctccctacaagaaatgataaaaagaatttcagccgagatatattagttcatccacaaaagaaaaatgaccatgaaaagattgtatgagtgtctgaatgtgatcacaagataaaaatagttgataatttgaaattgtaaacaacaaacacatgaaacaccaagaaataaactataagtcaatgagattggcaccagtgaaagatttgtaagatgttcactttgttaatagtattccaagtttcccagtaaaaagaggtttgagttaaacttggtacaaagaagaactcactaacaaccaactaatctatagttggtaaaggaaacaagtgctcttttcccaaaaaaacaatctgaaaagtgtagtgaacttttctatttgatggtctattattagtagaatgtaaactttgttaatgagattgacaccaagaaacaaatttttaagctaatgagatttgcaccagcgaaagacttctaaaatgttcactttgttaaaatttcccagtaaatagtggtttgaggttttttttttttttttaaatactcaaagactaccaactaatctatcgttagtaaaagaagagagttctttcttccccaaaaaaaaaactatttgagaggtaggagatctaacctgtcttcagcgtagtaaacttttctatttgatggttcgttatcaatagagtgtagaacagcattcagcttttcgattttctgcaacaaacaaagcacaatcaatctacagcaattttttttttataaaactaggacgataaagacaattattacttttgtctctttttctgataaacctaatcacaccaaatacatcattactcaattattacttttttctcactctgaactttctgaagtatgtatcctatatcttggctcttcatgagcataagctcttccggagtgtatttgtttgcctcactcctgcattaccccccaaaaaaaacactttcagtaaattaatgtactaaagttaaaggtaagaatatacattgacatagagaaaataacaaacaacaaaacaaatataacttactctaatttatggacaccgccaacagttcgagtgttgatcatcttaaagtaaaattcatcaggattcctgaaggaagctttctctttaagtctctgagaaataaacaaatacataatattagaataaacaaggcccattagtattaccagcagaaacccaaaaactaaatatttgaatacacaaaatttatcctagtgtttacccgtaaagtctcctcctttttgtggaatacttttgcacgctcaacatagtccttgtgtttttccaaaaatccaaattttttccttgcttgtctgacaaacaacacacatagaccttaatatgaaaaaaattacaaaaaattggcattgtttatttagaaagtacacaataagataattatgtaatgacttacggttgagctcgttctttatgtgcccgtctgctaatggcattcctcagggatgacattttgttagttactaagtgtatcactgaaaacagaacataaaaaatgttgattcgaagggtaataaaaacaattggtcaataatttcaatcaccatatatacaaaatgttttggattccaaagccaaattactaatagagaaagaaatcatactgctagttcttgagagtgaagagagaacctagcagataggggtgaactagaccaaaacccctatctatacttgtgaaacactcaaaaaatgtaaaaaaacagcagtagaaaatctccaaccaaaagcttgatttcaatcaccatatatacaaaatgttttggattccacagctaattactaatagagaaagaaaccatactgctagttcttgagagtgaagagagaacctaacagataggagtgagctagaccacaacccctatctatacttgtaaaacactcaaaaaacgtaaaaaaacagcactagaagatctccaaccacaagcttgagtgttctccaataattaagaaaagatcatgttacagcatatcaatacttcaatttatattcatcatcacttcttttccagcccaatttaagaaaaccagaaacactagaaaccatattgaattaaagccaaatgactccaaggcgatacaacggaaaggaaccaatcatacactgcatcaaagttaacttgtactaaaaaaacaaactttacacaatgctaaaaaaacaaagtctttagaaaataaagccatgcactgatgtttaaatttcacatgaacaacagtaaaattatatatcaaacttaacctaaaaccaattagctttattcaaaactataacaacacatacatcaaattcccggatataaagaaacattcttcttcgagttgatttggggaaagaacaaattaccttgagccgagacaaaagaaggagttgcagggtcgggcggtggtgaggggtcgagcggcggcggtgtacggacggcgatgagatgagcggagttgaggtttgtggtttgagcgaaacaaagaaaggggttttgattgttctatttttgattgacgaaagaaaaagggcaaatatgtaatacaccattttagtggggagttttattataagggtaattatatttgcacccca

SEQ ID NO: 36600 - DNA, 2180 bp, Cannabis sativa
ttttattcattttaaattttattccatttcattcctattcccattccagttttcattcctttcaaccaaacatgttattacactttttgcctaatagtccctcaatcatctaaacgctagcacatacagctatgatcaaatcctaaaaaatctacactccacccgcaaacaaccattaatgatggaaagacaaagaataacagattcaagagttcagttcaacttaaccagaacgaaatgatataattaataacttccataatatagttagtttagcaaattcatctttggtccaaacaaaccttattgcattgctttgcattgtgctcaaaactcccacaaacaaaacatggtttcttccgcctagccgacttacaattcacggccgcgtgtccttcttcaccacaattatagcatgttccccaactattatctggaggatcgaaataccttggccctcgctgacatagcagatacacaaaactaagccttcgtacagatttaaacttagattttcaaaaggctttcagagcatgaaaaaaataaagtaaaagacttacaagaagtttacgaagcacagcattgtttgcaaccgcaactggttttggctcagtaacctcagttaccactacatctatgtcttctttggtctcaacatcctaaagcaataacaacatatcacaaatctaaccctatcaaaaatcaaccaaaatctttattgtttgacataataaactccattacttcaatcgaaaactgaaacaggcattaaaaataaaacatgcccattaagtgtccaacaaaatcagaacttcatgtcaatcaataaaatttcattcctcctaagcccaaaaattcaaaagtaaccctgatttgtattccatttcactaattaatattgtaacttcctaacgcaaaaaatacagaccagtactcacattgtcgtgtgcgatttccgtcttctttagcttcttcttctttaccttcttgatcagtctttttttctcctccgtggcattgtttactactttaacaccagcaacaccactggaaggagtgttgttcctcacagagtcaactccattagaggaaaaagaaacggggtcgtccgggaccaacttcgccgcacgcatcaatagagctttctcgacaattttgagacttaaatcttcgtttgcctcgtcttcttcatcatcgtcgctgatatttactacagatttgttgggggtttgaactcgatcatcttcttctacgaattcacgatcgagcttccctctttgaaactctcgcttgcccatgagagccttgactccgagaaggcgtaccggcagtgagatgagattttcaatattgtattgtacataggctttagggtttccagattgcttttttgtatttgggaacggtagcaattgaagtacaaattaaacttgtttttgttttctctgggaatgggatctcccttaaaacgttgcgtttttagatttattttcaaataattccgctcgaccccgttaataatctttttgttttatatttttttttttttttttttttgtagtaatgaataattttattgaaatttgaaaataatcaaaatttcatacaaaaatacattttattaggaattattatatggaaaatataaattgacactttatttataaaaatatttttatgaggtgaggacaacacttatactttttatgtgcttttaatcactaaaatacctcttacactattacttacacaatcagacgatggttgcttggtggttggttgaaggttgcatcagacgaaggtttcaatttgttagcaaaatgcttatgcaactattatgaaacatgaaaaatcataatagtgtttccacgtacgtaattctatctacatattacttcatgatttaatatgaacaaatttaccttaaaaattcggaaaacaacgaaaatatactaggataaacattttactatagtattaacgtaatttttttttagattatacttgagttagctggtttgggaactttagttcaactttttgaaatctgcatttcatggatctgaaaaattgatgtcaaaacattatttttatgcaaattaaattagattttcagttaaattttagtttcgtagtagtttttctaaatttttttcatgaattcgaaacagccgctgttt

SEQ ID NO: 36601 - DNA, 2450 bp, Cannabis sativa
  modified_base (2400)..(2405): a, c, t, g, unknown or other
aaaaaattattattaactaatcacaagaagtgactttcttcatgatacctaataacaatgtggtattagtaatcacatataagaaaagggataagaagtttgtcactttctcaagaaaatgaaatgaagaaatggtgttttgtagtgtgagtaatatcttatttgtgtaatgggtgatgtgtcctatcaaccaagcagtgaaaccccaaagccccaaccagccaagtccaactattagctgaggatatgccagattatatgcatctcaagagtgattttgtcttgggtgttggcagagtcacatgtgagaccacactaatctgcattacaactctacaagtccccatgtgaccagctactctggccaccatggatgtagtatgcacacatcaatttttcattataaaaatatcatttttgaattttcagtacataacatactatatgttttcattttgttattggtcaatatgaacatttttataacacatgctattgtttttatatctctttaatatttacatagttaagataccttcccaatgaatttctagttgtttattaatttgattctgaacttaaagcctttatctttgtttccctagagaatgagtactcccaagtcccaaaaatatgttataaattaaggtaattatatatcccaaaagttttatttgacaattatggtatcatgtttagaaaccactttaatgaaaaaaaggtcaaatttgttaggattaccttagactttttagaagcaactcatgtgcaaatccataagaaatttcctaacaactcttatcattttatatgaaactctatttagtattatatattagtcaaaagtaaaagtacttaaagggggtctcaaatgacattaaataatgattaattgcattttggctttatttccatgtctaataaggaggacttctgcaaaaattaatggactcaagaaatgttttgtttttatctaaaaaataaataaataaatttgtttgcaaatgacattcatattgcatgataaagtggcctttttaggatgttatattcttaataataacaagatatttcaaagagccaatttgagaggacaataagctaagtgacactttgccattttctattctaactttagtttagtgatcaatctatgcaatatgttccacctccataacaagttatcataccattgttttcacataatgtagttaagagaaagggaaaaaaaaaacaaaaagaagaaataaggtgaaaatttaatatttgatttatttctgctttattatgtgaattatttgttagcaaaaacaaatgaattattattaagaggacctactcattgggccactacattacaccaagaaccatatctacccaacatcatctatccatccaaacctcaataaagggtatcattatccccctttctttctttttattattatttttctttaaataaaaaattcttttacacatattcaggtggataaccattattgattgaataagttcataattgatacatgggtaaatctgatgaagtttgtcacttgggatgaaatcctttcattttctgtttttccagagatgatttataatgacccatatcattgattcacttgccgacacaatagtaaaaaatgatacataacacaatttgcttattatatagtagtgagatgaggactatcattactctaattctcaaactaaacgagcagcaacacgaactacataattttttataagatctccctcgttaatttgaaagtgttgctatcacttcggaacggtttaaattcactagactagtgtcacaactagactaactaactaattagacaattacaactagtgttcatgagaatgtgagagtgtctaacatgtttgtttacaaagccctagcttgtctttttggtgaaacgtctaattttttgtattttaatttttcacaaaattggaccaaagattttaatgcaaaatggaccatgatttgactttacctttatggtgttgtatgtatcagctatttataagctgtctgtttaataacctatatacttgatgtgtgtatatagtatatttacttatccatatatttatgtataaattgttcttcttctttatatagtttctttctttataattaaaactccaacaccattgtgatgattgattatataggtatgtgaactaagaggtcatttttattgtatacatgtttcattccaaatattagattattgttgaaatttacatatgattcttgatgggaagtttggcttgacaagaaagatatcatatgacattaaggacttccaattcataaaaagctcttctcgaaagagtataaacatatagtgcatgtttgacattataactaaaaaactgtttttnnnnnntaaaaacagaaaattgttttttggaaacaatttggcttgtttggc

SEQ ID NO: 36602 - DNA, 5150 bp, Cannabis sativa
  modified_base (3450)..(3469): a, c, t, g, unknown or other
aataaaaatacaggcatcatgccatctgctgcatgcactctatgctctcaccatgatgaatcggttatacacgctttgtttctttgcaggacggccaagcaagtttggaaaaattgccaaattgactttactgttgcctgttataatacatgcaaagattaaattttcatgttacctcagaaaatcatgataagggacctaagccagcatctgttgctcttgggtgtgtgataggaatttcctatcattacagaagcaaaatagaggaagaaagagcaacaacaatggaaaatagctagtatattgatattagagtgataaaagagaacaaattgttgggtattcgacagacccagtcgtctcccaagagctaaaagctccttaactaaatcattcacacccaaacccttttattcttctaatactctcctatatatactctctcaatatctctattacaatgacccatattgatataccctttttatttatcctaaggcctaacaataccgaccgcctgaaattcaccttgtcctcgaggtgaagaagatcaacttcgatgcgtgtagtcctaaactttgctctacctctgtcaaagaaccaagccagcaagttgttcaagctaaaacaccattcaacaagccggccttgctcgaaaactactattgataatcttcatggcagtatgttctcgagaactcaaatatgtcaagctttatttgaatattaccaacttgaagaaatagaagatatgactcttgcttgcgcatgttttgaaatagctggaagatgaccttgagtttccagtgtattactaggaaaataaatctttataagttgcgcaatggttgcagtgtgctcactctcttcatactccctttcattcccttcactgatatcacaaatctttatagccatcttccctagagctaagatttctcatattttcaggtctactaataatttggcaattgaatttagttggaggaaactccctttccaatagactgtctcttatgttatgtatgacttatccggattaatatgtaactgcatctttttctcaaacacaaaaaagttaatcagggcacaataagaaggaacagttacataccttatatcaataataatacaaggactaaaataattttaaaatgaacaatttatcatattttttctgaaaaaaaaaatgtgccaagacactgaaacaatttatctagctcttggctagtgtcctggttctatacgaacattacactaaacttatgtaaatctaatgatcttgaagaatttaaactggggggttaaaaaggtttagcagaaaaattaatataaaggaacaaaaattgacgatctctcatttaccaattaataattctgaaatttacatgtctgtattctgtacaattataagcaaaatctcaagacatgattgtgtaaattttcaaaacaaagctatatcataacacaagcagctagtttataataaatgcagagtctcgaatatgtatttttcccattcaaaggcatcgactctttgaacttcttctaccaaactttgcagcccttcagattgaggacttccaagtagatgtgccatgatatggagaagaatttggcaagcatggagttcatctattttttgtaaatcagttaattccaagcagagatccttccatggttggtaaaatgaccttcaaaaagcaatgtgcaagatcaggaaagtattcactaaaaaggtaattgacaggggattttcatgagatttcacatctataaactgatatgcaagtgaaacagaacccagtagtgatcatctatagttcatgatttgtttttaatctccgaaaatatcaatataaacgagaagtgaaaagaaaggaaaaatcataatgggcagaaaaataacaatgtattaccatctccatgcaggattagcttcaacagggtagcgtattttcaaccacagtgattccaataacagccgaaccccatttttatgtgtatcatctgaataagagagaatgaaattgtaaataaaattagtgaaacaataaaataagcaactgccaatgcaaaagtaaaatgtcaaatgacagtgtcatttaatcaatgtattgcttacaattgtaaacttcactactaaaaaaaataaaggtagtgcttacaattgaatcaaagttgtcccatccttaagtagttattgtttgactttcaagcaaatggaaagaaactaaaatcaataataattagggacatttgcggtgaaacaccttaacatttacaattgttacacatatgaccctaattaaaaaaaatgacggcaaaagtaccttattttatgattttgttgcagtcgtactattttttggccatcaagtgctagctcagaaacacgtgacgatataattggcacttaacagccaaaaaagaataagactgcaacaaaattgtaagataaggtatttttgccgccactttttttattagggtcatatgtggagatatcctttataattattatttctaacccattcttattgttcatgcattctttttgtggtttctctcttaaggcttgctacctttccaatggtgtgttaagaattaagacttgcaagttagtgagttagattataatctgtcccctagtttagagctggttttccttgagctttaccccgaggttcctgcctaatgccttttgatgaatttcatcaaccctaacccgaaataccaaatccagattcaagtaattgaagtagccaaacacacgaatcaatatacctgcaagacttgaggcatttccaaggagaatactaagagcagatacgacagatggtagaactttgtggttggtgcgaacaagcaattggaggtagagaattgtagaagctaaaaactggtgacgctgaattctatcttctctgccttcttcacattcagtttcagaatgttcaaataaactcaccagatcctttaagttcaaccctagctttggatccaaatctttggattccacattaagtttccctaggattatggaagcagtaagccaacgtagaagttttgatactagggattcttcagattgctcatcctttgaaatagctgagagaatgtgctgaggttctttgttttgatgcaattttgctgaatcagcttgcaaagcagaggaaattgcccatccaatgaactttgatagcttctctagactctggaacacatcaaaacaagtattcattttagcaacagttaaatcagatctgtcagttgaagaaactgggtgaagagagaagataattcattgcaaaaacaaagatcattcctttaggctgctctctcatgttcaggaatgcacgaagttgaaactttctttataaatgatgaccttaatatacacagtaggatactaatagacacacatatgttatatatatatatatatannnnnnnnnnnnnnnnnnnntatatatagagagagagagagggagggagggagataccatgcaaaacacagcagctggaggtgtactcatgagtatagctttgagcccaagctcaggatcacccaaagttattgcatcatcatccgtacgaatagcctcacatatttgatacaaaccatccattgataggttaaactgtggctgatatattttccttttatgggatatattcaaagttgatatcataatttttagaatcaaattgaccaatgtcacatgatcctttagcaatatcaaaccattaaccaaaaatctgcacaggtgagacataagttccatgagctgttcaagggccttcttttgcaaccactcgattgtgtttctggagaacatgatattgtagacagcctaatattgtaatgaagagaataaaatattttatcagtcttcttttcgtctcctatctaaaactgctcttgacactaatattgtaatgaagctttcattaacttactaatattatactcatcaaacacctaacaaatctttgccaagcatttgatcacgtataaaatctctgatacaaacatttgaaggaaatagggggaaataaatggttctttgcttttacctgtaacactacagtcaattgcatcatgaaaatgttcttttcctctctagagttcattttactgaagatcgagacaacagaagacaaccatgaaaagagaccacaattttcaaccagatgtcgagtcattttgtaacatttgagtgatttcttcaatatctgtgagacaaatgagaaagttctattaattagaaagcttgtaagcaactctgtcaattaactatcacaggatcttaaaaccacagaacatgatgctaaaaggcacaccttaaatttgttatttccaaaaagaaaagtaaaaaaacactcacaatattaggacaacttcacattcaaccaaatattgctatgaactgtacaagctatatacattcacacaaaaacaaaatgataacttactacaagctaaaaggtgcaaaagtggcaatgcatattcacccatacattttcttagattcgttaactaaagatcttttttaactttcaagaacatcaataactattttaattctttatgaccaaaattctttttctactttcaagacctcaatgacaattataatcctttacgtgcgtgcaaataatcatttagattggcaggtgatgcatatttctctctcatatcgttttttggatacaatgaagatctgaacccttgccctccacatccacacaatcacattcaaaccatttgagcccatcaaaagtggcatgcatgtttctcatattaatgcaatgaaagtataattttctcagtttagtagcaatagaatttgggccgtctatacaaatagggtggttaagcatgaatcaaggccaggatcctttaaataggtaccagaaacctttctgattcagaaattatacaactgactatatagttttgttccattgcaattacttagctttttccaattatttgtgtatagttgatctgtaaaggacttcagtacggtgtatatttcctttttcttgtatattatatgactgtactgtgactatgagctcacactattaatggagtagtactttccaaagacaaactcacaaattaaaatttgaaaacagta

SEQ ID NO: 36603 - DNA, 7368 bp, Cannabis sativa
  modified_base (1753)..(1756): a, c, t, g, unknown or other
  modified_base (4211)..(4212): a, c, t, g, unknown or other
tatatatatatatatatttacagtggtagagattaaattttagagtgggcttagttatacatttaatataatccaaaacaataaatagttagctaaatttaagtagaatgataattttgcaacatcttcctattctagtggtcataagtttgatcctagtttgaaccttatacttcttttgttatttttaataaataaaatgtaaatacacgtaaaaattaaagggcaagaaaattcaaaatatgatctctcatgtaaatttaaaatatcttaaccaattattctatttaattactatgtatatatgaaaattgtatattaatatatttttaaaccgcagagtggactttagtcctccctcaatacccttaggtctggctatgaatatttgtactaaaaaacaaaaatatgatttttttttgaataaaaaaatatgttagaataattaatatgtatatttttttttctttagttaataagatgagatatacatattaacaagttatatatgcttctactttcatatacacttgataattatgaaagaatataattacattgttgatggtataggacctaattatctatttatttctatgtatttacttaattattacattatatatatacctttttcatatttaaattttttagtaatgtaaaatatagtcccatataagtatttctctattggtttcattgcccttggtgcatgaatttggatttatttttgttttttaatttaaaacaatagacacccacaatatataactaaattaagtggatagtcttaaaattaaacccaagcaaccatatataattaaataatttaaagctcacaaaagtaatatgtttttttttttttattatcatgttactttatatttatatatattgaatatttcttttaaaaaatattcaataaaaatatatagcaatcttattaattaaaatttttatatataataaataaaaatataaaattacaactatatatatggagacacacaataagtgagttatgaatattgtttaataatattaaccattaatatatgataaaaaggaattattaaaaaaagaaaatgtggttttgatttaattaattaattaattattcgattaataatcaagcttagttcgaaattattatatttaaataaattaattacagaattaaatgacaatatgatcaatatgcaatgatgacactatatgcatggtagatcatgatcatggcctattattattatttaattaatttcatatgcatgcttataattaattaattaatctatattaattaatgatttataattaattatttaagatcaaacttagctaacaattttcttttacaccaaactgttgacctgtaagaatcaattatccaagttgtctaagcttaatttccatcatgtcaaactttcccatttggaccactctctttccaaccctttcaattaagtaatgattaattattacaaaatatactatgatataaataaaataagagaatccctaaaatatattagaggtgcctgacatctttctcggtgttatatcgctattggtacaattaaatatcaagttccatataacttaaacaataacttttagaaaatatcgctaaccaatcgtacaagatgccacttatagaaggtgctaggcaccactgatgccaaatagcaatgattataaaataaaagaatttttctatttttacacttcaaataatttttttttttttttnnnnatttttacaaaaattcacatagcagtcaacagagtaacttaaatcgcaactaaaatacacatagcaacccacatagaaattatcggagcaatccaaactataatttttttaaaaaataaaataaaaatgatatatgagataattcctctgaaatagagttgaaatgtcctttttgcccttttcataatagtataataacctagttaaatttattaggtctcttttgctcaattaagttttgtttttcccacaaaaaaaaaaaattaaaaatcttaccaatatcagagtatgattatataaaaaatataaaataatttacgatataaatatctaagtttaactatatcgattgcagataaatacttaaaatttaatttttgatatggtaataatactttaaaattattcatcagataaaaaacaagagtatattaggtaaatttatttcttaattatttattttattttattattttttaacactatttaatataattaagcgcaataaatggcactattagtttcacttatttaaacattaattaatttattattacaaattaaatacaatatagagatatattcttctaatataatacaatattattacaaatttaattaatttatttcctaattaattaagtcatgaaacattcgatgaggacagagacagacattcttttttgtccaattaattaaaataataaataaatatttttcatagattgagaccttactaaaaaaacctttacctaaccaaccgaccaagattgatttgctttgttataaatatatatatatatttatatattaattatttctatatattaattatttcatcaattaattaattaattttcatcaatttgtttaaattaatattaattattaagattgtttgctataaattatttcatatatcgatcgtgccctaattatattattaattttgtcacgtggatctcctggtcctaaatatgttttggccacaaaattatataataataatattaacattttttttaaaagaatattatttatggtaacctaattgttatcatgatattgaccaactatatatataatatatatacaatatggtcttcattttcatgctgaagaagagcaaaactatatgttacttttttgaaatttgagatgcaattaataattttgtactatatttatgttagggttggtgatgagaatatatgagctaagacgatttaaattttagagtcctttcaaaaatatataaaaaaaatattgagaaaaagtgttaagagactcgaactcacaccattgtataatgtgtaatacatctcaatcaactaatttatgaatatttggttgttcacaatattttacttaaataaaaatctaatgatgtgttttattttttattttgggcttccaaaaagtgtgaaccttaagtacgagtcggctttgattcgcattttaatataatactccaaatataaccaaacaatgaagttggtaattgaattgtatagtacattccttaaaaattaaggtcgctctagtatataatttatctgtttcggtattcaggagagattttttaatctattttgtctttcatgatcgtatacatgcatactgtagtctgtagttatttaggactctctttgtaaatttttatcggctcaaaaatattttattacactcgtgattatttttttattcttaaacgcgtagttataaattgagctctcatattcaacttatatttatatatttatcggatatgaaaatctaatttgaataggtggccgccccgacccgccccgccccgaaaattcacatattttaagttatagcttctaaaaccaagaccaggttgattagtagttgtattaagtatataattatctagtaattaatattgtatctatagttctaaacattattttgtagagtaattagtaatgtggttaattaatattgatgagacttactcgttatatatatatattttttatattaaatgtgattattatttttttagtttaattttttttttttctgttaaaattaacattgttaaattaattaattaattattatttttttaaaaggatattttaaatatctaaatttaatttatttattaaaatataatttaaataactatttaaaagtatactaaaaattaaataattattatttatataaatcttaatttaaatttaaattaaacattaattcaattaatttttttttttgaatgaaacattaattcaattaattaacatactttataataaatttattagttacaatattgtttaaagttttaaatttatttacttattttattattaataaaaattgttagatatgttttttttataaataaatttaaaattaaattatatttataaatttaaaaaatataattaaattgtattaaaattaatttttttattattannattattatttaaattaataattgaataataataactttaatataactctaacaaacataccttacatgttactaatacctaatatatatatacattcacaagaatataataataataataataataattttttttgatttaagtgtttatatattacatcagcataatctgggactcgaatccaggacctccaacacacacgcattccctacgaccaagctcaagtggtttaactacatgttgtttggtgtagtggtatagtaattatatttattggtatcttttcttacttgggttgatcgacaatggtcctttttgaatattagcttgcgatgaaaagttttgagataattaaaaactcttataataactaacacataatttctgaaattgtcaaaatgatggaaagaatttgcattgcctgattttattttgtaattataaaaaacaataataatagttagatccaataatgtgaaatcatcacatgaaatggatagggtaataggggtcatgaatacatctatatatatatatatgtatatgaaatggtattagggcatatgtatagatatagatatatatatataaaccctagcaatgtatatatatatatatgaccacgtgatgccaactatggtttaaccccacaaagcagccgcccctctaatctattatcacataacattttttcataacaaacaaagattacattgtggaccctaataataataataataataatctactttcattatttccatcatcaaattatttcttcattttttcattaattacacattaatattatttatgcaaaaactatctctaaattaagttgttttctaatttaattttttttaaatattttgtttgtatttgatcttgttttggtttagttcactttatttttagttagaaactaattaaatatctataacaaatacgtactattaaaatttagagtaattttacgatataaatgtttaaatttaattttcggttataaataaatatttaagtttattttttacggtaaaaatacttaagttatatttctaaaacatctgtaaatacctaatcattaaatgtcaagttattatccacgtgtcattaatttatccattggtatatctatgtgacaattaacttgacatttatcaaccaaatacttataaaagtttcagaattatcatttacatattattactgttaaaaattaaacttgtatatttattttcaattgagaattaaacttaaatatttatgccacaaattactctaaaacttacataacacttcattataattaatacttgcttaattagtgagttaaaagaaaatatatattattcgatgagtagtgattgtctaataatttttttgaattaaatatctattagtaattttaatcactatatataaatttatttaaatgagtataagtggcttgaatgaaattataagataaactaacggcttccatggacaaaaataacaaaatgtcattttgaaaaacatgtcgaaaaatataggagcaaaagctgtatgcattaatttgtccaaaaatgaaaaataagaagaaataatcacttatatatatatatatatttatatagtcaatatcaatatgactaagttttcaatttcttcaatatcaatcaatatcacttatacacctcaccatgcacatatcgacgttcctctttattattattgttattattattttaataataaattttatattttgtaaaaattattaagtggactctttattttattaagtaataaatttgattatatatttttaaaatagtactaagtaatatcataaattatttttttgtcaaaataaaacttaataataatacgatctagaggtattatgataaaataattatatattttttacatttattcatgttgggttaattgtctttgagttagtaatactaaaaaaaaatattgaaaattaaatttaaaattctatttatagtattttaaaaaaatactaattactaattctattttattatttaacaaaacaaaaaataaaataagtaactctacaaaatacaatggtaaaataatgttaattattatctattattttacaataatacaaaactttcccatgtaatataccactatcaatggagctccttctgccacgtgtcaataacccaccatcaccttaggtgctaagaaattctctatctctctcttctcatttccttaatttgagaggtccctttctataaaattatatgaaccaaacataaatttggtaacaatatacactttcttttatcattttataacaaaattgttactttacaatagagagacatcaattagcttactagctagagttgctcagccgctacaccccttattatatatatatatacacacacacattgatatatattattaatattaatattatatatatctatatatataaattaatataagataagagaagagaagagaagagagacttcatttgtttttagaccatgctcactattcatcatcaccttcctaccaatttcccaatttttcaaaacaataatatcatttggtacttaaccatatttcttcttcttcttcttctttcaaatctttccaatttttcattcccaacatctcaaatccaaattccccaactgggttttgctcaaaatcacttataatcatcaaatcactaatcaaaatccaatctttataattattatcataaatgggattaagttcaaaacaagtagtgatcaatagcaaagaaagcttaagctttgatcataattggaagagccataattacaactcagccaccaattctcaaccgcagcaaaaatctccggcaatgtcatctcccggaacacggcggaatccggcatcggcgccggcgccggcgccggagcaactcaagtgtccccggtgtgactcatcaaacactaaattttgttactacaataactacaacaagtctcaacctagacacttttgtagaacttgcaaaaggcattggactaaaggcggcactcttcgaaatgttccggttggcggcggccggaaaaacaagcgcctcaagaaatcatctgccgccacagccgccgccactgccgttgccgccgccccagcacactc

SEQ ID NO: 36604 - DNA, 3610 bp, Cannabis sativa
tgtatatggcaatcggtaagggttcatttttagtctttgttgtggctataggttaaaccagctgactcaatataattgtgtgcctattggaatattaaatggttggttttaataataattattttaacctttaatttacagatggtgttgcacctagagctaaaatgaatcagcaacggtctagacgatttagagctgctaaagatgcagcggaggcagtaagatctttttcatgttgttctagtggttgaccattattgtttatgggacttattgcattttctccacttgcttgttaggaagctgaagaagaaagattgaggaatgaatttgaggctgaggaaagaagcttgacacttaaagagaagcgtgaaacttctgactccaatgttattactcctggaactcaatttatggcagtgctctctgtggcacttcagtattacatacacagtaggttgaaccgcaaccctggttggtggtctacaaaggtttgttcaacaatatcctattcagtcctctttcccaatctccctgtgtcttctaggtcggatgattcctttcctgtggagtaatcctctgtgtacattttgtcggtatactggctttcaggatacttttgtctctctaagtttatttatggggctgcaattgggtgtttgaaggttattctttctgattcaaatgttcctggtgagggagaacacaaaatcatgtcatacattcgattgcagcggaaccttcctggatttaatcctaatacacgccattgtctatatggtctggtgagtgttttgtatgttatttgtcactttctttatgtttttacaatgactgattgttaattgtttgattaaaatctgtgttattcttaatcaggatgcagatctcattatgctgtctctagcaacacatgaaattcatttctgtatactaagagaggtcagctgatactgtattctcaacagcctttacaatataaagcccttttattctaggagttggtatcattttcttattctttgtatgcaccaagtaggttattacactgcctgggcaacaggaaaagtgttttgcctgcggccaagttggtcatctggcagctgagtgtagtggtaaactggataaacaaacgccagtggtagatgaaactccaattcacaagaagaaatatcaggttggaaatctaaccgtcaacttttgccgcataattttggttttcttttactattctgatacaattttccatttgcagtttctatacatttgggtattacgagaatatttgcaatatgaactggatattccaaaccctccctttgctattaattttgaaagactactggacgattttgtctttctatgtttttttgttggcaatgactttctaccacatatgcctacattggagatcagggaggtacgtggtgtcaggtttgctgttgtagttttgagttatatattcttcttcattttctgcatcttctgagtcaatagtttctaacataattagtttaatccttattctgtaatctatatgtttaagaaagctgattgtatagattttcatgtcatcttccatgctagcagcaaaaaagaaatatattttttcttctgaataccatttataatcatgtttagtatgctaaactgaacgtgtactctgccagggtgccattaacttgttgatgcatgtgtataaaagagagtttgctgctatgggcggttatcttactgatgcgggtgaggtaattatttttattatttaaaggttgtttacatacttatttagttctctgtgttttctttttaacttatgaaagtagcaattgtgttggtgcttacatcactattccttcagtgagatttaatttgtccatttcatataagaacaactttatatattgtgtaatgttgtactaagtttctagctgttaaaattgagcattggtttatttgacacagtattttaggttatatgtctatatcttataaaggacaaactattaggaagctacggaaaaaacactgccaaaaagaaggaagccacaaggccaatttgtcaattttaaagatcacaggctaaagaaaattgtcaaataacttgggttttttctcatgcatagaatatcaatattcattttagctttgaggtttcttgagttcgttaatgctttccgaaatattaatctatagctatgaattttaggcatatgttttcaggacttaatatagatgttttcatattgactaccgtactctgtaggtgttgttggacagagtagagcattttattcaggccgttgctgtttatgaagaccaaatctttcaaaaacggactcgaattcagcaggtacctgatttatttaatctttttccccaaacaatttgatcttgttttatacttcttttctctaacaccattttcatacactcttagttattctattgacatattgtgtaagatataataatttacttaagctgtttgtgtatccctgctgctgtttgtgtgttttcttttgttaatacatatacattttttttttatgatggcaggcttatgagaacaatgaggagatgaggcagaggaacaaaagagatgcaacaggtgttcaacaggccccggtggctccagtggtagacaaggttcgttgttaagcttcatcctgtgattgaatatctcactgtagtttgtatgtgcatatttctgttgtcttcataaatggaattattttgagatttatgacaatcctgaatgaactctcatataatttattattctagtttgattcacatactgggaagacctaggacacattaatttatacgtaaacaagacaaaccatgaaaaaaaaaatgaaagacaaattcgagtagatccaaatgatcagcaaaaattatttatttcgtttgtgtactgagaagacccaggatgtattaagttattcatgaaaagagaaaagtattgggatacgtaatccaaacccacagaaaaatatatccaaaaagagcaaaacaattgatgaaatttagctggtttttatcttctgaatgggtaaaacttttggcttttcattggaagcaagtttcctaggattcttgaaactccaaattacatatttctcataaatttatcttacaggttaattcggatgtgtgaccctttcttaacatttcataaaaattagagaattgatctttcaagaatccttttccatttttttttggtcttccctgtaaatggtttggttttcttttctctaatggtttagatagttgtgctgtgtggtgcctcaaataatttttttctccttttctttagtagcttgaaattatatatgaataatattgacagtaatcttggaacgccaactctagttattttggtcttggaatttttattgtttcaaagaatgaacacatcaggtgctctattctgttcctttttactgcgcttcaagttgattgcaatttgcaatatatccttaactgtttgggtttgtgaggctctgcttgattgtggacttctgaaatagtggcttagtaaggccgaggtcaggtcgattggacttaatacttacgaatctgttagctgaattattattat

SEQ ID NO: 36605 - DNA, 7742 bp, Cannabis sativa
gggcgaatttaggagcaacaaatattaaccaaaagtgaattggtttttaaaacagaaaacaaaattttgttgttttcaaaattctcattttttgtaactatgttttttgaaaactatttttaaaaaacaagaccaaagaaaccaaattttccgtttttaaaaacaaaaaataattttttagttataatgccaaacatgcaataactcgttctactgataaagccaaaacccatgcattgcctactaaatcatctagaagaacaaagattaaattaaaagctgaagtttcttattatgaggaccacttcatctcatgtctaagtaaatttctatttattcaaccataagtctaaaaaaaaattacaagtaattaatcctaattttctaatcctaataaatagacaaagtagaaagatggtcatatataactaacctttctattctcattaattcaaacaacccttattttgtcgttttaaggaaactattattatacactcacttttatcaactctttcacgattgagtctgagaatagataataacttattgttggattaattcaaaccttgtaattttttgtctttttcttttgcagtaatttggatcacttcgttaaaatattccatatgaaatcacgtggaggtaatgcttcaccaactttggatactattatgtgtactatgatcaattaatatgtttgtttaatccaagatatatataacatattcaatccaaaataattgggcaaaatctatccaataattgaaaagatagcctcattataacaaaatctccatccaataattgattttaaaaacttttgagatttaaagtgataagtatcttttagttgtttcatgacagatggtcgaaagatagtaactttaattttggaagaatattatagaatcttaaaattccactaaaagttaatgatttactttggatagcttattctgggtgtttaccaaccctgtctcacttaaagggtaggtatgtggatatttctgttacttgtctggtgtgtaatgattgagtcgaatcaattcttcatattttggttgattgtccattaacaaaagtgtgttggcatgagattgatgaaacgttatggctatggcttctctcggtatttgatttctcaagttggtttcatcaagttttggaagtcgaaggtgtgtcatgtagctatgatttgctagtctctttggcatgctcgtaatggactagtgtggcatagtaaaagttctgttgcaaatgacgtggtggctgcagcgttgtcttactttaattaatgaaagggtgctcatgaacgttcaactaacactttggcttccaacacttgtgttagtatagagtattgtcgacttcaagtgttgatatgattaaagtcaatgtagatgtctctgtcatttttggagcagacttttttaggattagatggcttgctcgtgaccatcatgatagtgtgttatttcattcttcaaagcatatgcttggtcgagtttagctggttgtggctgagacaattagtttgaaggaagctctaagttcgatcaaacaacagggattctcatgcattgtgcatgagtcagactgcaagagtgttattgatgctcttcataattcagctcatatggtctcttctttggatttaattattttttattgtcattttttagtttttatgataaataatatttcttgtgcttttgttaaacgatctacaaacaagatcgctaactgtttagcgattgctacttgttcttttgttggtcgtagctatagtaaggaatttgtccgtgctctgctcttcagataattatttttaatgatttgtcaaattataattttcttgtaaaaaaataaataaataaacttttaccattgttatatacaatagtgcgtgtgtactcaataaaatacaaattaaactttttttattgatatgatcaaattctctttaattatattatatgggatctaaatttaaatttaattatataattacataaaataatttggtcaaattagtataattttattatttaaatttgatatttgattttagagtatattagaatttcaaaatatagaatgccaaatgagtatagagtacaatatgtgcattttctttatattatatgtaaaaagattaattttctttttaaaaaaacaaccatcttatatttatcaaaaggtaaagttttagtcaaatccacctaactacattatgtatcgcaaaattaccttttttttaaccattctttttaaatgagcaatcattgttaactttacctttgaatttacattgatttatttatgttatcatttcattaatgtgttctagaatgaaataagaagaggtattcataaatcacccttaagtaatatccaagtgattttcaaataaacatacatgctttgcaatacaaaaaattactataatacatgttccattcaacaatgtgttctctccatttctacaccaataaattaataaagccccttttggcttttttttaccattctactaatttgggtactcaactaaattatacaaaacttttccagccatgattacccaataaaagctgcataaactataatcaacattaccaaaaatgttctccttgcataggatatttttgatgatgcactagaaaacttgaatctctgagcctgatctctgcacattaaagaaacacaaagatgtattagtagagttcaaatcgaattctgattcgggtgagcgagtagaatagcacaaaacaagtcagcaaagttgtagttttgatataatcttacttctgtagggatgatagtacaccacaaaatatggcattttcgggcaaagaaacctcggatttgtcatcctcagtgtttacgacgctgatgtacgtttcctggcctagataccacgagttcagattgtctgttcgaaggttccacatgccactattgtctagagaaatcaaaattgctgtccaagctccgggaaagacctgtagccagttgaaaatcattctgttaacgttagttagttagttatgttagttggtcgggtattatctgtctatagagtttgttagatggtagttagtttcataactaccacctctgtactatccattattccctatataagtaaagcttttgactaagagtttagtcactttctcataaacactcaataaatctacgtatagtacaatttagacactgtgaaagctaagaaaaagaataaataggataggatttgtccctcccaaactataactattgtagagttttgccttatgaatgtttttttttacaaaaatgccccctacgcggtaaagattactgcaaatatcccctatctgttacattttgttcatttctttaaataattttttgatgtagcactaacgtgatgttaatctggctcaatttaagagtcttaaatgcatataaatagcaatataaactgaattataagatatgcattcttagagctaatatttgtatgtttaatgttaacaaactggatttctaacaatttaaagttaaataaattctcgtactgtgattataaaacaattgttttgaaaaatgagcataatgtaactgaagatggatatttttataattcgacaaaatttttgcaacacaaaaatttagcgacaaaactctacaagggtcctaaaattcagagaagaaaaaatcctttttattgctggtccagacaatattttactgattccaggagacatcattgtcatgataagtttcaaatggaggttttgctgatcaaactttcgaattcgattatagttatagaaacatgagtacctgcgtggtgctgcgagcaacaccgtcccacttgttgtaagtgtttctgctgttctctgtccaaactccaaaatccatactacaaaaagaatgagaaactgtccaattcatgttcctgacatctccaatttcataacagtgaaaaatgcaaacaaaagaagaacaaaaaagagccgaagagctcaccccactacaaaaaatgcatagccatccaaatggtagttctgaacagttgtgtcattgttctggaggatgatttccatgaaacctctataagtaccattaattagagatgtatcgactttggaacgtctgttcataattttattagggaaatcaagcttgtaaactcctggaatcttgaactgttcagcaagcttcaagggtgttgaaggtggtaaatatgaaatgccattgagggtagtacgccacttgccatttataagttcttgaggtttgttagtgatcagatagaaatctgtgactgtaatttgaccatatttgaaggatccttgcgggtttggacgagcagcaccagcagagacattccatctaaacattgcaccaccatgacaaatactaattagtccataacaagaattttttgttaagggaatcaaaagcaaatcactagtagtaaatcataatccatcaatggtaagtataattgggttattgaataagatcctatttggttgagcttttgcttttgcttttagcttctcaggaagaatatagctttttcgagctaaaagctgaaactcgctggttacccaaccagcaacagatgtgcttttgaagattcaaaagtccaaatccaaaaacagtttttaaaagcctaaccaaccagggtctaaatatctataagacacatatgttttaagaaagtgattttaagcacttgaaatagataacttctagccatgattgtaatattaagatactcagctacaaccttatggatcttgcttgattcattgagaaataggggtccaaatcagtaggaggatcggggagaggacctgaagcaggcccctgagagttcgagtagtgcaaaacggcaactccattaactcgagtccaagaagatgaattgacaaaacgagggctggcaacaatgtagtagtcactgctggcattttgatccattgttaccaagaatgaatatgactgacctacatgtatatccatgtttgagtagttctgttgaactgtatatgatccttcagtctcaacaagaagtaagttatggttttgtatcctgaaattcaaacttgttgagataccaacattatgcacccgtatacggtatgtttttcctgtttcaagacaaagttacaattagattgacaacctgccttccatagccaaaaagaaaaactaaaagagaggcatactatttactactaattacctggttcaacatttactaataagaaaggatttcctgctggaacaagtgcctcatcatatcgaaagggaccatgtccatttataataacaccatcaggaactccaagagcaattccattctcaacatcttttctcagttcctgttaccctcataaacatcggtctcaagttagatttttattttgggcttccattaacattttaaatattttattaaaaaagggttgatgaataaggttttgccgttttagcccatatagttattgatctacagttaatgaagtctaattgaagttgaagtgtgagtttttctaactagagttttgttgctaagtctcccttaactctataaatacatcatcaccattatttcttagttatctaaatgaatcaatcatgtttgtttcctatatcattgaattacttgtatagtatactgatgcattatgaattactaacatcccatacatacccattaaagccaagagaaagaatgcactaatagatttagtaataaagatatgggactcactttatgactctttgtataccagtcactaataaagagtgtaatatctccatctggcaccagaaaaggaagtgcaataactgctctattgtttataataacccctccataccctcctgcagctctttgaaagttcaaggaagggaagtaaaagaaactccctatctgatctttcacctgaaaatcatatgtccaattccaaccggccgggatcggacaattagtccccgaaacgccatcttgccaagagtttttcctgtgctgtactccattcctgcatcaaaacattatgcaaattttgtttttgtttctacatttgaatttgtcaacaattaaaaacaactcccatatgagaaattataccatgtaataagtaatggctcatcaagatgattcttgacattaacaacaacattccagttggtagtgacattgagaattggtcctggaaactgcccatttatcccaataacctagaaataatgaagctcaaatgtcatttttatcaattaaattaaatctttaagtctaacacagtaaaatactgaagaaaattaatatgaacaaagactttcaaaaggtaatgttgctcaaaataaagtaagttgccgacaacacatacccatgatataaaagttgttcaaacagagaaaaatagtattatatgagctcattttctagttctttttccctatcttgtaataaaaaaaaattccagatcttttgtgccataaaaattaaaaaatgggttacagaagtgtagtgcattcccactaaccataaccaagaaaagcaacttaaaagacataaagagcaaaaaacaagctggaattcaactaaaagaggcatatctcaattgggttatgagaaaaattaaccaaaaaaattgaaagagaaaggaagaaccttttgtttgggtccaagtggagaggcattgatgtatgaaacagaccaatcatagaagacatagggatcaccagccaaaccaacacttaaggaaccaagaaggagaatcaagtagaacaagaagaagcaaggacatggcagaactgagggcattggaaacccccaaagtctcagtctcagtctcagcttccctttcaaaccttacttactacccttttgggctttctttatcttttgctctagtttcagataactcttatcaatcaaagctaaaaacttcaaaatagactgatataggcaaaatagaaaaggggttcctttgctttgtttgcttcaacaagtggtgacatagaaacagcagagctgcagcagaagcaaactttggtggcagtaaagagagagaaagagaagtaaaattttgtaaaatagactgatataggcacatgtgagagtgagaaaatgtaccaggttgggccccagatgagggagcctttggtttgtagtgttgtttatggggtccctcacttcaaagcttcaaacttttttaggcagtagctagccactgttgctttgttgtctacttttataaacagccaatggaatcttactatataaaggtcatggattgatccaacaaaccaagcttcggttatggaatgtagtgaaaaaattatataatatatattattagactcaaagataaatcgaagtaaagaaaaaggaaatctttttgactgaaattgttggatctggggacccttctagtttatcatctggattttacatttttacatatgctttttagtttatagtttttgtcatgtttgaaaattgaattctgttttcatattagccactttctttgtagatattcttattcttaaaactactacattcttcttgcaattaatttagatcacaacccaagtcaatataactatgattttataaattattaaacaattattgaattctgtaaaaaaacacacacacaattatttgaagaagcattagaacatcaattgtaacatttcttcaaaatgctaaaatcctccac

SEQ ID NO: 36606 - DNA, 2005 bp, Cannabis sativa
gcaataatgaaagtatctaggattgggagaagatagtcaataaagggaatacaatagtgtatataggagagtaagaagaattagagccttatggagagaattagcttgtaaactagttgttccaatgtttcttcaatattctctgtatagtatcaaacatcaaatctgtctagttctcctattgacttccaagtctctattttctctgcgattttgcctctttttgttgatattcagttaagatcctagtcggggcagaacacaacaatatccaatttgttgatctattaagtttactgcatttgacatcctttacttatttagggtatgcttaaccaaaggcatcccctttcgagaagtagcaccaatgtggtcggagcatgagatttgggaagaagcattcctcacaagtaaaattgttatacttttttgtcattcattcgtatgtattttacactagctctagttcttcgtgctgagaaatagatgatagactgacctaatagcattcaatataatcattttccattgcagatagcttgagacttctccaacatgtagagacagtttctattccagactcgtgggattcactcaattcaaaatcttggaaggacatatcatggaataaaaagcaatttgaggtttccaaattcctttcatttgtacatgatgaatccttatattgacttgatcccaaaaatatttgattttttcccactagtaattactcttttttaatgcttgattatgagcagcgaagtcctggaattatcactagactgatccaggtaaattactgtttcttcatttattgtagtcttttttaaaacaagtttatatattgccctctaaaatgtatcgtgaatatacttctcaattccattgaaactatttgttaaaagatctgatgtttgagtccctcctgggtattttctggtccccaaatatatatagtgtgtgttatcttttttccatgtcatacaatactcagtttcttatgttttgacatgttttttttcattctcttcaatgatctaatggagcagaaagaggtaattgagaaggcaaatcttgaagggtactcattcagtgaggctgcatgaaaaagtgaaagggctgctgtttaatttgtattttatgacaacaatgttgccttatataatttaacttgtattttgcctgttagtaaaatcttccatttgatcattttgaagcttagatgaaatgcacttcaaactctagactcacagacacagtgtgaagatggtgtcaaaattgtgtgtaaagtttctttctagaatgtagatcatacatgattctgttcggttaagtttttacttttacttatagttcaaagtataaggtttaacttatttttatcgtttggataactattatatgaagattatttttaatgaaaagtgtttttcaaagtgtttagatattattattaaaagatcttttatgagtaaattaagaattctaggatttcgagagcctgattctctcccaaaacagttacaaattaagccaaattcttcacaccctttcttttactattcatttctatatataataccaatactctcaatacaattatacttatgcccttttatttaatattctaatatcccaaggcccaacaatattggccgcttaaaattcaccttattttcaaggtgaagaacaacaatgtttgcccaaattacccttttgcgagaaagcattagaacaaaaactttggccatcgtcctttgtaaaaaatccaacgagtagctgcggtacttcctgtctgctcgtatcttgaatttgaaggtataacttgtgttcgtcctctattaaagaaccaagccaacaagtgcattcgttaagctgctgtcatgacatgtccataaggagtgctaatgaagacttgtaactcatactcaagatcagaagctgaaattgaaaacgagctcatttgtccttggtcaaaaccccacaagcaacccgcctctcgatg

SEQ ID NO: 36607 - DNA, 4467 bp, Cannabis sativa
actttattacttgttacgattgcgtacacttgcgtatacaatttttcacaacaaaatgctcacaaatcgtaccttcaatctcggtcttcaaattatgccaaactagattctagtcgaatgtgccttaatgtaattctttttttgacaggaagaagctttttgatggaaataatgagtattgcgatccccgcggctgagccatattgctcttcttcgttgcttccaaaaaatttctccttttaccagctaagcattaaggtccttttgagcttaataacgacctttttggactgatccaaggacaaactatcaatctcttttttaaggtctttaatttgactttggcattctctattctgcattttattctagcacccgagtctggtttcacacccttgaaaattgacgtctcagatcgcttgtggtagtaatcaccgggacttctagccaagctttagtaattagccgtttctagtcatcattctccacccaactgtagtgatttaattacaatttatggttataaatgtgcattagtacaaaataagacctattttcagaagtaggcatatgtgaaataaattctcgattatggagattttattgtattctaggtgtaccatgtatgttaattatgaattttgatatttttcataatttatgccaatgatagttgaatatgacgatttgtccattaaagtcacagagatacagttgagtatcctaggattagcagggcaagtctatggacatttagaatgtcatgattttacggggtaattgattatgaccattttactctttagggtttaaaggttacttaagagggaataaaagggcattttggtaacttaaccataagtttgattttaattttcacttagtgggttttgtagataatgaatttattaaggatttttattggttttattagattaatctagaatgattagagataaacatcacaaaatcaaaattaattcctctctcctcaccaactctttctctctcggtctcactttaacccaagggaaaccaaacccaattcaaacattttcacaggtatttacagcaaggttttgaagaaaaattagttagaaggatcaaaggtaagccctagcttattatcccttttgaattttaaggtttaagcttggtttggtttgagttcttgagcttttagttttgttaggatttaagaggtttgaatttgtttttgggaagccacttgtgattgtttgtgatctttttaagtggttgttgttggctgttgtgtgatttcagcaagttttagtttagaactcaaagcttgctcaacaatattattttttattccagggctttgatgttgcaattattggttgaattatgttcaacatgttgttattagatgttctagaaagtttggtgttatttgtggtagatttgagttagaaaaaaattgagttttggaaattctgctacgaaatagtccatcgtttctgtagaaataatgaatcgtttccccaggtagaactccaagaaatggtggggatccggttacctggatagggtgattaggtacctcaattttcatgttttctcgatatatagggtattgccacactatttatcgacatgaaaacttctgatttaagtttaagtccctgcaagtgatttagtgagtcacttacttattttacatgattgtaacttaggatctgaagatcgtcagtagtattttctactcaagttgatcagcacacctgattacggaagtgatgtaagataagtataaaggatgcacatatatacatatttggcatgcatgtttcaggtagtatgaaccaatcctagcaacacgagtacttttggggtactgagtgcatatggtataatggttggttgtgctatcaggaagtacgaacgaatcctaccaacattagtacttttggagtactgagtgcatatagtatagcgatggcttgtgctactaatcctacggcgcaactgctttaatcaacactttcctccccatcttccaagtttgaagcctcttccacactttgtctttggtgtgttagaggttaacttttttctttctgccaataacaaaagaaaggccaagatactttgataactccagacaatcctctaaataagaccaatattacaaataagaaataaataaagaaataatatcctattgtaggtcactgtagaaacttctataatatttttattttactttattttaaataaacatattatttataatcaaaatataaatatccacattatatatttaaatttcaatgtttattttttaatagcaaaatttaaaattgaaaaataatcaacttgtaacttgtaggtgtattgtatttaaaatagtaatgggtgcttctacaatacaccccatcaaaatgggtgtactgataacaacctgcaactgtttcggtatctataagaattttttagtccaaattttttcatagtcatgtacattatagttatttaagacatcctgtaaaattttgagaaatttagaataatttacaatataaaaatcaatatagaaatcaatgtttaaagcgactatttcacacgcgtataaaataaaaaagtcacgcgtgcaacagactctttgaacattattttcaacgtgttaaattttttcgaatttctcaaaattttgtcaaatgtcttaaataactatactgtatacgaccataaaaaaaaatggactaaatagttttttagataccaaaatagataagggtgcatcaatacactcattttaagggggtgtattgtagaattttccaatagtaaatactatatcaaaatacttgtcttaatataaacacgtatataaatattcacatatctatttattgttaatttatgtgttttacttctaaaaaattagttgaaataattaatatgttaaataataaagtatatgtttatttttaatatataatatgaacaaaataatcctgcttttttttttttttgagtctccaaaattaattttagacaaaactttcaatggaacaaatgaggttttaaatccaagtaataagaataatttctattttatatgatatatacatatatatagtaagtactataattaattgaattaattagcataatatatgcgtatatattttttttaatagaatcatataaatatatattcttctattgtatttatatgacaaggtacataatttgcagcctagcaaccttgccacttctattgactctatttcttactgttatacagattatgcttcctgcttattccttccaacggtacatgtggctgatccggtttggacccctccgcttgaggattgaatcaaaatcaactgtgatgtcaaagttgggggcgaatccatgtgtgctgctgctctggctagggaccacacaagagctgttctatgggctgctgtgtccatggtcagcttcagcgactcgttcattggtgaggcagctgcttgtcggcttgctcttgaatcggctgggatcaagaatcacaactacgttttggtggagagcgactcggatctggttatcaaggcactcaaaggaattcactctatttggaatattgataactatgttttttcttgtaattatctttctagaaattttttattttgtaatttttcgtttattccttgcttgtgtaattttgcagcccataatgtggttaaatgggcgttcacccagaacttaacaggtattgtggattcgttcgtcattcctgaagatatcctgtgtaacgaccatgaggtctaattttccttttatatattcagtcttattttcaaaaaaaaatatatgtaatatatatgtatataaattggccttaaaaatataataaccccaagatatgctctgtgaagagctctctgtttttaatgttatttcagttaaactgagccctttggtggatttaagtgatttaattataaatattatacaacaaacgtttgtcatgtgaaaacatttgtcgtttttgagaatgagaagggaaagcaggatgtaatattcttcaatccaatgcctactttctcttcctctgattgccttttacattacgttctgataattatgtaacggaagtaattaattatttatataacaccaccgactaccataacattaccatgtgagttgtgacatctatttttagttttcaaataaatctagcaattaattaccaaaaaaaaaaataaatctagcaattaattcattgcatggggtcattttactaatatgttttgtaccgttgtcataacattaccatgtgagttgtgacttatccatttttagtttttcaaacaaatctaataattaattcattgcattgggtcattttaatactaatatctattgcaccattatccatttactctgtatatagggaattgaaattgagtgtaatttaattttaattatggaagtttatat

SEQ ID NO: 36608 - DNA, 3242 bp, Cannabis sativa
atcaattcagggtcctatttgtaccattttagaaaatacaggtctattttgtcatttaacaaaacagaaaatccaattgataacaaggaatctaaaatagtatttacccgtctatataattgtgttaataaattaataattacacaattagtttttctaaatgcatcctataaattttgtttttttattttttatttttcgttggacagttactggtttatttaagaaacatgatgtagatgtttagaaaacatttaattatttactttttcaaagggttggtggttaaattttaacaatgtacataattattttgaaaaaaaaaaagaaaacaaaataataagaataaaactaattcatttatacataaaaaagaatataataatcaaactaatttatttcaatttgattaataaagcttgcaaaagtctcaaccataagtggttatgttatgtggatcctattctcaccaatcataattagccattcaatatggagagtccacagattcaatgtatattcatgccttggtgtctaaacacactactctttcaccaaaataataaataaatatatataatacggtacaattattggtttattacaaatattttactcttacgcataatcaaataaaaaaaaaagaagttataaaaccctctcttcaactattattaaaataccctaaactaaatttgtaatattatttcatctaagattatatcataaaataattcgattttaataaataattttttttggatggaacaaaagttcttttaaataaataaactaatggatcattctagagtctctctttggaattatgctaagaacataatcccatatatattaccacaacgaccacgcgtaaatattattattattattattctgaatagtaaagaaaaatataccattttattacacgttgttgtattaataattttaattacaaactccatagaatctaaatatttaaaattttttaaaaaataaaatagaaatactagtgatgcaatttagacgggttcaatccaatcatcatagcccatagtaaagtaagaggaattttctttctttttttttttctgacaaaaataaataaaaaaaaaacccagctaagcagataagcagaggcattaaacgacaggtacaatcatcaacaactaaaatttaaaattataaagaaataattttctaaaaaaagaataaataaaataaataacacgcctaacctcgtaaaacaggaccactacattttgtcaatacccattaccattcacaaactgccacgtgttactaaaaccaacgccaccatcatcatatttcttttccttttttatttatttccttaaattttcttctaaaataataaaaaaaacgtcccctgagtcctgattctaaaattaaaaacaaaaaaaaaaaaattatccaaagaaaacaggaaacacaaaactctcaattaacttaattagttaattaattttctaactttacaaaaaaaaaaaaaaaaagacaactacccaataaaaaaggaaagaaaaaaaatgagttacattattttttaatttttttttctaaatttatagtttgagttgttatgtttctatacctattatgccaattttaattactatttaagttgctttattaattacatttttataaataatttcgtaaaaaaattattttaaaatatcaaagtaaaaaagatcctaaatttttccattgcgtttgctttataattattaattaatttattattattattattaatttaaaaatatataaaggagcttgttggaaaaaagatatggatggatgcctatttcaataagttgtactatacctccaatttggggacctccagcctgtctcccaaagatatttagcactattttattacaattaattttattaaataccaaattattatatattattatacccattttattttttaatttagaaaaaaaaaagaaatttaattctcatttttgtccctttttcgtcgttccttcctttcttttctttccttttttctttctttctctccctttattattcttacacattctcacccttcaatatttcccttctttccttcctcgttaagattctctctctgtttttctttctctaatcttaaaatcaattcttttctttcattcagatcctccaaattaatcatcatcctcaggtataagttactacaatcttctttatatattttctcgcagtttctgtttggttggtgagaaaaataaaaagaaaaacttatagatctgtaatttttttaacaatttttttttctgcagatcgatcgcttttctcgattacgacatcaaatataatatggcggaggaacacagatgtcaagcaccggagggtcaccgcctctgcgtgaacaactgtggcttctttggaagtccaggcaccatgaatctctgttccaaatgttacagagatctttatctgaaggaacaacaagaagcctcgatcaaaaccaccgtcgaaaactctctctccgccgctgcagcttctgcttccacgtcatcatcatcgtctttgccttctccgcgttcggctccgtcttcgccgccggtgtttcagatcgaagctctctcgccgcctgtgccggagttgaagttaccggagatggcgactgaggcggtggtttcgcaaccgaatcgttgtttggtttgtaaaaaacgggtcgggttgaccgggttcaagtgcaggtgtgggaccacgttctgtggggtccacaggtacccggaaaagcacgggtgcagtttcgatttcaagagggttgggagagaagagatagcgagagcgaatccacttgtcaaagctgagaagctagacaagatatgatgattcaatctggaccgttgatgatgatatttggtgaagtgggtttctagagaaatcgattaggttgatggacggcgttgatcgtaagcgattattccatcgtggggttatgatcacgtatcgagatggtggaagataatgatcatatatattataaaaatatatattaaatttgtctctgtctgtctgtctggctttttttttttaattttaaaaaaaattaactttgagaataagtacggttatttcagtgggctttgcatttgtataaatttaaaaaagaaaaagaaaaaaaaattgtgtcaattccgtgtagattcttctatttgagtttgatgctttttttttttttttattattat

SEQ ID NO: 36609 - DNA, 12406 bp, Cannabis sativa
caactaaactcgaaggataatttttcagtttacagaaattttatattggtttaatgttacacttgctgaatttttagtctaggtgagacagaaaggttggaacctaaaatccagtgtcccaagtatgtttttagaatatatgatcctaagattttaatgtttctaagaatgtggaaatttttggtttgtgaaaatgggacgtacatgtatattgtcatttgatgtatcgatctatgttattgttctatcaatcttgttcttggtgcattcatggggtggtggtgaatagttcaatgttggaaatagctgattaagctagatgttcttatcagaactgctgattaatattctgtttgttttcccagatggcggagataaaacatgtagacgcagtttggcctggttggggtcatgcatccgagaaccctgacctaccagatgctctaaatgcaaaaggaattgtatttcttgggccgcccgcaacatctatggcagcgttaggagataaaattggttcatcattgattgctcaagcagcagaagtgcctacccttccatggagtggttctcatgtaatattctatcaaaccaaaacgtacctaaatttatcttgatttattatgtagtgttttccacacctaaccttcttaaaatttaccaggtgaaaatccctccagacagtaacttggttacaattccagatgaaatatatagagaagcatgtgtttctacaacagaagaagcagttgcaagttgccaagttgttggttacccagcaatgatcaaggcatcatggggtggcggtggtaaaggcataagaaaggtttgttctttgcatgtcaatatgctttcatttggaaacttgtttcaaatgattttcattctattggaaaaagaattgcttacaagatctgtatggcgaagaaggtgttctagaatgatttgaacagtaggttagactaagtcgtctattatggtgaggaattagttgagccctcttcattattttttaaaatactgaagtaaatcatttgaatctttaggttcataatgatgacgaagtcagggcattgtttaagcaagttcagggagaggttcctggttccccaatatttataatgaaggttgcatctcaggttagttatctctactttttgatatgaatgattataattgcagcagttttgaactgtgctaagaaaactcagctagtcacttcataatttgtgaatattctactgcagagccgacatctagaagtccagttattgtgtgatcaacacggaaatgttgcagctttgcatagccgtgattgtagtgttcaaagacgacaccagaaggtaaactcatatctgaagtggtaaaatgcatttaggccctctttctctctaacatgttcatctttgttatatagattattgaagaaggtccaataacagtagctcctctagagacagtgaagaaattggaacaggcagctcgaaggttggctaaatccgttaattatgttggagcggctactgttgagtatctgtacagtatggatactggagagtactattttttagagctcaaccctcgtttacaggtaagcttattgtaggttaggttcatgttttgttgctcttcaattgttcagtttatttgcctaaagtggttgttaatgaaaatcacaccaatcgagtaaaactaagttatttagatattatgcaccattttgtgaaaatggaacgagcacataattaaggtgagaaagaggtatctacatgtgtgacttcaaatattagaaactcattttatttcatttctctgactggctattttttgagtaaatggatgtcctggaatgattttatttttatttttgcaggtcgagcatcctgttactgagtggattgctgaagttaatttgccagcagcccaggtcgctgttgggatgggtattcctctttggcaaattcctggtaggcacttctataacctttttttccccttttcttgaagaagatttttattttttccaattttaatatttcctgttctcttcttaatatgcttgattcaaaaagagataagaagattttatggaaaggagcatggtggtggatatgattcttggagaaatacttcagttaaggccaccccatttgattttgaccaggcagaatctataagaccaaaaggtcattgtgttgctgttcgtgtaacaagtgaggacccagatgatggattcaaacctaccagtgggaaagtacaggttagcctttaatatttcatatgcaataaagaacaagtgatactggtgaattcatattgacttacatcaccatgcacaggagttgagttttaaaagcaagccaaatgtgtgggcatacttttctgtcaaggtaactttatgctggtgttatgtctatggaattctattcaaattctctttccaaaatgaaaatggaaaaagtattgaataccttgagttcattcattaaattctaatcaccatttattcttttgcagtctggaggagggattcatgaattctctgattctcaatttggtaagtgctgactactaatgttgtatgccgtttgaattttctagctaatcatatggccgaacttcgataatctgaaacgtaggtgttaaagtgaatcatccaatatcaacatgtgttgtgactaatcattctttacattgatactgtacaagctagaagtggtttttgtgtcttgagaaaaatcttcacaaacaattggttttttgttttataagtatgtgttgctaagtctttgatcacacctcaggacatgtttttgcatttggcgagtctagagccttggctattgcaaatatggttcttgggctgaaggaaattcaaattcgtggagaaattcgaactaatgttgactacacgattgatctcttacatgtaaacttctcacaaattaatggtttcttttttcattttccctttctagacttggtagaatctaatcaaaactccaactaacgcataaataaatgtttcacaggctttagattacagagagaataaaatccacacaggctggttggatagtagaatagctatgcgagtgagagcagaacggcccccttggtatctgtctgttgttggaggagctttatttgtaagcacatatgttagaaatagtttattattcgatgtatcatatgtctaaaattcatcacttccctatatttttggtcaatttagaaagcatctgcaagtagtgccgcaatggtttcagattacgtgggttatcttgaaaaggggcaaataccacccaaggtattttggttaaaagtacttattgaagttccatgatgtatctcatgtaattaattcatgcttatcctcattgcagcatatatcgcttgtacactcacaagtggccttgaacatcgaaggaagcaaatacacagtatgtgtttaaacgatgacgttgtaaatctttgtttttgtggatatttgttgcttctcattgtctattgacatacattctccaaaatatggaaaatgtttttagatcgacatggtaagaggtggaccgggaagttatagactgagaatgaatgagtcagagattgaagcagagatacatactttacgtgatggaggtttattgatgcaggcaagtgtattctctaaatcttttgttctaaaactcatcatattttacactatccactttcttgtttgcctgatagcaaatattaaaaaaaaaaaaatcaagttgcaactattaaacagtttgttattttcattacacgacacatgcaaactcaagtgtttctccgttcccctgaagtggggtaaccctcttagaatacgagaatacttgactcccaaattcaactttatgtaaaattgcgagaggaaaagcttcctcagtttgtaaatagaatgtctttgtccattttgtattttggaattttaactgaaatcttcaatatgtattttctttacagttggatggaaacagtcatgtgatatatgctgaggaagaagcagctggaactcggcttctcattgatggaaggacatgcttgcttcaggtgtcccatcattcacttcttccaaaccattttgttttcttaagaaatacttcttgaacaagatagagttaactgtaaaatattttgttgcatctagaatgatcatgacccatctaagctcatagcggagacaccatgcaaactgatgaggtatttggtttctgatggtagtcatgttgatgctgatacaccttatgctgaggtcgaggttatgaagatgtgtatgcctctactttcacctgcttctggaattattcaatttaaaatgtctgaaggtcaagcaatgcaggtaattatgttccaaataaagatctggatattcataacttgcatagaagttaaacagttactatctttgtaggccggtgagcttatagcaagacttgatttagatgacccttcagctgtgagaaaggcagaacctttcactgggacttttcctatcttgggacctccaactgcaatttctgataaagttcatcagaaatgtgctgcaagtataaatgcagcacgaatgattcttgcaggttatgaacacaacattgatgaagtgagtatctaattctgtttcaccgttgaaaaaaatctatgattttagctaataatgtaataaataatgatgttatgagattaaacttttaatgaagagattttcatgcatctaccctccaggtagtgcaaaacttgctccattgccttgacagtcctgaactcccttatcttcaatggcaagaatgcatggctgttcttgcaacccgccttcccaaagatcttaaaaatgaggtaaataaaactttatctccccccttcccctgcaattatatgcttgaatagtggttgatgctcacattttatccgatgtttatgttttcatcagttagaatcaaaatataaagagttcgatgcaattcctagcactcagaatgttgatttccctgctaaactattgcggaatattcttgaagtaagtgcagttatttttcatttgggttccgccctctccttatgattcatagtgaaggaacgcatatttttctgtaggcccacctattgtcctgttctgataaagaaagaggagccctggagaggcttattgaacctttattgagccttgcaaagtcttatgagggtggcagggaaagccatgctcgcattattgttcagtccctatttgaagaatacttgacagttgaagaattatttagtgacaatattcaagtaagtgttccttgtgaaataaaattctttaaactgacatggtaatgagggtaatattattatttcttttattcactttacttttatgcccattgtgtttgtacagcctaactgtttgtttcttacttaactctactgaatgagttctggttttcactctgcttgtgatagattaatcataaacttgttaacaaataagcaaacaatgaaaatgtttggagtaaaaagaaaaagaaaagaaaaatgttctgagtcctaattatcattttacatccaatagtttcttaagaacatgaaattaattttacttttcgttctctctttttacgtattttggtccattcatttgtaaaatttagcctcatttgtatcatatttagacaacttcgttttctactttttgagaaaatgatattgaaagtaattaacttataataatactaaaaaatctgactgaagacttttctacattatccaacttggttttttgtgtcgtccattttaatagccaaaatccaggtgattaagccttttacttgaaatgcttttattgttcatctttttctttttaaaatcttcattgaagtactctgttttgtccaggctgatgtaattgagcgtctcagacttcagtataaaaaagatctcttgaagattgtcgacattgtactttctcatcaggtaatattttgatgagcccagccagttttgagggtctttttatttactattggaatagtttacgtttttactctgtccgttttcggtttgcagggtgtcaagagtaagaataagcttatactaagactcatggaacagcttgtttatcctaaccccgctgcatacagggaaaaactaattagattctccacgctcaaccatacaaactattctgaggtttggctgttgcactaagctagtaaattatgatggaaagaaaaatcctttgtatgttttttttttttcgtttagtttctcaaacatctctcaatgtttattttctccggcatggatgatcagctcttaacagttctaagttttgtatcatcttttcatgttttcttgaagcaataacttcagtttgttgatcaatgttataaatgaagttctgctgtcaatgtatttatgcagttggcactaaaagcaagtcagttgctggagcaaaccaaattgagtgaactccgttccaacattgcgagaagtctctcagagttggaaatgtttacggaggatggtgaaaacatggatactcccaagaggaaaagtgccataaatgaacgaatggaggatcttgtgagtgctcctttggcagttgaggatgccctggtaggtctgtttgatcatagtgatcacacccttcaaaggcgagtgatggagacttatgttcgtcgattataccaggtactgagatttgaattgttgtagttttctgcttattacttgcagacagttctcatgtgttaactttgtctatgccatcagccctatcttgtgaaggggagtgtgaggatgcagtggcacagatctgggctcattgcttcatgggagttctttgaagagcatattaagagaaaagaagaggccgaagtaaatgataaaccattagttgaaaaacacagcgagaagaaatggggagtcatggtgataataaaaactctccaatttttgccagcaataattagtgctgcagtaagggaagcaacccataatctccatgatgcaactccaattggatctcctgagcctgatagccatgggaatatgatgcatattgcattagttggtattaacaatcagatgagtttactccaggataggtatctcatttgctctcactttgattatgacgagtctacatcaatttgtacaaactctctatttcatagatagcaatgcttcataattacttggattcctatctacagcagaaggagctttcttaatctgtttttgcaaattgtttaaaatatatgaaacataagtcttaccctgtacttaacttgatgctttgcagtggtgatgaagatcaggctcaagaaagaatcaacaagttagcaaaaatacttaaagagcaaggagtagcctcgagtctgcgcagcgcaggagttggagtgattagttgtatcatacaaagggatgaaggacgggctcctatgaggcactcctttcactggtcatcagaaaagctctattatgaagaacctctattacgtcatctggaacctcctttgtccatctatcttgaattggttagtcattctaagccaaaaataaataaataaataatgttttccatgatctgaagttcgttgaatgttgacatatttttaaatattatcaggacaagcttaaaggatacgagaacgtacagtatactcaatcaagggatcgtcaatggcacttatacactgttgtagacagacgtgtaccaatgcaaaggatgtttctcagaacacttgtaaggcagcccacaacaaatggagggtttaccggatatcaaggactagatgtggaaacaacccgtatgccatttacttccaggggaatttggaggtccttagtgacagcaatggacgagttggaacttaatgcacacaacacgactctcaaatctgaccatgctcatatgtacctttatatcttacgggagcaacaactagaggatcttgtgccttaccctaggtaaatatgtttatatatttgttcaactccttagacaaaatttgatatgttctgttagttaatcttacatttggaatgttgtggcaggagagttgatgtagatggtagtgtagaagaaactgttgttgaggcaatcttagaagagctggcacgtaacatacatgtatctgttggtgtaagaatgcatagattaggtgtttgggaatgggaagtgaaactttggatatcatcttccggacaggcaaatggtgcttggcgggttgtagtaacaaatgtgactggtcatacttgcactgtacatgtaagtttttatgtgatttatattcatgaaaggaaatatttacactatcttgcaatttaaaagtttaataggttattttatgcttccaattaatacaatacacaagtgtgtgaacattatgttgatcatttacatgtgttgtggtaagaaagtgattatagactaccatgctagtcataagaagcaaactagccacattgaaaagctgatttattagcaacaaataattagttctagaacctaacatgagtgatgttacttttggaactggcccaaggacgaaggaggaagatagagaagccatagatgagtaccagttagttgtgtcatactctagacattagtataatgcctaagcaattatgatatcatattctcctagatgcattctaatatactatataattgctttgtaaaattcaggtttatcgagaatttgaggacaacaacgaacacaaagtggtgtacagttcaatttctagggtaggtcctctgcatagagttccagtgaatgcgcagtatcaacctttaggagttcttgatcggaaacgccttttggccaggagaagcaacacgacttactgttatgattttccactggtaaacactatgcttaacactgtggtctctttctttctctctctctctaccctacacacactcacatctaattgttgtgattaggcatttgagacggcattggagcagtcatgggcatctcaatcttccagtatcaaaaaaccaacagataaagctattctcaacgtaactgagctccagtttgctgaccagaatggtagctggggtacccctcttgttcctgcttcacgtccatctgggcttaatgatgttggcatggtagcttggtctatggagatgtcaactccagagtttccttctggaaggaaaatcttgatagttgcaaatgatgtgacatttaaagcagggtcttttggccgaagagaggacgcattcttccttgctgtgactgatcttgcttgtgccaagaaactacctttaatatacttggcagcaaactctggcgcccgtcttggtgtagctgaagaaataaaatcttgcttcaaagttggttggtctgatgatttaagccctgagcgtggttttcagtatgtatatttaacctctgatgactatgctcgcattggatcatctgtgatagcacacgagttaaagctaccaagtggagaaaccagatgggttatagatacaattgttggaaaagaagatggtttgggggttgagaatttgtctggcagtggggctattgctagtgcgtattcaagagcatacaaggagacatttaccttgacttatgtgactggtagaacagttggaataggtgcttaccttgctcgcctagggatgcgatgcatacagaggcttgatcaacccatcattttaaccggtttctctgcattgaacaaacttcttggtcgagaggtttacagctcacacatgcaacttggtgggccgaaaattatggcaactaatggggttgttcatctgacagtctcagatgaccttgaaggaatatctgctattctaaaatggctaagctatgttccaccatatgtaggtggtcctcttcccatttcaccttcattagatcctccagagaggcttgttgaatacttccctgaaaattcgtgcgatcctcgtgctgccatttgtggtgttttggatggtcaaagcaagtggatgggaggcattttcgataaaaatagctttgtggagactctagaaggttgggcaaggactgttgtcacaggaagggcaaagcttggaggaattcctgtaggtatagtggctgtggaaacacaaactgtaatgcaagttatacctgctgatccaggccaacttgattcccatgagagggttgttcctcaggctggacaagtatggtttcctgattctgcaactaagacagcacaagcattgttagatttcaatcgagaagagcttccactctttattcttgccaattggagaggtttctcaggtgggcagagggaccttttcgaagggattcttcaggctggttcaaccattgtagaaaaccttagaacatacaagcagccagtttttgtgtacatcccaatgatgggcgagctccgtggtggggcatgggtggttgtggatagtcaaattaactcagaccatattgaaatgtatgcggatgaaacagctagaggtaatgtacttgagccagaagggacaattgagatcaaatttagaacaaaggagctgctggagtgcatgggaaggcttgatcaacaactaatacatctgaagacaaaacttcaagaagccaaaagcagtggtacacatgggctggttgaatccattcaacaacagataagaactcgggagaagcaacttttgcctttatacactcagatagctactaaatttgcagaattgcatgacacttccctaaggatggctgcgaaaggagttgtgagagaagttttggagtggaccaagtctcggtctttcttttacaagagactgtggcggagaattgcagaggaatcactgatcaagactgtaatagaagccgctggggaccagctgccatataaatctgcgagggacttgattgtcacctggttttcagattctgacatttcaaaaagcagacaaaatgcttggtcggatgatgaagctttctttaaatggaaggatgatccacagaattacgaggccaaactaaaggagctgcgggtgcagaagatatttctccaattatcaaacattggcaactcaacttcagatctccaagttctacctcaaggtcttgccacccttctaagcaaggtaaaaacccttttcttgtagtttagtcatatccattttcatatgcctatctgaatatgaatttgtatcataaaactgtttgtgcccaaatacaggtggatcccacaagccgtaaagtgctaatagaagaactccgcaaggtgctcggttagcgggagaaatcgatgaacttgttctcgatcattttacaagatgttataacattatggcctcttggaagtgatcttttgggaacctgtactcatctctccccaaagtgtatatctttttctctcttttcttatttattttagttttagagttcaaataagggaacggataacgtgtaacaggaacaagactagctctatttatagcagggccctatctctttcagttccctgcaaaagctttatcatttcttagaactgaaacaaatattattttttgaataagaatgtagattatttaattaatctactcatatttataatacactttgataatcgatgattattgtttcatgtcagtgagttcaaattgattagatgccatgcaattatctgtgactattatttcattgaaaatgaaaaaccaagcctacatgaaagttgacaaactgagcaaaagctccaagacataaacttgaaaaaggagcatattgtttatttgttgtgtagttttgttggtatattgacattatttcttcatcttgtgcttggatttttgtttctcttggagcttcttcttcttctctttctctttctctttctctttcttccttttcctcttctctctctccttggctttcttttcttcttccttcttctctttctccttttgctttgttttctctctctttgctttctccttaagttcttctttagttagttctcttctgacactgaaacacatcttgaatgaatatccaacacttctctatatggcaccaaactatacatatatagtatatgtaatgtacacaaacacacacacacatacatacatacacacgtatggtgcagtttttgccgtctcctttgttggttgccgtccaattccattgcatgttctgctctttattcttcctttgctttacttcttggcattttcctttggttttatttgaaatatgactaatttactgtgacggcatatcctttttgtataatttacaaattttattttatgtcttcttatttggtttattttctacaaatatttggaattatccataatcagttgtaaaataaatgagatcatatttaagaaaatagtaaataaaaattatattatgtaaataagatctaagca

SEQ ID NO: 36610 - DNA, 3938 bp, Cannabis sativa
aatgagaatgagataataatatttataatattaatagtcaaggaggtttgtcaggagagacttctctttttcttaattctatttttcagaattaattgcttttaacactcatttgcaataattagatccatatagtagaatatagaatggaaaaaaaaaaatagatagaaagcgatgtaatacctctttcttctttttctatgtcactattaagttactaattaattatgtcatgacatctataagaacacaacacaagtaatgttggtgtaaaattgtgacttctagtttgttatttactgattttgggatggtaaggcttgaaaaaagttaagaatggtgaactggaaagtgattgcttttaacaatataagcataaacatacaaataaatatagtgatataggtaggacttttaagtaagcattctcattagtctcatgaaaccaatgctagccaatggatatagaatttagatgaagaagatatgacatctaatggctcactgggtatattggattgatgggaaatctaaacaactctcataatgaatggacaatattccctcttaaatagaggcaggcatgtgcatagaatgaatttctatctagcaatactttctcaaaataaaaaatttagtttataaagtgagacaggtatgagatttagtttttggttcttttcattatatctattaaataatattaactgtttgtgatttttaaccaattttaccttccttgattttaaaggtgtctactaaaaaaatgggggatatttaagatatctcaagactattagacaagttcaaatgaccctactaactactcaactcatcaagaactggtcccaaaaggaaatgaaaaaaatatgaaagccttactcacatgagtccctataagagatgattgatctttaaaaacgaaaataatatgtactatcgtggtcttttaaaaaagtgaactttgacagccagaaaggccaagaataatcaaaattagagagtaataccctttaaatagcatgcaagctaatatgtggcaaccaccagttcctaaatgcacattaaagtagatttggcgacaaatatttggggtcaactaagactgaatatgtaacacattggatcaactaattcttttattctaagttaaactcaacgacccaagtctaaactataactaatcacagtaatcaataaaggttgcaactgctttgaagtggcaagattttgtgtctcaactacaaagggttttaagttcaactcagcagattcaacattaatagattacattttaatgatccaatttcttattgggcttttgaagtggcaagattttgagtctcaacttgtcaaaaattaggacaggcctatcgattagcatagtccttgaaacatttagatacacaacacaaggtaagagcataaaatattgttctaacttgatatatagaagacttctcctaacattttaaacttgaacaaactaaatgctaacaaactcgattactcaaggagctagagacaaagtaaaattgataatacaattacaatataatgatggcatggctaacagaaactcacattgccctaaatctcatagggtaaattttcacaaccaacttcacattaattgcacagaaaaacttgaacatatcgaatagcatgaactaatcaaaataagctatgaaatatgtcatctagtaataacatcaaacaaataggcatgagaaaaacagaacaaatatgataaaagcatggtaggcacaatgagcggataagtttactttaaatttactttaatccaaaggattcaaaatccaattcatggtcatcattagaacaaaactaaaacatgaaaacaaaatctttcttcttaagaaatagatctaaaacagaaaaataaaatgctaataagattaatcctttaggccataatatccgctccaataaaatttgtaagccaaatccctcttaacggtactgcaaaaagggaaagaaaagacaaacaaaggtgcaaagcaataataagcatacaaagcagtaatggtttgagtaaatctaaagtgataggaaaatcattaaagcatcttaccttgatgaagccaatctccttggcgttgctgcggaagcactgtctgcagcacatgagaccatacttcctgatcaaaccatgggggtttccacacacacggctgtcgataatggtaacgatccaacacaatacaacaaaacaaagtcaaaatcacagtgttcagaactgacccagtagataaatttaagatatttacaaatctatgaaatacccaaaaagaaataacttgaatctgaatcaaaacgaagaagttgtaggaaattagatcgttaccaggtgcgtgaaccggggccatagctcttggggtgagaattccagacgttggagtgtcccatgattggatgggaggcgggagagcagagggctggaatcgagagttgaagcagttgtggagaataggctagggttttaagaaagagtggaaatcttgcttatatatgttgagactccaaaccctaatttgatcgtctacgctttgacccgcatttggtttccctattcgtacggacaaaacccgattactacccgatttgatttaaaaaattactacttaaaaaaaatctttaataatggactatattttggtttagggtgataaatttacataaaattacatccacaaacattacataaaattattaacttataggtggaactacataaaattaaaattaactactacttaattagatttatgtttctatttagtttattcaaaataatgttaaaaagaaataaaaataattgacaaaaaaaaaaaaatttaaaaaaaacaacttttaattttgtttgactatggatgaaagattaaaaatatgaatcttgttatttaagttacccaattatgaatgcaatttatcaattttctttctttaaatgataacagattatgaaaataactttaactcttctatcattaagatcttaaattatatattatctatttgtatctctaaaagaaattagcatatgatctgcattaagtaaataatctaaatgtcacacagtgaactggatcaacctcaactctaaaccctagtcgaaatcatgtcggatcagcctcaaccattgaagacacgtgtcacccatccagacaagactcatgaccgagtgaaatccacgtgcgactaagaaagtcccacacagacttggggacaaatgttatcttattttttgcactatgacgtgacagtaaattggatgacacatattttacattttcctacctgggcataaggaagtactcctagcagcccccgaaggttgatataaagttttatcatcaacatatagcaggatgtccaagcagagcaatcaagggacatccgaccaaagtacaattgcgtgattaactcgcacgcatcgggcaagatatgtaagttggcaattttagaggcaagcatcgtagcttccaagacacgaagataatccctatatttgagagattaggtcggagaataaatacaatacgccttagtttcccattctttgtattgtaattatagaattaatgtagtttttttattttatttattataaattaacggaaatcaataagctcctatacataatgacatgtattcataattgagggagacgaaagtttagttataagagaacactcaagagaaaaaaacgatttaagagaattactcatagatcaattgtaagagttttagagagaacgaacacttcatttttgttctcaagtcaatacaacaaaaaagggagtatgctgttatcattctcacaaggtcgaacctctataaattctaatgttctttttacttattgttttttgctttctattatttattttatctaattactttatcttgactca

SEQ ID NO: 36611 - DNA, 5068 bp, Cannabis sativa
tataagttggtgcaaatataactccccttttttttaattttgaccaagaaatattcacaaattaatattgggaaagaaaagaaaaagaagaaagagaatagtaaaaaaaaaaatggggccgcgtgaacagcggagctacagcaggcaagcatgtaggcgataatggtggtagtggacgtggtagtagtagactagtagtggaagtggtgtgttaagttataacaacttcaaataataaacaactatatctttatggagatatgattttgtcatattattgtacttttacgaattgtaatctgtgatgtacgttagatgtaaaatggatataattttgtcctgttattatactttcacaaattgtaatgcgtgatgtacagcagccgtcaaatgaaggagatatttaatctgacggctgagattgatctaagagtaattagggttaaaaagtagaaacgtactctgacactcatttaatgtaccttgagacccatctaatgtaccacggaatacattccatgaaaacacattatggataaaatcatatttatatatatgaatgaagagttcaaatatatgtatgtacacacccaaataggcatcgaaatattagatcctcaccattttcctttttaaactaattacattgatttaaactgagcagattcaatgtttttaaaacacagtattacatcaactaggtgtatatttttaatttttttaatggaaaaatttcattaaattaaaaagtaaatgttaccctattacaagaatactctgaaaaagaggaaaaacatcttttcaaaacattaactcttatagagctaataacagaattaattagtgcgtgaaaaataacataagcaaacaaacttataaaatcatcaataatatgagcatagactatggtggatatacatattattaatttatttttctctatcaagattcaagagctagccatgaggagctaggtcccaattcgaaggatcaaagttagcccacgtagtatttattttgatatgtagttgtagtagtgggtatagttaaggctgatatatctcaaaactactacagcacattattaatttccttaattacaaatatatatacatatttatatatttatataatttcccatgtggttcgtgccctttaatgcacatgttcacatcatatcatatgattccaaaccctttcggcagcatatatatatgtatatgatgatgccaccttttcccttgctttgcacactagtttgtagccctgtgttagttgttacttgttacatacattgctcaaattattcttctttcaacttacccaaagtatcccattatattatactaatcttaaaaaattatactaattatttttaatgatcattgatttatttttcttaattattatagttgtacgtaatcatctattaatgatttcatcataaaataaaatcaacattaataaaaacaaaaacacatgaaggttatgagtgtacaatatataaatagaaaaaagaaaattgtgatattaatgccacttttgataaatgaaaagcgatctcatataattggaaatctatttaagtcactacaacaaattatacttacttatggtgagtttttttaaaatgttttacacaaaatttgtaagacattattactacatttagaagactgactttatttatttttattgtagactaaatgtgtgagccattaattaaaaaggcttggtgacattgtaaggatattccaacaatagaactcctattttgttgtagtgtatctcggtttatttatattttcaattcttattcaatgtttcaacgatttttatgaacatattactactaccaaatgtcttgtgccccatcacctaaattttttccttcgttacaattttttttttaattttttttaatcaataatttggactttgactctaaattagactttagaaatcagaccttgactaggacttcgaacccaaaccccaaactgaacccagatctcgacttggaccccagacccaaaccctgaaccgcgaaccccggaccagacccagaccccaaactggatccagaccacgaccccaaacaggagccggagtcggaccccagacccagaccctagactaaacctggagcccaaacccgaacactagatcccaaactaggtctggagccagacctcggacctagactgcggaacccgacccagaccccaaaatcagaccccgaacctcggaccagacccagaccctagactggactaagacccggaccctataccgatcaactcggacctcaggcccgaacaccagacctcgaaccttgacccggaccgtagacctcgaacccgaaccttggcccctgccctggacctagaccagcgccaggacctcgacccaaccccggcaccgaactaaaacccaaacctagatcccgaccccagtgccgaacccaaatccgaaccctaactcggacccaacttaaataaaatcaacaaatgatgaaaatgaaaattagatttacagaacatgtacacttttattttttgtttacaaaattgaaaaataaaagtggttgtaaaacacatgcttatgtttcacatgtaaaaaactttaaaaacaaaaattttactttttattattgtgattaaaaattttaaaaataaaagattataaacatcactgaattttcaacaaattgtttttaaaaaatttgatcaacactttaagttaggaagaaaaataaccttttatgtatttgattttgattttttattttattaacgataagaaatgaagttagaacacgtaacggtactcacattaagtctgttttagttaagttgagcaagtgtgaaggaataatatgctttgccgtgtgtggcgagtggtatatatagcgtagtgtacgtatttcgtatactctctcataactatatatgtatgtacatataatacatatatttataacacatttgtttatgcttatcttatccttttgttttgttcacactttattcttacccattgcccttttacttagtcatgaccttaatttccctgccatgccatatatacagtatataataatatatactatatatagctgtgcattaataatattattagactttagacttttcttttttattttatttatatgttttacagataagattaatgagaatggaacctttggactctctaggcttaatttcttcaaattaataaaactctttttatatgggggataaagaaactatttagcctcattcactacaacatatactttttgttgttattatagttattattcaaataaatatatgttataaaacataaatttttaatactataataagatatccattaaaaaatgtaaaataaagaaaatgtatatattttacttaaaatctacacaaaccgattaagaaaatacatacattttcttattaagaaaatgaattaatatacactgattaaacattgcacctaacatagatggttgcagtttaacacgtaattgaggataagagattggtacatacttgaagacttgtttgcacttttaagtgtatgtattcattttggagagagagacatgcatgtgggaataatttgctctttttttaaaagatttttattttctcttttatcactaatggggaatttctaaaattagaaagaatatatttttacatatttaatgtattaaaattcactccaaattactttaatataatgatgaatataagtttccataaaagttatcttggctatacatacataatgttaagttgttaacccccttaaataaataaaaaaaagataaatattaatttagactctttattttacaaaagattgattttattttgttaaatgataatttataaattgtatttttcaaaataatataatatagactctaaacttataatttttcgttaatttttttaatataaccaaccataaaagttaattttaaactcaatatctattttgtactattttaaaaaattaaaaatttaaattatcatttaataaaataaaaaatactgaattataatctaaaatagtatttactaaaaaacaatacataatgttacataaattaattagtaacgagaaacgtgcgaatgaaataatagttggtatattgattttaataattttcaagccattccttttattttttagttgacaatgtactcaacgactcccaataattcttggaagataagaaaagcaaagaataatagaatatgaagtgatttttaatacttttgatgagaaagggcataatatatataaatatgtattaacactttttaataggtacacatatatttggaaaaaaaaaatagtaagtacaaacactttaatttaatttgattatacataatacaaataatgctttaaaacatcttaaaccataagtacttcaagagatcagaatctgttaatctaactaagatggaataatgaatccgaaactgaccagagataataactaataataacttaagattatattaaataatattaaataaattaatttactatatatgtaaggtagatatgatgtggcaaagtgttttaagaataaattcataaaaataattaaaggcggagtccaatgtttagttctaattaaagttaattacataaatagggctgctcttggaaaaaataaaaacaaaatagggctgctatattttataattttatattgcatgcttcttcattattgatttttgagtaatttgcggcaaaactccatcaactatcaatttacttgcaaaaaaccatctaacctcatattttggtgggaaaacccccaaagtactgtttcgtttacatttttaaggtgtcgtctattcagcctcattaagtcctaattttgcccacgtggcaataacaggtcactaaaaaattatcctacgtggccatattttacaaaataaaaagtacaaaaaatttaagagtaatttgcggcaaaactccctcaactatcaatttacttgcaaaaaaccatccaaccttaaagtttttt

SEQ ID NO: 36612 - DNA, 4924 bp, Cannabis sativa
  modified_base (4816)..(4820): a, c, t, g, unknown or other
  modified_base (4895)..(4897): a, c, t, g, unknown or other
gttgacattgttaacattgagaagtttaatttgcttaagcttgatcttgttcattgcttcagaaatgtaatcaatatgtttttcaaagaatacccaaggtctatacattaaacaatcaagcgcttcaacaactgtatgttataagatacaatgaccaagtcaaataggacatttattttatttaaaataaaagcggttgcttgctgtttctcgcctattagttaaaatatatgaaacgtgaggaatgctaacatttcataaccattgtatggattagataaaaaaaataactgctattctactcctataaatagcatataaaacattgtaaaaggggattgttaaatttccaacttagagaaattctaccgaattgtattcccatttataaaatctcaagaaataacattaacacgcgaggtatgtagaattaattataaaatcacgtacaaatctctatcttttctttattatcctgtatttaaatatattgcattcattatcattattattttaggcgacgtttggttgaggggaatgaaattataagaataagaatgagaataaaaatataggaattaagtgaaatcaaatttaaaatgtatattgataaaaaaaaattattaaattttttctcatattacattgaaatgattttttattttacttgaaaatacaatcatcatttcactaaaataatgaaaatgtcattccaataaaataatgtttcaatatttttaaatgtaataaagataaagtaggcacacgaagcttccctgttctggaatcctctagggttttcttctagtccttccagtttgcttatgttcatccgagtgatgccgtccatctttttctctttccattttccctccattacccccgtttcatcattacaccacatttattacttcctgtttttccctcaggctgaaggttgcatttaatgttgtatcagagaactcttggttctcctcctcattggcctcaaatcccacctttaataaccgtcattttcctcaggagatcaataataatcatgattttaggctaccatagattcgagctaaaggatactaggactaatccagcatctctctatcttccagcgttaactctctccagctattttctctactcttttttctatttaaaggtttttgttaaggtttgtttgtatagttttttacccaaaaacctgtgactaccactgttagcaccttttctcatgcaatctaccatgaataccaacccataaaccaataaccactctcttcaactcaatgctgaggaagcattaatccatgatttcgatcatgtttccatccacccagaaactcaaccagattcattctacatgtcgtcaagattttgacttcaaaaaccttcaaacttgattgggtctgtaacgctatgaaggatgcttggattgcccgttttcctttcgtcttcactaaatatcattccagtctgttcttggttagatttggttgtgaaggggacagaaggcgagttatggaaggccagccatggcattttgatcgctcccttatgttatttgccatctttgatggttttgataccattctccctagccaactcagatatatcgctctctggttgcagattcattatatcccttttggcaataggtaacatggcttagcccattttattgctgacaccgtttgggatctcattgaagtgcaccttccatctctctatgattccattactcctttcatgagatccggatccttcttgataccactaaacctctgtttcgtggtatgaacatccatttcagaaaacttccatcactgaattgctgaaattctaatatgaaagtatacaaaactactttaccattgtggtaagcttgactacacttttaacaagtgtgacaactttcttcattactgtgacactcatgcccatcccatccatcagttataaggatgttcttaaagccccaaccaaaaccttttacaaaaagagcatttttgagctgtccaactcttcaacttttgaagaaaccccttcactcaacaatgtctccagtcaaagcccttaaaatgcgattgtcaatttctggtccctagtattgccaacacttctttgctaaatactcctgatgctatgaatccttcctctacgatcccaaccaatgtctcttgttaagaatacaaatgttcaccaactcctgttgtctttgttttctgccctatcacttgtcccattaactccaaccccatcatgacttctactgtgatcacctctacctccaagggtaaatgccctatgtatctcgagggctccaaggacacccctgaggttcatcctgatgtacccatttgtcccagggctcgtgttgcttctatcaacatctctagatccaagaggtcttatacaagataatagccaagtgggcactttggtggggagcatcctgaagagggcccaatcctcaaactctgaatttgatgtggttccatccctttctgatactgctgaacaggcgggtgttgctcatggattggagagttcccgagcattccataatctctccctcctggtgcatcaacatcatcctcaaattctttttgtgatggagactaaacttcctgctaatagtagtattttgtttaaggctaggttatcttttgataaaacttttgaggtgcctaggcatggtttaggagggggcttgcttcctttttggaatgatgtagtcaatgttcgtgttttatcttactctttgtatcacattgactgtaatgttacatataataataagaactaccacttatcttgttactatggttcgccttatgtatatattaaaactgactcttggactcttttgaatcgattatttgatgttgcccctctttctccttggatcatcactggtgactttaataactacttgggctttaatgataagagtggtaccaatcctcccccccccccaatgctatgctcaatttctaaaactgtatcaccaaatatgacttgcatccccttctttttgttagcaatcgctttagttggaaacatggccgaactatggaatgacttgactggggtattgtcaataaggcctgggatggcctttttcctatggctaatcttactcatcttcctttctttggatccgatcatagagctattaaagttgagtataatctcaatccttatctttgtaagcgtgttaaccatttcttctttgagaaccactggctgatggaccctaattttcatcatctcatcaggaagagttggcttgaaacttcgaatcataacaaccatgatctttccttgcattctttccttaactagtagaataattgtgttaacaacctcaaaatctggagccaatccaaaaacactcttcatcacaatattaagtagttgcagaatcaaattgagtccatttacaacatgccctccttgtctcccaatgatattacctgtgtcaatcaccttcaatcatcccttgactccctcttattaaaaaatgaggttttttggaagcaaagagctagagttaatttgcttaatgctggggataagaatactagatattttcacaaccgagctagctccaggaaaagaaataatatcattaagtccataactcttgatgataactctgttgttaacacttttttttatgtatatttgtgctacttttgtcaacttctatagcaatcttttcacgacaaaagggatgaatatggattcggttaatactgctttgaatggtatcacacatcgtattacccctgaacaattttcttttcttgataaggattttgatttctccgaagtcaagactgctcttttccaactttctagggacaaagctcctgggcttgatggcctaaaccctctcttttattataaaaactagaacatttttggttcaagtttttgccatgatgttgcggatgttttaaacaatggtgtgagccttaattccataaatgagacttatcttgttcttatccccaaaaaaagtaatgccaccaaagttcatgacttcaggcctattagcttgtgctcaatgatttacaaggttgttaccaaaaccattgctaataggcttaaaattattcttaccaacctcatttctcataatcaaggtgctttcctcaataatcgaattatttttgataattttgattgccaatgaggttataaatgccataaatagtcgtaagaaaggcaacgttggttgggctgcccttaagcttgatatagagaaagccttcgataaagttaaatggggattcattgagcacattcttcttcattttggtttccctcaaaattttgtctccctcatcattaagtgcatctccacagtctctttcaagctttgcatcaacaatggtctttctccccccatctttccttcgagaggaatcatacaaggggatcccctatctccctatctttttctccttgttgctgaaggtttatcaggtatcattcgttccaaagagcaagctagcttatttaaacgtctctctatttgtcattttgctccctccattacccacctctttactgatgatagccttcttttcacccaggtcactcataggactagtcaatctatacatgacattttaattacctacaataaggccactagccaatctattaatttagctaagtcttcagttttattctctcccaatactaactctcaggacaaaaattcttttctctcttctcttggtttggaagataaacctttcattgacaattatttaggggtccctcagtgttgggttttgtgccctannnnnaactcatttcaatataattagacttacttactaataaagatcagaaataacattttttatgttgcatggttcacnnnatttatttcatgattatatgcatataa

SEQ ID NO: 36613 - DNA, 1776 bp, Cannabis sativa
taataggtattttaccttgaagcgtgtgattctgggagtatgtttgaggggctattggcagagaatataagtatatatgcaacaacatcaacatatccaaatgaacttggttgggctacatattgccctgcccaacgtaattccacctctactggttatgatgtttgtttgggtgatgtcttcagtgtttcctggatggaagattcgtacgttactaattactatatatatatatattcactaatatttaattagtttcattatatttatatatatatatatatattttaatttcaatttgaatgtttccgaaaacagagacaagcaggatttacgtaaagaaactttggagcaacaatttgaagtggtaatatatatgtgtgtacatatatatatatatatatacttatataaattatttggtagaaaatttgatgggaaaaatgagagtgcatgcagattcggaagagaacagcagaggacaacagtagtaggagcggtggtggattggctcatacatctcatgtgatgcaatttggtgatttgagtttaagtaatcaatttgtatctacttacatgggtgataaccctccaactacttctactatacataataatcatcaactcaatcatccctcttcatcatcttcacttcgcgtttcacagcgagatgccgatctatttcacttttcctataaggttcactttctaattattaattcattttagaaattaagtctaactattaaaatataaacggccggagagtgtttgtttgcgtatgttaactagaattggtcatgagattctatctataaaaaccaacacgcctaactagtgaacacatatgaaatatacatttcacacaatgacaatccatataattatatagtatgtagtataaattgattatattatattattatatgatataatgacataattttgtttttgttagtgtagttcaataaggctcctgcgggttctaaggaaaaagccaaggctggagaggatctacaagctttgattactcagagaaaacaagttgatgataatattaatcgcttagggaagcttgtacttggaaataaaaacggaaaactcttgaacaatgttcgtcctcttggtcaacctcttgtcgacgattgggattgtcttaagaaacttgtaagttagctagcgacaaattaatatatataaatatacatatacataataacatttatatgtacatatataaaaaagtttatagagaaagtcagggtcatcacatcaagcttaccataaatatagtcagttgcaactttccctacctgttattttgaactctatctatgataacgtaaattaagaacttataacataaagccttaacttaaaagtttcctatattcctctatattattatttcttcaaaaactatatgaaatatttttattatatttttcttttgttaattaatttgcaggtgaagacatatgaaatatactgtggagctttgtcatcatatggtatcaagtacacgagacactttgccaacatgtgtaacgttggggttaaccatttccaattttcagtggctgcacttcattcctgctattcttaatgaagcaaatatatattataatatatacaaatataataatagtacataacagtattgaagtggatgttgaacaaaatataattccatataagtatgcgatacaggtatgcagggatatatttgcttgtaatattataattatacatgaaataattaaacactacgttgat

SEQ ID NO: 36614 - DNA, 3214 bp, Cannabis sativa
ttgtaaagaggaaaaaccctattaatttgaattatgataaagataaggaaaatgaaatgaatttactgtctaattggagatcatctttgaatattacaaatttgggttattatgggtaacaatagggaagaagaaatgaaaaatatcatttctttggtattaacaaccacattgacaatgtagattaccctccttgtatgaagtgttaacgtattaagtagtgttgtatgtgtggaatcacatccccctttcctcacttatcttagaggtaacctatgctttatgtttctgactagtcaacatgtcaagttactgaggtgatactttcatggcagtttctggtttgaagtgatgtgatgacttcttagtatgttttgtgtgtgtgtacagttatcagtgtttgatagttttacatctatgattttagcccatacacaactccataggcaactacttttccttaaactgtaaatcaatgcaatgacctggtttttgatttatttgcacttatggacttgaattgcagtattctctagtctatgattttctgtttggactcttagctttctggtttttcctgtgttttactttatctttgtttctcaatcaaatcatattcttcaaggacactgtttgaatgcgttttgtttgtctatacatttaaagtactttaacaacatttttgaatctctgatatatggatgtcaatttgaattttctgcagattgcattggttcggcttttaatatgaaaggggcgatgcaatgtccaaattgccgtaaagttgagaatggtcaatggttgtatgcaaatggatctactcgctcattccctgagattagcatagatgactggatacctgatgaggatgcctatgatatgggctatgctgatatggtactgaaactagttgactctctagtttggtatttattcattatgttcggcaaaaatctttcccatggcacagctctcccataaaatgatttcggattgacattgctttttcatccctaaggaaacacaaaaattagaaagatattttgagctggcagaaaattagacaatgggttcgctgcatttgtgtttacaaattcaattttctttcattagccattaaggcctttcagggccacaacacgcctgcattagagcgcttatgatacttatgattggcattgttttaccacatttacgatgctgctttatggtttttaattgtactttgcagccatttagacttcactggtgtccattcggtgaagcagcacaaatacattcatcttttgagtaagcaaaatttcttttacctttaattgattgatcattttctactgtttttcatgttaagtctcgaataaatgtttgcttgcttaacacccctgacacaaactaattgaaacattaaactccctgaacctagctttctgttgcattatatgcttccaattcgttcctttctttaaggagatatgaatgtaatcaattccttgatgatggcataatagattgttcttaggaacgtgcagcttctgttcagatgcttgtccaatgcgacatttagtataatgatgattttcttcttcaatttttcctattgagatgatgtatagagtttcttgtatggcagttcttttcttccttttggttcgcataatcattatatatgtactcattggctgttacatgtgctttatgtatttcagggaagtggaatctccaccaactgcttgtaagtcatttatctagttccttagcaaagttttcttagctatccttgcaaaatattttggacttgagaatgttattcattaatgcagatcacgaccctcgtgagcaccatgcgatgtttgcagaacagattgttccgtcatccctgcctcattcttactttgcgtacttcagaccagttccgcctgcatcatccagatcaatgaatggcattgatgatcctaacttaaataacccatggaatgtcgtaagaggacagaatgagatattaaatccccatatctttccggcccttagtatccaatatcaaagctggggtcgtcattcctctcctttctccccatccagcagccatgtcaacaatccagcttcaaatccatctgctacaattaggtctactaacattgaatcaaattctacagtgagatctagagcacgcctgtttcggctagttcaagggtgagtagtctaactttgagaaagttaaaagtctacatcattgttttatttatttacctaagcaagtaaattccttttgttcttcatactatgcttgaagaactgattggtgaggaggtatatcatttcatctctgggcagatgcgttgtgatataaatatctttaaaaactactgtggagaaaccattgtaactctccttatggtctcttttgttttgaaataatggtcttgtgatctgttaataaaataaacaaaatgacaaaaataagactcggagttttggtaattgggtaaatattatgtttagtgtgattaaatctgtaaaaaaactctctagatataggaagataaggctttttttgtcatcaaaataaggctagatggccgatccagcgactgaatattaattttttatgcacattgctcttttcaggtctgatcctagagtggaaagctcatttgtacctcattcaacagacaccgctgctcaacctcatgagagagttcaggccttccaccatcatttacaccacagcgtttcgctcaccatgccatcacccgtgactcctagtttccgaagattcgatggtcacggtggtagcttgccagctatggtgccaacagctctacctcacgatcatagtgctggttttttcatctttcctcctcaaagctcatctgacaggaatgctcgtgaagaacattctttggcaagccatgttcctgggtggggaagggaacatttacctcatttcccaaatgtatattcggagcgggaaacaagttggggttctcctcatcgtgtcaccggtagccctgattctgtaaacaggtccagtggcatatggcacaggacatggtgttagtgaatctggttccaaccatcattgtaaaagactaatgcaaactcattctgcttgcaagaaactcataaatgagttatccgaattatatgtgaatggaaccaaaggctatatataaactgatgttaattggcaggactaatcttatgtaaataagta

SEQ ID NO: 36615 - DNA, 2538 bp, Cannabis sativa
ttttaaaataaattagatcaatctctttgtttggtaggcttctgttttagagatttagggaggaagacttattattcttttttttgttatttctgtgtaatcattatatgttcactatattactcagttattaagtttggagaaagagtctgaaaatcattatttttgtgagtatttgtttgttattaagtttgtgtaaccccaaaataaaacaccacaacaatttaatttaaatatgtgtttgtatttgttttaaaataaataagaacaatctttgtttgatcgggtttggttttagaaatctaaggaagaagaagatttagtagggtagtattgcactactaatctttattatttttcaattatttctatgtaacgattagatatgtttactatattattcaattacttataaaattctaaattatatgcaatattgtgtcatgatgtttgatccatctactctgaaattacataaatgatacaggtaccaatctttttactgtagtaactcgagcaaggaagcgattcttttggtgctcaggtgaacttgagagtaacatgttccttggtgttgcattctattttaaagcttattacacccaaatgaaaacacgaagataccagcaagacaatatatatgtatatagacacactaacagagagtggagaaatggaccatttctgcaacttattgtatatcacatgaaaaaaataatcctacttttggaaggtaagaactcaaagctttaatctaaacttgcaattactagctttaatgctgattaagttatttgtggttaaactgtccaccaccaataggcatccccctgtgactttcaccttcctcagcttcagcttcccaagtttaattgctactggtgcatgaaccttaagatccaatggaattcgtccggttctctgttgttcttgcaatgcagtcattaaagtattcccatactgggtttggcctgtcaaggctatattgagcactgttttgttctggtgaccttggtagaaatttggtagtgacccttcacaaagcttagtttttgttgaccaaacactcagcttccctcctttcttgtagtaaattccaattttcttgtttggattgttggctgtaatcttcacatcgaatttggcgtagagtgtcatgtcgaaattgagtcttagatcacttatctttaaactgttgactgaataattggggagttttggctggaaaaccttgtaaagaatgcctgcagtggctgcaatgattatcaacaagagtactaggaggcctattgtccaacacacacacttgcaacaacaatttctctttttcgcaggtattgcttggatggtaggaatggtctgcggtaatggagggtggttccgaactggactcccttttttcgaggccgaagtaccattggggaccaaaggtgctgttgggggtgcttcaatatctattgctggatgaactctctgattttctgccatcactaggttctgattatggtttgcctttgttcaagtttcatttgaaataatcttatataggtggaacctggatttccttgctgagtttctcataaaatggatttagtggaatatgctgagttgtcctgtatataagattgtttctgggatttaaagtccttaccttccttacctaatgataaaatattggtcaacaatgtgtgggtagttcagctaagtaacaagtgctattcattattttctgggtagcaagtgatttttcaacattttctgtatctacatttggcatatcatgataatttatatgctatgttaagtgtttacatttaagtatttgtgaatattaaatatgtttctagcaaaagtagaatattaaataaggtcattcgttgaaaatgacactaaaatataacatttgggcaaacttgttaaaataaattggcatcagaaaatatatacaagttactaaatgcttttcttatttcttttgaatggagaaatttcattcaaaattaactgggacaaaagctctacaggccaggcgtaaacaacattgacatcaaggagagtaaaaaagctcaagacaaacaacaaaaaactatagggataaatcccacataatggcctaaagccaaatgtcacaaagaacaaaaaaaaattgcaagacatcattattatagagtatattgagtggggtgacagtatattgaatttgatttgaggggatgatatccaatatttggagagttgaaagaataaggagagaatatatatgactttttctttgatggccaaaagtattgggtgactttagaggcagacttagatcgttggctattgagcgtatttgactcaagtcttggatcgattccctatgatgaattaaagatatacatggaagtagggctgaacatttagacccgcaaacccgaaaactcggctacctacctccgcccactgtcgaaaaagccgaaaaattaaaaacccgtgtggtcgggtcgggtccaacccgaaaatgctccacatgggtgtcgggtttgggttttaata

SEQ ID NO: 36616 - DNA, 9428 bp, Cannabis sativa
  modified_base (525)..(527): a, c, t, g, unknown or other
  modified_base (1154)..(1169): a, c, t, g, unknown or other
  modified_base (8238)..(8246): a, c, t, g, unknown or other
gtccacgtattttgggcgaattttggagcaacaggttacatattaaagtgttggaatgtcattctaatggaatgggctttcaccattttgatggaatgacaattccattttaaaatggaaggaaagatcattccaatgcataatgagaaaaatttaataatttttttatcaatttttttttttatacattttaaattttattccattccatttctattccaattccaattctcattctcattcttatgttttcattcctcccaaccaaacgccaccttagttttaattacaaaaattattttatctaaaaacacatttagttacaacaaattgtaatttttgtgactaatacctttagtcacggactttttagtcacaacataagaatgatattttataaggctaattagcaatttttccctccaaactttaacatataccaaatcattctacctgaacttttttagccgttaaaaatttcccttgaactattgagattgttatttaaggacttttgtctaattnnnttcaattttactgtttcaataattatttatgtaaatcatactccccagactttgatatctaccaattcatgcccctcaaactttgatatgtaataaattatgcctcctgaactttcatctatattagaatttttttactaaaattagacaaaagtaataatcttaatagttcaggatgaatttttaagggatatgatttacattataattcgggggaaaaattgctaattagtcattttataattagtcacaactttttttacttttaattacaaattttattatgagtaaaaataaaaaatgttacagtgccgtaaaatataatacctatagtttctctcaattggaggaggttttcatgagtaggactcctaccataacaaaatcggccgatccaagaaatactttgggtatgatataatatatataggactattcctgtggactgaggggctattatatttttacataatatatgcttatgctataaaagaattgttaaaaactgataagatgttgtggtattaaatacaattaaacctaataaataacaattggtccatgtggtctgcctgcccatacctatcacaattgattatttcttccacttctctctctctctctctnnnnnnnnnnnnnnnnatatatatatatatataacagaagtgtatacatacaatcctatctttcaatatccacctgcatggccaattcaactcatactcctttcctctctcaacccaactcggacgagtcttcccaatctcctcaccctgaaggtactgaagggaaatatcttccatcattggattcaaccattgaaaactgcatcggaaaattttgctgggctcaatttctccaagccatcgttgtctcttttgcatggttctttgatgctcaacaaacattcatttcagtcttcgcagacgctcagccaatgtggcattgtaataccaacatttcatcatcatgcaatactccaatctctgatctttgccatcttcccacgaattcatgggcttgggatttgcctgagcacacctccaccatatccgaatggggcttacagtgtgcaggatccataattaccggcatgcccgcctcggccttcttcgtggggtgccttatcggcggccttgtgcttgccactcttgcggattcttcccttggtaggaagaagatgctctcccttacttgtgttgctatggctatgtccacactccttactgctttagccaccaacgtctggacatactccgcgttgcgactaatcagtggcttcggccgtgctactataggcacgtccgcgcttgttctgtcaaccgagttggttggcaagaaatggcgagctcaagttggtatcataggtttcttgtgcttcacgttagggtttctatctttacccgctcttgcttatttaaacattggttcaacatggagaaatctgtacctatggacatctattcctacaatcttctactctttacttgttcactactttgttcttgaatctccaagatggttgttcatcaaaggccgaaaagaagaagccgtcggaaccctaaaaacaatggctaaagcaaaccatgaaagcttcaccatgagcttttcatacttgcttattgaagaagaaacatggaatgttgatctttactcagcaatcaaaattttgatagagaaaaaatgggcccttcggcgactctcagccgttatggcgatcggattcggggtcgggttggtttattacggcatgcctttagctcttggaaacttagctttcaatctctacttaagtgtaactttcaacgccttgtctgagcttccagcttcacttatagcttttctattcgtatcaaagcttaaccgccgaacttcaattttgttctacacaatccttagtgggatttgtagtataatgtcagtagtaaaaggagtaaagagctatacgacattacaaattgggttagaattggtgtcgtttttcagtgcatgctcggcattcaatattttgctaattttcacactagagttgttccctacttgtgtccgtaactcggcggtttcgatggttagacaggcactagtgctgggcggagtgttcagtccggtgttggcggcggccggtagaggagatgggtttgtgtcgtatggagtgtttggtgtggtgataatttgttttggattatttgtcgtttgtcttccagagactaaaggaggtgtactttgtgatacaatggatgaagaagagtacaaagaaagacatcaaaactacttgtgctaataatgacgtataagattctcatcatcacttgaaaatatatcatgacagcaataattaatgttccagctttacatatataacattattatatatacagcttgtatatattcctgtaatatatatgaatatattatggcatgtgtacgtttaaatttattataactatgtaataatattaatatattatatgtatatatgtatcatgaaaaagctaataaatccaaacttgccactgcatgtatatgtattatatgagaaattaataatattaattgtaactatattatatgtaaataatcgcagagtaataactaaatatcacattttctccaatttaataactgacagcagtatatttatatatttatattcacgggttattacgcaaaccaataacttatccacgccagtattgctatattatgccatgccgtagttaaggatttttaatattatttattaaatgaagatcaagatgtgatttaattatatgagtaataatatattatttttatagtggttgacactttgaagtactacttcttagtatttttctattagtagttatttttaatataaatatatatatataattatttattatatctgattaaataaacaattttatgattactccattaatatgaaattaaatttatagaaattatgagtttatatttactttgtttaattatattgtccatccatataataaatataagtaattagtcacttgtattggtgatcataatttttttttttttcattttactcttctaattatttatttatcttttagtattattaatttactaatgacactacaacaaagttgagctttagggaaacttctaataatactaaaaattgcgcctaataaccttgtcgcccctaataattcccacctaaaaatgttattaagggtgacaatttttgtcaaatttgttgcccttaaaagtaatagttagattttaacttatacatttaaggatgacaaaagttgcccctaaagtaattgtcaaataaaaattttgacttttaaggcgacaatatcacctctaaaagtcgcccctaatttaattaatatttgttaacgataaaaactcgtcaactaatctagtagctggaaaatgaaaagtaacccagagttaaatgacgataaagataaaaatgaagatgaaatgatgttctgaaaattattttctctctattgcattcaaggcctgagttacaccaagtaattttccaaccccctctcatatatctgagatgggggtatttgtaggctctaatggcttggtgtaaaaagtgatcccatggggacaaaacttcgctttcctgatgcatgctgcaggtgctggaggtagtttggtacctcatacccttgtctggtgtcaagttgtccccaattgcaggagagtgatcctcggttgtaggcatgtggtccccgattgtaggggagtggtccctgattgcaggttgcatgagagtagttgtagcatgtggtccccgattacaggttacaagagagtggttacagtgtatccttggttgggtcctcaaaactcataggtccgtacgttgtcgccgctacccgtatttccttgctctcagagttcttagaagacgtagttgtacgctttctccttgcatgcgttatagatgtgtgttcacctctctccttatatttataatccccaaaatacatttacacaacacacacaacagctcgcatgcgagaccccccatgggctcgcatgcgacacccctatgggctcgcatgcgacacccccatgggctttcttgcgagccccaaacactcaacacacacacacaaatcacccccccttatacacacacggctcgcatgtgaacccccacacacatacacacactacacgctagcccccacacactacatgttacccccctacacacacggcttgcatgcgagccctccatgggcttagactacacacgcatgctccaagctcggtttgccttggagcctccacgtgggctcacacgcatgtctcccactcatgcacacatgcatctttgtaggattcacgtgattagttttgtgattgtacgaacgtatccgatatccaaaaatactcttctttgagaaacatgcatcgggttagtaggttgactgagtgcactctcgcttgtctctctgcccttaggtgaataatcctaatgattagaagcgaatttttacgattaatacttgcctccagtctactagaattcttttaagtattttggtagactgaaagaattagggtgcaaggtaattattatctccatcgtgtttatcaaggatgagcctactagatatagagggctccccttgtttgagttctcacttcacatcaacaccttagcgttgtggcaagcttctttctctttgtccaagtggtcttgagtttgattcctctcaggtcacttcttatactttttatttctattattttggcatatatatatcttccttcatttttgtgttgaagttataatgtgattggatatcttttacccttgacattggggtgatgctcaactgttttcactttgttcttagcaaacgtctcccctaatgttaaatgtcaaaatattacatattttatagtgtaaaaatacaaaataaaattaattctttataatattttcaagaaattaatgcaatatattattatgttaaaaatattttatttagatttaattttatctttgtttataattaataattagtatttatggcatattaaaaaaagaaataaaaagttaagaaaatacattgtttttattgaaagaattataaattaattagattttaaataaatattttcattaaaattattgtgatatattttatgttgaaaatattttatatggatttaattttgtttgtgtttgattgaaaaaatagcaattgtgaaatgaaataaagaaataggagaactatggcctaaagccataaaattggcatttttgaagcacaaaacaaaggtccagccaaataggcctaaccggcccttttttgctcttcaggggaccgcccgccacgtgttgggctgtcattcgtgcggcagaaagaaaacaaggagcaacagctacttttgtcacccagcccgatagacccacgcgcgcgtgaggagcatgatgtcgtgtggtctgggcgggtcatgcacgcaccaggcacgcgactccccttctcagttgcgtggtcccaacagccaaagagacttttgtctcacttcttcccagcccaccacgtgtcctcatgcaactgattataatgtgacatgtggcactctaaatataactattagtattcacatttttactcacatacaatttgtaataagtttaattgcgcattagtcattttaccttcctataaatagaaggttaggtgtttagaattcaatacagttttagacagaaaaattcagagaaaacgcttgaagcggtcagtgttagtttatcgcttttcttagttatttttttttagtttctaagttcccttattattaaggcagacgataaaacctaatgtatttaattgagtatttgtttttattttgattttcagtacaatatatgcctatgattttcgtttcttaaaataatttctttcatctttaatatcacgtatgttcgatacttagaaattattagtgcttggttctacattttattaaaataatattcttttattttttatacattaaattctttcacatttaatgcttagaggttataattttttttatgacgaagaagatacttcattaatcaacaaagtagataccccctcaggtctcaccaaaacaaacaacccacacaaaaaacagaaaaaaaaaaaaaacaaattaattacattgtattctcttcaaatagtccctctcctctctagtattgtttttctgttatttacaaggtataatttgtataaaactatactcttcacttcaactacaattaagctaactattctggagcagcctttaaagatgtatttgttcctattcagccatatacaataacaagtatcaagaagaatggcaatggttatgcattttatcaaacctaaatccttcatggacagccaacttatccagcccccatacattgttggctaagcattgtatcccagccatctagagattcggtccaacactcattgagagaggccacagaaagaagaggtgatcatgagtttccaaatagtctccacaaataggacagctccaagtagcaagctcaacatggaacttgctcaaattatcacgagtgagcaaatgagaattcacaatttgccacaaaacaaagtggtgtttgggcaaattcaaatggctccaaatagctttgcaatagctatcacaattctccttcaagaggctatgttaaagaaaggaagccatgaatttacatgttttacccaccctcattatgtcattactagagaatttctgtcttagcctgcataatttactccagtatcagctcgagtcaggtttttgagtgtaagaccagaatggagcatctttgagataaataaggtttatccatttaacccaaagaatattttttttctctataatgacccaaatatacttggaaagcatagcatgattccacttggtgccctctttgaaactgaggcctccataggctttggggaggcaaacttcccaagaggtaatatggatcttgctcctctcatctttagttccccacaggaaacccctacataatctttccacctctttcgtaatactttgaggaagaacaaaaatgctaatccagtaattactggccaagcataactgtgtgaatgagtcggggtctacccgcatgagaaaggtgtctactaggccaagtatgtaagctttgcttgatttttgagatgactatcccacagtctttaaattttcattttgttggtctcaaaggaacgccaaggtatttgagaggaaaagttccttcaacaagagacatatctgcaacaatcacttctttctctctgttatccacccacaaaaatagatgtgagacttttgggagtttgtgaggagccatgtagtattactaaactcatccaaagcaaatttaataacaagaagagattgtctagttcctttgctcaaaattattaagtcatcagcaaagcataaattaacaagttttaagcctttacacaaagggtggtacttgaatttggaatcttgagtagtatattgtaaacaatgagtcaagtattccatgattaaaacaaatgataaaagagatatagggtctctctgttgaaggcatttagcatattgtaatacgactattggtagaatgcaggaaacgatatacaatataataaatattccaaaataattaatagtctaacttacataagaaaaacatgannnnnnnnntataaaagatactattaaatttggaagaaaaattagaatatgaagaacaatttaataaatgagatatgtagatgaaacataaaagaatcaatatcaataattaaaataagaagtacaaaagttacaatctaacctcactaatattattacttttacacactcaaacacagatcgaacaatttgaactctctcattctttctatcctctcatctcacctacgctctctaagcttggttcaaaaccagcttgtacaataatgtctaccctttagttgatcagtctagggataatatataggctttagttggtgcttgacataagtgataaacagaataaccgattcaattttcagttgggagcttggacagttaagacaattggcctaactatcttaacagcttgttgccccaagtcagaaatttgagtgtgcacaagtgattggcttgagaaataaggaccaatcttcacaattctccacctttggctcctgatttcatcaaatgtagttcatagtggatataggcacttgccttagggctctaggaatcatgtcttgataccaatacttaattatattaaatgacatgagacccaaaacttaattacaccggtgtttagtatatgaggttcagacttgatgggaatgcgaatgtcaaactaaattaaattttaataactgaagagtttatgtttctaagtgaatcctactttttaaattaaaatggtagtaaacacttatattctctctaagtttactccctccaactctattacctctaactcaaattcacacaaacaccctattatatgaaaaaaaaaaaaaaaaaattgttgtccccaaattattagtgtgccttccttgtccaccagttattttaggacacatcatttatatctactttacatgtatcaattaattagtttagagtttgttaacgaatttattatatgttaaataagtataaataatgtgtactaaaataattagtgagataggaaaggcacacaaatttagagacaacatatttttttttcatttattagatgctaataaatagtcatgctcacattaatatcatagatatattaaaaggtgtcattgttctctagcaatatagtggcatttagtttgaggtaatgaaacagaatagaatggaaataagaaatgctaaagggcacca

SEQ ID NO: 36617 - DNA, 6576 bp, Cannabis sativa
  modified_base (115)..(121): a, c, t, g, unknown or other
cttagaaaatgtataacaaattacaatttagaggttattcttatttataattggcccaaatcgggacttgatttttttataataaattagaagttattcttgaatagagtattcnnnnnnngaggttctactgtataactaaaaaaacatattttaactgatttttactataaatataattccttatattttaaaaataatactatatatatattactttgcaaaatggcttttagctttgtagaaaaagatgttgcaaatatataaatatatatagatatttgatatcatcatgttaaaagtagttcataattaataatatgttaaaattattatagatatcattattctcttatttgaacatatcgtatctctcttctatcgatatgtgtgttatgaaatgaaatctctcttgctttttataatactattattgttacttcaatttgcttttttcatactactttttatttttaatgccatatatcacaaagttgctttcatatatcatgatatttaaattattatatttatagggaaaagtttaatttggtagactttacattaattagttcggtatttataagagtttttttggtttaattatttttatgatcatatatatacttccttatatttatttagttagggttacatgtaaattttttaaaaaaattcaaactgtttaaagtaccgaaagataagtaactatttgaactttatttctacagtgtaaattaattcaaaacttttcaaaaatttatatgtaattttaaataattataataatgtacattattttgaagaaaaaaactaaactaaaaaacacactaaaatacctctttaagaacttctctaatagaacggtaaaatcccaaaaatagtagcgatttgaacacaaaattgtttaaatagaactctaatcgctatcctatatatataagagtttacagtgtcccactaagtagactacactaattttattttttttagtttttaatattaaaataatatatttatgattaaacgtatatatattatattataatgtgagataatttaataaaataatataataataaagactattttttagtgtaaattttagtaatgtagttaaaataaaaaaatagtgctaaaattataatcttttaatattaatttaacactaaatttaaattttatcattggagatatatatcttgtcctaaaggtgtgtactacaatatttttccatatatataaatatatactttccacatcaataattaaatttaaaaacacaagatcagttctacatatgcaagtgttttacatatcaattatttgattagaatgattatatatatttatatattatatatatatttggaaaataattattaagttgtaaagaaaataacaaaggaaaagacagaaagtgaacatcatcatctttggccaaattgcttatagcctctgtggtgtaaaatgaaagaagatgttttaagaaatctccaattctcatccacatctctctctctctcctctctctctctctcctctctcatatatacaaaagctctatctatatagggtttactattagattctctcatagaaattcatggtgatgattttgttgttgggataataatggcaacaatacaaggtttgttttctataataatccatggtttgaatatatatattgaataatttataagttctttatatatatgttataaacaaaaatttgtcttttatttttttggtcaatttttatactcttccttcttctaactttttctccatgttttttttttcttgatctctttttgattttgaaggtttatatatatagtagtcttcaagaacatttctagctctctacttggagactcaacaaaaacaataaataaaagattttaattagggtttctacttcttgcaccactcataatggaatcatgatatatattatatatatatatatatatatatatctcatacatagtatttgtatgatgtgattttaaacacaatataacaattaaaatgataaagggtttgatgatggtagatgataacatatccaatttgacttttgcatcatctagtgaaatagtaagtgcttcttcttcaagtactactacaagaaatgatcaatctttattaggcaccaccaccaccattaccatgtaccctcaaaactcttcaacatcaacaaatcatcaagagttaccactttcgccgcctcctcctcctctaaacaagaaaaaacgaaatcatccaggaaatccaggtatacgaatttagggcattttttcggttatcagtaaagtacaatcctgaccatttattaataagtctgtaatctacgattctgatatagaatttttctatatattttattgtactaataatgatataatttcttaaccagatccagaagcagaagttgtagctttatctccgaaaaccctactagcaaccaatagatttgtatgcgagatatgtaagaaagggtttcaaagagatcaaaatcttcaactccatagaagaggacataatctaccatggaagctaaaacaaagatcaaacaaagatgtgataaagaagaaagtttatgtttgtccagaaatttcatgtgttcatcatgacccatctagggcacttggagatctcactggtattaagaagcatttctttagaaaacatggtgagaagaaatggaaatgtgagaaatgttctaaacgttatgctgttcagtcagattggaaagctcattccaagatttgtggtactaaagagtatagatgtgattgtggaaccctattctctaggtaacaaaatattatatatatatatatatataaatatataaatataataatgatataatgatatgtgaaagaagagaatatatatgttattataaagtgaaaaaaatttaccataaccacactcactacatatatagaaaatatttctcactagtttgaagagtacttgtacttataaatattcacatgatatatacatacaaatatatatatatagctatatatatgtgtgtctctcttttgaaagaaaagaacaaaaagttattgcatgacaacatgtgatcacactagctaagattatatttgtaatatatatatatgtgatcaccctatacatatatagatgtacattatatattcttaagtttagatttattaccactttcgaattggataaaaaaaacaaaaagctatattgcatgacatgtgatcacactataaattctataatattaataccaacaatattatatatctatatatatgtataggtggaattgcattatatatttataataatggggttaattttttttatttttatttttgttgttttgcatggaaaacaaacacagaagggacagtttcataacccatagagctttttgtgatgctttagctcaagaaagtactactaccaatccaccaccactgccactagtcaaccaccacttccgccaccataaccaaggcggccccaccatcaaaagagaattccaagacatcatggccataccgtcgtggttgacccctcctcttcctctgccgccacaacaacccttaatgttctcttcttctaataataataataccgcttcactactactcaacatgcaactaccgccgccacagcctcaaccgttaccaccatcatcatcggctactgctttactacaaaaggctgctcagatggggtccaccataagcagcagtagtaatactgctcatcttcatgattacgatcataatcatgatgatgagcagtttattaattttgttgggaatgattatgatgacatgatgatgatgagttctttctctccgccgccacaacaacttccaccgccaccgtctggtagtagtggtggtggtaataataatgatgggttgactagagattttttggggttgagaaaattctcccatagagatattttcaacatagttggacttgatcatcatcatcttcataataataatcatcagaaaaataatcaaccttggcaaggttaattaattaattaattaatagtgtatattatgtttagtgtgatcgatgatactatggttaattaattccttaattatatattattcatttttagagatattattaattattattatgtgtatatactagctaattattaatcaaaggtgtataatatataaattttaataattttaaaatatacaagtttattttccttttttatataatatataaaatttacaagtctattttccttttatatataaaaaaaaatgaagggttaattacaaaatgttaataggagggaaaggttaaatattagatttttttcttaataatttatagtgttaaaattaaactccaaataatttttttaatactatttttgatatcataaattatttaaaaaagcaaaaaaattagttaaatacctacaactacaatatataatcatattaaaagaattatttcaaatcctgacctgtatgatcttaaaccacaaaaatcacactgtaaaaatataatgtggggtgaacaatttattaattaccaaataaataaataatataataaagctagcttcaccaacacaataaaatagaatattattaaagtttaaaaaatacttaataaaaaatggtaaatactattttaggaattgtctttaaattggttttattaaaaaaagtgtcgaaaattaagcttagagtcctatttttattatttttgaataatacaaggttcgttttatcatataacaaaatagatggtccaatcagtaacttttacaaaacacaggattcaaaatgatattttcactaacaaaaattaaactaatgtatatgcacaatctttaatttaggacataaaattaaaaaaaacataatgtttaaaatttcaaaccccaccgaatatgtcaatatatttacataatattttagggcatgaaaaaaataaacaaaaaaaatgttcaattttttttttgtgtaaggaaccgatacaagttaaaattacaaaagtaacaatgttatacaagagtggaggattttttttcatctataaaagttcattctctatcctaagggtatgcagagatacttcagaagaactatacaataaaaccttaatatcagaaaagaaaaacccctaaactgagaggtgtaacttccgacccaccaatggaacacccacaaaataaataaaaaaaaaatatcaaatctttaataaaatattaaaatttatataatgttgtcactcatatttctctaatgtaaagactagaactcatttgttcccgtctccattgctgaaggtggctacaatacatctgatgtgtttatattaaaccatattgaccttacaaaattaaaactaagcataatgacttttcaaaaccaaaattagtcatactcgccttaaaaaaaactaaaaactagtcatactgaccttacaaaactaaaaattaaccatctagctttacaaaaccaaaactaaccatactagtctcacaaaaattaaaactatgtacaaaataacactagccgcgttggccgtacaaaacaaaacaagctacaatgcattttaatcaaaattgttaattaaatccgaatttaatgtataaatatgttatttattgtataaatttataaatatttgtttaaatttaaattgtaattattaaatttgaaactgcagtcataagtggtttgatgaacacttctcgttaatactaagtaataactttatagcaatgcatttttatttttattttttaaaaaaaaaaatttaagatgtgtttaaaaaataataattacaccgcataataataatactatattttgaaatacaaagtatatttgaatataatatggtaattacttatgaattcataatatcatatttaacaaaataattaataattacacaagaatataataatatttttttagtacttaatatttaaaataaaaaatttaagtaattagaattgaaaaatataattaaaattttttaattacctctaattatatagttatattgtaattatatagtaaaaaaaaaatatacaaaattatataattacctttcattatatctaattttaattctcttttgactttccaaataaatttaataatgatggatttgtattttgtcaagtcaagttacctgcccaaccccaaaaccaaatacaaaaatgacacgtaaacacatttgtgtgcgcaaaacaaaaattaagaaaagatttttcacaacacaacatgtcaaattctcaaataacaataaaatatccattaaatattttctattaaaaaaagaccctttaaaaaattaacatattagaggaaattgtgacatttcatccaaacaatatctattaactatgagtatatatatatatgaaacactttttaatgagtaatattcattgataggcattaaaaaaattaataaggtaacaatctaataatcttttatggtaagtttttaataattatttttttaaaaaaaaatatatttattttttataaaattaga

SEQ ID NO: 36618 - DNA, 3421 bp, Cannabis sativa
ttgggatcacagaaccttatatgcgcgaagaatcaagtaatagaccgaagcattcaatcgggatacatccaagcgatcagatctgctcagcatttcatctatatcgaaaatcaatattttgttgggtcatcatatggatggccagattacaaaaatgcaggtgaagctgacacacatttgtttggttccatggattactatgcttattcattggattcttaacttaaagcttttgtaatttggcaggagctgataatctaatcccaatggaattggccttaaagattgctagcaaaattagagctaatgagagatttgctgtttattgtgttataccaatgtggcctgaaggtgatccaaagtctgctcctgtgcaagaaatcctctattggcaggtttatatcatccattgaactgattttttttacgcagttgatcggttttccttactcactttcaactgttgtgttctttatgcagagccagacaatgcaaatgatgtatgaagttattgcaaaggcgcttaaagcagcgaaatcggacttaaaacctgaagattacctcaatttctattgccttggtaacagggaagattttgaagaggttcagtcgagtacagatactgctgtggtaatttaaatggcccctttgctttaaattttcacacccaaattaagatttgcataattaagaagatgaattaacatgttggttaatgttaaacacttcattccaggtcagtgaatcacaaaatcgtaggcgatttatgatctatgttcatgctaaaggtatgatagtagatgatgagtatgtcattataggatctgctaatatcaaccaaagatctcttgctggtacaaaagacactgagctagccatgggttcatatcaaccttatcatacttgggcaagaaggaaaagacatcctcgcggtcaggttagttagtttcgacttttcatctctcttttttcgtggattttctgcataagttttatgctgcttaggcctttgtgagcttatcactttcaataatctaactgtacctttattgttatcagatatatggatataggatgtccctttgggctgaacatcttggcaagttggatcactgctttgaagagccagaaaatttagactgtgtgaagatggtgaacgacattgccataagaaactggaacaattttatgactgaagagttcacaccattacagggacaccttctgaagtatcctctacacgtaaatgaagacggaaaggttgttcccttgtctgattgtgattcattcccagatgttggtggtaaaataatcggagctcattctgcgactcttcccgatgtactcaccacgtaaacccgaccctacgaccctacctactcattgttcataaaatgactgctaatgggggtaattggtatgttgtaccctttactaggttgttgagtttctatcttgattcattcttttctatttttcggtcagccccgccccgccctgcctcgctagattggtttcaaattgtaaatttgtgtaattcatagttgaaaaatgttggtacttgggggaatgaatgtattttcaaacatgtttcatgtatttgtattcttgtgaattggagaggaatcacaacaattatttctgtattacatagcaatcttttacagttgcattacaaatcctgaatttcaaatcctgttgattgagctagtcccagtaagcttccttattttcttctctctcagctcgtctctcaatctagccgcctcctcccatcgccctctctcttcgtacaaactcgccatagttatgtactgtcgagcattgttagggtccaccaacaccaatcttttcgcgatttcttctgcaagttctgtattgttatgcattctacaagcaccgaggagagcgccataaacatctttccccggctgcactggcatgttcttgataaactcaatagcctggtctataaaccctgctcgaccgaaaagatcaaccatacaagcataatgcttatggcttttctccactctatattcctccattttttcaaagatttggcagcctttttcaaccataccagcatgactacacgcagacaacaaacacaaaaacataacaccatcagggtataaaccgaagcctaaaaaccgcgaaaagatctcaactgcctcatttgcatgcccattcattccataacactttatcatagcactccatacttctaagctcttatctctggtttgaacaaacacttctctggcaatgcttactcgaccgcagtttccatacattgagatgaggccactgcttaaagccgcatccatttccatgcctgacttgataatattagaatgaatccacaagccaactcgaatccccgatgcttggacacaagccgaaagagtgctaacaagagtggaacgattcacacaacatgttgtttgatcttgtatcaaggtacaaaaaaccgcaagggcttcatccacgaatccgtttgcaacataccccgaaatcatcgaattccaacttacaatgtctttatgagcaataccatcaaacacttttcttgatacattagcttcctgacacttagaataaaaagttacaagagcattcccaacaaacaaatccgagtaaagaccagacaaaacaacatgtccatgcacaactccaccattcttccaatctttcatagcaccacaagccttcaacacataaatgtaggtgtaattatttggtaataaaccactttgcctcattctacaatacataccaatagcttctacaaaaggaccccatttagcataaccttgaataacaatattccacaagaaaacatctctcttaagcaaactatcaaacaccttccgtgcatattccatgcttgagtttttacaagagtgctcaatatacttcccaaccaatttagaagcagtaaatgggttttggttatgaccacaaatagttatgtgggcatgcattattttgatggatttaatgtttttacaatgttccaaggagtaagtaaaataatgggagtccctaagggtatggagtaagtaaaattgtaacaatccaaaggttacccttcttcttgatacctgaaaaagtacacctaattgagtttgcattatcagtaaaaagaaagataaaggccgttgatatgtcactaatgtgataattggttaagtagccatgtcattattttattttccacgtgtggtaaaactcaatagaaaaataaatttacaaccgtgtaaatagttcaaagactatttttaaccggctaaaaagttcacgatagttcgagcggcaaaaatcctaaataagtacttaaccagattaggggtgttcactaagtatccgatccaatccaatccgcacgatccaatctaatccaatctgcaaaatgcgg

SEQ ID NO: 36619 - DNA, 4414 bp, Cannabis sativa
agatgggttcagctgaggccgatttcgatgatctttttgtggagaagaaacgggttaggaacccttttgttccccttggtaaagtctcaaatcacccattattaccttctcccattttcatattctattgttttaaaatattaaagtttagcattttcttataacacggagtcaagtttcaattggattttagggctaaatgtttggatttataattagcattttttgttttgaataagcaataggatagaatagatatgggattctgaaaatttattgtcaatatatgaattaactgcttggagaattattcaaagcaatgtacttttttctttggttggtatattttgtgtttggaatatgaatttaggagttggttattgagtagcaaggttcatgttattgagtagggcttgaaaatatataccatgctcatcagagccatcaaaattatgtgtgtttagttggatatgggttttattggatctaacatggaaagttttataatgcctctgatctgatgagaatggtctatttcaactttgatgaccatgctcaaattgtactttttgtcacttaaaattttactaatagatatatgacatgctcatttatgcattgaattgcatactttgaatcttcttgaggtgattgtataacttttattgtggtatatatagtgatatgctaaagttgttccggttggagtttcttttgatccattgatggagttgactcacattccccaacattttgcactaaggcttgatatagttttttttaataaaaattctggtcgaacatgcttttggtatgctttttcataaaattgagaagaattttttttcttaggggtgagatttgaatgcatgttggatttccatgttgaatacaatctgtgtgctaaactctctagcatgagagaaagaggttgaacatgaagtgtaaataagtatattctccaattgtattcatgttttttttttttttttttgactatatttgcaaaagtaatacatgtgtaacatcagggtaatctgatatactgaatgattttgtcatattgaattgtcatttgtttctgtagtataaacttgttttattgtagtcttctaatgggctaagataaacattttcaggggcatttttgactgcgggggtgctcacagctgggttaataagcttcaagcgaggcaattcccagttgggtcagaagcttatgagagctcgtgtggttgtccaaggtggtacggtggcgcttatggttggcactgcttactactatggagataatccttggcaatcaaagtaaactaccaaaattcttttcgcacatgtctttattactttgaatatactgcagttttctaattgtgaaggtattcaatttgtttgtacctactgtttttgcttggaaaaaaatatacatatatatttataggcataggctattctcctaatagaataatgttagtcattgcagatagtataatggcttgtgcttgtggtaatgccacattatataataatgaagtgcaaattttcttataacaatttttcttttccttttttactataaactcaatttgacaatctaaaacagggacaattctatgagtactcatcaataggactagagacccttatattagatatgagtgttcttttgttttgattagaatattatcacagtaaactcttattactgtgataaccgagctccaaagttagaagtagtgatgtggatgagactggtaccaaagaaaacacttctctaaacttcacataatgacgtggagaccaaatcccaatccagttcaaggagacaagctttttagttaggcatggaaaaatgatttgaatttttggatcggatcggagcactctgagccagaacaaatggatctcttatcggatacccgatacgccccactagcaatttgtatgtattggatccaacctgccctggtttcaatatatattaaaaaaaaatcaaaatactccctaaacggctaatccgctaacctcccctaatcgttgaagacttgaatccctatatctcgcatctctacctcactccggtgtcactttctcctttggtggcaattgcctcattcgtcgtaataccaattcgaagaatcgagtgggtggctccgcttgaatcaaactcggtattcctcgtctatgataaggtaattcttagctttaatgactgttatcccaacaaaattcatattttatgtatgaattcaaagtataacctatgaaatcagtaacacccatttgcctgtttttgatgtttttgtctaatttttttaaatgattttttttttttttggtttttatgatttgggtgtcactgatttgtgtaaatcttattttttttcttatttcgatttggttcaaagtttaatgaaatctctctctctccatatatataataatactgtgctggaagggtgtagtctttagttgataagcacaagcccttcagcttcattcaacttttcttgctgctttactctgagagatcataaaccttgttattatttttaacatttttctttgtcaattatcttgtggtctattaatgctaagatgtcatatgtgctagtttttgtcatttctctatgtttctttgagaactctcaactttcttgtcaagttcaattagttgtgatgcaaatttgagacttgaattggaataacattagaattcaggtgggtcaaatatctttttataaattttgtttgttgctgtgaaagactggtagatgagacattgagaccaagatttccatattgtcaatccttatcaaaatagtagtatccactttacttttgctttaagctcagtttggaagttggattttggttggaaaaaaagggagtagagaaattataggaaaaaaccaagtgaaaaataaaaaataaaaaattctaatttttagtatggaaagaaaaattgtatagaaatacactcaaattaacaaaaattttcatttcaaacttgaaaaattgactttttttttcgtccacacttttgtgttattacattttccctattttttttcttcactaaaatcaaacttccaaacatatccttcataaaattatagcttcattcaagaatgttgtgtgtttataatgctgtgccttttaatttttaatttgttctcatacgagaaatttgagcagttttaatccaataaaaaactaccgaattcttaaattcgtttggtttgcaaattgcagataacttagtactagaagccaacttcagcagagaacttgttctctgaccttgcagctgcagttagagcaaaactataattaacaaagcttgtttttgtttattgaggtttttttttcttctataattaacattttacttaacttgtttgaatattttatacatttatcaataatagcgaaaggttgaaaaactgtgtcacttagtgaagtaagatctgtgaaatctgtgttgcggtgatataaagatgaaaatttgtgctatttgattgttgaaatagctagatgattaataaaataggagaaatgctgcttggttttttatagatatatttatactttttacttaattaattttgatatagttgggaatatggatgatagtgttaatgtaggttagatgtctgattctaattttgaagatgttgaatttgttccatcaattaatacagaagaagtagagagtcatattgtcatagtgatagaatagttgaaaatgagggtagaggaacactttatattacagagtatttatgttaaaatgaaagcagtgtgtaatcactgctgggtgaaattggtgggagaaagtagtaaggtgactaagcatttacttcgtcacatggatagatgttccataagaaaggaacaacttgtcaaaaaccctaatgcaagtccttcagttacctgcaactttgatcctaaactagggagaaccaaattggctcaaaggataattttgcatgaatatgtcttagtggtggttgagtatagtggctttattatattcaaatactttttgtcccacgttcaaaatagtgtcaagaaatgcatttacaccaatatatagattgagaaagaaaaatgcagacatattttggaggaaaagtaagagtagaatagttataaccactaatatgtggactgttaaccatcaaaagaagggatatatagctgtgactgttcatttcacctatgactcattggaagttgcatagtcttgagttttaagtatgtttcatgctctcataatgcacaacacttgttgggactctaatttcttgtcttaatgaaaggaaaattgaagacaaaattagaacagtgtctctataattgtattactaacaatggaatgattgatcttttgaaggaaaaatttgagagt

SEQ ID NO: 36620 - DNA, 4373 bp, Cannabis sativa
tatataggatggatgttaaataacatacttttagtaaatctagatcctggtaaaataatccccaacaaaaggctcttatcaatctccatctctcgattcctccactctttgagccggcgtctttgctcatcaaaagcatgatttatcgctgctcggatatcttactagtcatgatgaagagtgttattgtggccttgcattagccctaattttcttgcaaattctatattttggtgtcttcttcgactggcctttgagaatttgtagtggacgggaccctagttccaggagtagtctgttcagttgtagaaaaggtatttccagtttcttgcatgcctagagtaaaccaagccagatcggtagttacgcttgacctacagtcggtgtctcttgggcgggggctgtcctgggcggagctcttgggtttgtaggtgtctacacactcggatccgtcaccattggatcagttgtatcaatttgattcctccttcgagtttgcacaaccatcttgtgtcctgagaaagacttaagatagaaacttgtgtgtctttgctctcaatgaaagcaccaaaatgttgactttgcttttagtcaacgatagtgattcttaattaaagcgatgaaaaaaatactagatttatagaggttcgacccgttatagttggtaatagcctactcccctttttgttgtattgacttgtgagcaagaatgaattattttttctctaaagctcttacaatgatctctgagcaatttactcttagatcaaatttctctcctgagtgttctctctcagaataattttgtgtccctaaatagtgagacgagaccactatttatagggattaattacataaaattggtttcccttaatcaataataaaaaaaataagaaactagtttatttccatagttacaatgaagaaaataggaaattcaagttgattgcttttattctttgaagatacgaattcatcccacaaatgtagaaattgtactgtgattcacaagcttggaaatacacgaactatatctcagaaattgctaacttgaacctcttggtcggtgcatgcgagctatctacctaatagagctggtcggatgtctactcatgatcttgttcggacatcctactatctatgtgtgactctgagcattataataatctgtacggcctactaagagtagaatcatccgcctaagttatgaaatacgttacacgtatcatctagacaactgtcacgtcatagtgcaaaaataagaataacaaatttaataactatgttaattttagggattaagttatacattgtgtattggagtaaaattgtaaattttagccaaatataacattaaattataaaaataaataaataacattaaaatatatgatgtaaccaaacattgatataatctaagtttgctgttttgtcgccaaattatataaatatttattgacatatggataattttagtatatgtgtagtatctatatatcttaatctaaattagattttctttggaagttttattgtactaaaatattcaaaatctttccttttaaaaaaaaaattataattaaaatctttatctattattgctttcaaaaacaaaacatttatttattttttattattattattttattttttttttgaaaattttttttattatttttttaaagttcgtttggtacgctgtattataccgtattgtattgtgtagtattttattgaattatattttatgtaatatttttatgtaaaactatatgtgttattgacttgtatggacacataaatctataatatttcagtataaattagtttaaaataatattatataaaaatatgttatataatccaattgaatataatataatacaatacaatacgacttaatacaacattacgaaacgagcttttaacgtaatgttactcataaaaaaaatgtgggcgccccaagattaaaaaaaaatggaaaagagaaagtacagcaactacaacgaacaaaaggcagttaagcgggtagtagtgttactttgccgtggaggcgaagcgagagagagagaaatagggataaataaaaattatttctttattttaaaacccaaccaaaagaagggtaaatgctttttgttccacacagagagctttttagttttttagagagagaaagcttttatttatctttccccttttcaatggcgcccactgaaaacctcttctcgtatctgactctgactaaggatttttaaattcttgagaagaagcacaatttctaagaggtagaaatccgaagacgatttcaggaatatacatataattaacacagagagggtgggtaggggtgaagagagagtattcaagttgtcacggttggatttgacgatgaactggcgaagagtattgaagtctgtgcaggctctagctgcccacatgctcctcttctccttcacggttatgctcgttctcaagctcgatcatgttgtctcctactcttggtggtctgttctctctctctctctctctctatatatatatatgtatttatatatatctatttataaatattcatattcgtgtattctctaatttcagattcaattgtgtttatttattgatattcactggatgtggttttggccgtcaatttttaattttttggaagcttttgttagagttaaaaatgggattttttttgaaaattaatgtgtttcatctgatttatgagaaacatagttatctcttctagttttcgttcggcataaacacgtagaaataattgaaaaggaagaaaattagaagagttatttccatctttttggagttaagtaatgacttaatataattgagattaagaggattgataacaatatttctattagatgtttcatttttgcaaatgaattattgtaattttctaagggaaatcggtcccatggcttagaattcatattttgctgaaactaaacatgattactttttaaaatgcaaatgttttcccattaatggctgattacggtgtctgtatgtggttcgcaatgagtgttgacaaccatcttgcaagtgcagattccagtgtggcttattagataataaatacaacaacaagaaggaaatttcgttgttttgatacatagaaagaaagaatagatttcggttcggttaacttatgattaattcaatgaactgctacctaagaggcgttaggcatatggtttgctagtatcgtctacatagctattgcaatagtttcctagactctgaattttttagggttaggtggggagtctagtttccaaggaaaaaaaaagaggagacttacagcttcgttgctacactgaccggtttcttaccatgtttgacagagaaagaagattaagtgagtagtccagctggttgactagttccttttacaccacagacaaagcagaattacgcaatgagggcatctcttgtaatcgatttttcgcctcacttgcggatcgctgaactgcttacataaaaagaagatttgttctcatatgtttggcaactgatttttttctttgctttatcaatttagtttctcctcaactcctcttctgtctacattaacccatgcttcttccaaccgactcacttagctccctaccaatattgatcttgaaaagttgtagtgagtgagtttaaatactaaggtggacagctgccccagtaaaatataactttgtattgattctcgtcaattagactttgaacggggtattttgtcctgagaaaaccgtttatttagttagttgaaaattgtactaaataattaataaatattttgaactaaatcgatgtggctcctgtttagtactgtctcttgcttaaaatatattccagctgagtttactaatccttaaagttggtgatcaaaatcaagaagtgttattgtgttagtcacatttgatctatggtttctgaaacaatctaagaattttcacttctgctagaattcaaagccgtagtcttttgtcgcagttcaatttgttatctcttaatatatgagctgctttgacaaataacaataatttttatgaatgaaaaggaggcatcgtattttttaagtttattttaaggttgaaaggacacatgaaggtagtaaaagaaataccattgagactctttagtcccaattaggcagcaatcgtgccaatgataaaaaataaaatagaaattaaggtagtaaaagaatcttttcaagcctaatgtattatatgccctaaaattgtgtaatttgtttctcatacacattgtgtatgtgtattcaacttattttcatagttctttccatcaatgtatcaattttatgtgattaattatattctctctctctctctctc

SEQ ID NO: 36621 - DNA, 6193 bp, Cannabis sativa
  modified_base (745)..(750): a, c, t, g, unknown or other
aaattttggcggctaaactacctaaaccctggttccgttttgctctgcacacctccgtccaaaaatcacagttaagtgccacggtagactgtccacgttaacacacttgtacacgtggcaaagttttagtggtccacgtaatattaatattaaaaaaataattataaatattaaaaaaaattcaaaaatcagaaaaaaaaattattatttttttctttttttctttttttaatttaaaaaatagatagaatgcttataacgcttattaaaaataaatagaatgctaaattaaaagttcaggtagtttagccgccaatatcccattataataagcattctatctatttgtgaaataatttacgatatcgaaaataaaatttaaagatttgtacgagtaattttattattattggcttttttattaaaaatttgcatgcgttcagttgaatgtttgaaattttgtttctgacactacaaattattctaaatttttaaatgtagaatatttagtataattacaatgtacacaaacatataaaaaaaattaattataaattttgtaaacattaaaactagagacatttcctataattagtaaggacaatagtgatttgctagttgtgactaaaatataattttcaaatacaagttgtcactaatttacttttagtcacaacagtattgtgactaaaagtacatttagttataacaaattgtaacctttgtgactaatacctttagccannnnnnttttagtcacaatataaaaatgatgattcataattagccataacttttttacttttagtcacgagttttgttgtgactaaaactaagatttttttgtagtgtaagtttacgttattctacctttatctatccatggattatcatttgcgaaacaccagccatgaaataaactagcataaagatttcccatattcttatctcacctttgtttccaagagactaaccaacctagctctttttaaatgaatcaattgcttgattttttgatgtttttgctggctgttcacattccaacataagattctattcattggaagtagagggatccaccctctcccatattaaacattggaccatctgctaaaaagtctcccacttcttgatcattttccaaagccttaaatttgttaacctgttttgtttttgcaggagcttcttcaaccattacttttttttttcctttagaaactatctgaaagccatctaattatctacaacaggtgcctctgtggtcttttcaggaatccatacatactttgtttctttcattagctcttttttcctgcataatttcgtatatatcgtgtcctattcctaaaaaattatagcatactaatagaatccattcgtatttaacttccaaatttatatcatgatcaaattcatccgtaaaggatactatatcagggaagttttgagctagactggcctcgatgaggattcgtgactgtatccacttggaggggttcacctagttgagatacaatcttaaacagagaagattcccccaatacttgatgtctaggcctttcaacttaatccaaattggaacagtagtaatctcatctttcgtgaagtcgtcaatcaaattctatggcttcatgaccactggtttttaatcgaaaaacacatatccttctttcaacaccttatctctctgttctatatattaaaaacgaattatgaagactccacgattgaccattcacactttcaccattgaatcgttccatagtcccctagcaaaaccatctattatattgatagggggattagccccaatcacatggcacacaatagatagtttctagtaatttgcctctttcgcaatatcctcaaagctaattttcactttaggtctctgttttgaattcattttctcagctgccattgaaatttttgaaggggaatcctccactttggcaccatcaaagcttctctccaagctacggacaacattagaaccatattgggagagtagcttgcttcccaacagtgacatcttgagtaacctgatttgttgcactaagctagtctgagaaatcctgacgaattcacttcgttgattgaagatctcctctgtttcctcgagcgagtagacttttccacactagatgagatcctttgttaccattgtcgatctggtatctccggttccttcacccctaacattgcatccatagatctggttttaataatcctatccaaaaatgtaggggcatttttctttgctttagctttcttgacaccaattcttgagcagaattcttcctcaggtgacctcaatttgtcattgcaaacagcacgaagctgaaagtcagtgccctagcaaagcaaaaccagagaaagctttttatttctaacaaaaaaaaaatatgagatgacatgatcttcttattagtcgaaccatttaaataatatgcatatgcatgcctctattttctattgcattttatttatgagagctagttatacaaatttagtgacaaaatatgtataatatatacatgacttgagaaccttttttatgtgcaagactacacaatttgaaatgatctttaggttcctttctaaaaccctatattagcccaaaatgtatattatatatttggaaaatgaaaatctcgcacaatgaattggttaactatttttccattgagtaaaatattccactttactttattttcatatatttaattattagtctcattctctaagaaaatctatagggtcctctcgaaaactcaagacacattctcttctctcatgtccctctacaattgtttgtcatgcacacaaaaatgatcatacatatatatatataaaaaaaatcatcactaccaacaaaatattatcttgttgtcgcaattgcatggaaccgtgcatgtgctatatatagttacaccaaattacttaaaaataaattcagtcgttatatcaacaataattacacccactttccataatcttgtcgatcacacacacaaacacacatacattatttttctttgatgactatatataattatatcgtgagatgggatttcttaccatcttttgctaattatgtatacataattaattagtttgaataatgtatatatcatgtatataagatacatataatggagtggttgttatatagggtataggcctaactatatagctagctagggtttaattagacaggacatcatatccaacaacggtcatatctcaattaatagagctcatggtttttatgatgtattggtcccaaattccccggcaatgtagggaacaactcaaacaataaccgacaatacttacccttcatatatccccttatgtgtattgtgtgacatttttacacttattttccacatctcatcatattatttactcacttagtctaaagttgaatcccttcaactttgattaaacacaagacacttttttcaataccaaaaacaaaatccaatattcccccacactatgtatatataattttgtcctattagaaggatatattttgtttggtcttcataccattggattaattattgtacatcatcattcaaaactctgaataaattttaatcgaagtatacgtaagtaaataaattaggatctatatgaaaaattatgttggattagtttagctgccctgttttctttgttcgctctcagttttgtattgttggttattggtattaataaattcgatcgtcttgcttttgtctctaactagtacgttgtatacatttaaatgtgtttgcataaactataaaaagtcaaaaggatcgatattaataaaaaaaggaagttaaattagatatagacagtttcttccctttgtcaaaagatgtttatatgttagataaactcacacgacacgacgttgcatattgtttaatagtgttttatagactaatcaaaatacgatagtttattagcaaatatatattatacaatatattactataaaaaatcttagtcttaggttataataaaatttatgattagaaataaaaaaattatgattaattataaatcatcgttcttagttatatggtgactgaaagttcgtaactaaaagtattaattagtcacaaaactcataatttattgtgactaaaacttatcactaaaactattttttttttttttttttgtaataattgagtttagatattgcaaatctttgtaacacgatcatgatttaagtagtacattattcataagcattgctatttatgggcatgtataatttgatattttattataattagttataatttttattaatttaaaataagtgagaggcaataacaaacttcactaatataattaatataggcactatagcattactcattatattaattgaccaaataaaccaactgatctagtcaaaaaccatgcatatagtaaaaacagatcttgtggatatatctttggagtaaagaaagaaaacaaaagaaaagtagtaaaaacacataattatatctttggtgaaaatctatgactttgactaattttccaatttgataagacacgttaattttgcgttaaagtcaacatacccctctctatttgtgttgaaccatatacacctaatggtatattatttgttagtatctcaatccaagataagaaatcttaaatagatagaatctcttatagtagattgtccacatggcatgcattatatatcatattcacccttattaaatggctttattaacttagaatcatattcatattggacggtccttgagtcaaaagttcatatgagtagtaatttgtgtgcttttttataaaataatacacctttttgaccctactccatcgaggtatatgattatacatatatacaacatattaatttttatgataatatatatatatatatgttgattataattgtacatattacatacatttattcttgtcattgactatatatatatgcattaaacattgtactaggaaaatcccatacatattaaaatatatttaagttaaaataagcatgaatgcgccgactattggtattttaattaattagttagtatcacttttagaaacggtcgatatattagaagaaaagcatataaaaactacccattttttctatgatgttgcttcaacaatgtccaaaaacctaattcactatcatgtcatatatataatgattatatagatttcatatatgctaatatatataattaattatatcattacattatagattttgttctctgaaatgaataacgtacggtctgagaataatattatatatttttttgttgatataatactatagaaaagtttatgcatatagtcaaagggacatgatgaatatatatatatgggatcacttaaggaataatttttattattatattattaataataataataataaaatctctatcggatatatacctatttattttattaaaagttggcgagaaaataaagatctagttagagaatattattaaaaatagtaactattgtatgtacggtacatgaatctatgtaattggaaatttaatgagccatatgtagtcctatctaccaaaggaaacaaagtatttttttttttttaaagaatcaaaagtatatcattactccaaaatataatttgtacaaactaataattcctctaacaataaagaggacctacatacttatacaaacttaaatatattatttgtgttgagacatttcgagtcatctgttaccattgtcgaactgcaaaaaattttaaccacttaattaaatggtgccgttttcactaaaataaaaaaacaactttatgatttggacttgatccgtacactacttattttttttaataatatgtttattattaaaaaaaaaaatataattgatatataaacattttgctgtttaattatgtattattaagtgggttgttatatatagagcaatgatatctatatactaatcttattattatgaaagtaaggtgttagggtgatatttttttttaaaaaaaatttatcctttttttgttgttgttgttgttagttgttggtattatcggttttggtgcttcttttatgtggaaaattggtcattatttttctgaatcttgcaagacttatctattcagactcttattgcatttgaagacttgctagttgtaaca

SEQ ID NO: 36622 - DNA, 7777 bp, Cannabis sativa
gagagagagagagagagaggcaaaaagacaagactatataaatttatgccaatcaatttaaccatattaaattattaatgactcaaaacattagacaataacctcacttgaaaatcatcaaaataccatccattgaaggagtacaaagacaaaaaccaccctacttttcaagcaccaaacatttttttgttccatatgagttctctatgacttttaatatttgtaacatatttcactgcaacctatccaagaataagaagcagatcagcagatacaatgtgtgtatggaaccttggggactcgcataaatatgacaaaacaagccaattagagaccctgctcaacgagatagtctccaagcctctcaacaatcatgttgcattgccctggcgtcattggctcatcatacacaccaatgatcaaagcctggctagtctttttaacagtaacaccaccagcaccctgaaaaaaaaaaacaacaacaacagaagaaaggtgatacagtgagaaagccaatcacactacacaaaatcataaacactcccccccaccatttttccaataaaatacaaaaagaagaatctccaccaataccatgaaagctgaataacaaaaaaagaatgtattcatatttccatactcagaactacaaaagaaacaatgacatgtattcatgtttattctttcagttgaagaaaaagttagatggagattttgaagaattattcattgctctttatgtgacagctgactattgaaaagcctaaataaacatgtcttaagatatagagtcagcttcgaattacaagatattgtcattcagctttgaagttaagcttatctgaatgtgcaacaaattcactgttgcagtgccaacattttaagagtgtgcaaaccatttaaaaggaaacaaaaatttgaacaaatacataaaatgatcatatccaagtttctcaccttctttcctctgataacagcacctggctccccttggatcaccatatattttgtgccaccaagatacaagccagtaggtgcaagtgttccaggttcttcaaagtcattcatgatgccagttatttcttcgggcttgaactaatcaacattaacatcaagactataagcaataaataataataaaaaatacagcaaataagagacagttgaatcaagaataccaatgagagtgtgtgttcatatttctgaaccaaaacataggctttagaaaataaaacatagaaattgactaacaatgtaaacatttaatgaggaacaattatggttattggatgtgaggcttagttggggatagctttcactcataaaatagaaaagatgtcattatattgtttggaaagtacagtttataaagacttaacagtatataaagggcatctttattaacgttaaagatctaagggtagtcacgtgagctagcctcaaatggttagaaggtcaagagcagtgcgacgatttagttctcataaatgtctggtatcaaaataagtaagaatgttttaatgttaaagatttagggtggttacatgtccgctagcctcaagtagttggatgagtgagtgcgtggacggtggttgggcaggtagtagcagttatattctcataaatgtatcatataaaaataagtaataatgttttaatgtaaaaaatttaacggttgttgtctagagcggttggatgggtgcgcgtgtggatggtggttcggtcaagcacgtgggagcggtaaccataaatgtatcttatcataataagtaatgatgttatgatctaagagcacctattgaattaagaaatttgaatcgcaagcacaataaaaatctcttgtagttattcaatttaataaaactcttccagaagaagcagtgctttaattgaaactcttcaaatcatgttatagttaaaggcttgaagcttttctgatgaagccaccccatggggacagcttccttcaaaaaggtgtcgcaaagcacaaaaaaactttaatttcatttaaacaagactagccccttataaaagccacctcaaacagacctaactctttgtaaaagccatgtcaaacaggccctaaaacatcataattaagacccgaggcaatataacatattctagtgttccaataaccaggcagcatttgcaagtttatgataatagattcctttataatactatgcctttaatcccagctcaaaaaagcactcccaatttaactgaaaagctttctaagctaaacattcactgggtggttgtactaaactatcaatacatataccattacctaaacctatcgaaacatcgttcagaaaatacatacttgaaaattaaaataatttgactgaacacagaaatgatgtaaaaatacttatagcaaaaaccctaaatcccaaatcagatcacaactacaccatgaatcctgatcaacaaaagaatcctaaaactacccgacaacaaatattgacagaaacaaataaacaataacgaataaatatttaaagaagcaaataaaaaacatgcagtgaaacaaacaaaggtgaacaatcagatctctcttcaaaaaataacaaaagaacaaaaaccaatcagatctcaaaattgtgtcaagtaaacgaaggcaaagcagtgaaataataaaaagaaaatagacctgagggaaattagcgctctgagcccaaacgctaccatcatgaccgatgatagccgcagcagtgagatgattgccatcgatttcgcacatcagatggtcatctacgtaagcttgccacgacatcttcttcttcttcttctagtagtagctactacaaagattttcctgtgaatttctgctgtttggatggtgagaaaatagctgtgttctactcttatttctagcacaagcggtagcgttgaatccacggagaaataaataatgaaaatattccacttccagctaattctttttttcctttaaggaaagattgattttacaataatacccccactctaaaacttctgttcttcacaatgttctgtctcctcccgtaaatttcgcaatgccatacgtcagttacttgcactttttttttgtctttattttttattgtaattttgtcctgattttttttttcttggttcggattttgtttatatgttttttttttttttttaaaaaaaaagagaataattgtttatatgtttttatttcttttttttttttgaaaaggatatatgtttttatatcacaaacaattattttcatattttatttgagttacttatgacaaaattttattttaaaaattaaaataatatttttttgaatatttcaaaatacataaataatttttaataaaataaaataaatggcattaattttgttattaaaattaattttaattaaattgtcttttgaaataaaattgatcaaattgtattttgttctttttggtaaaaatttatatgtatagtccgtatcgaaactctaatatgatcaattatttgaatatagtatttaaaatttgaaattttaccgcgtagtatcttattttagtttaattatcaatgatcaaagtttatgttaagtaaattaggtaagttaaaatgttctttcctaaaagatgctaacaaagttgctcataaatttacttgaacattttaattcatgttgatggtattattagagagagttatgttccttctgcgttgataagtaattaatattatccatttgtatttaaatttatgatcgaatctattaattaaatcaactacctaatttattaagataatcgattttataattacgtttactatacgacctaaaactacatatatttataagggaattatttcaaaaatacctaaaaactgtagaaagcatttttacaaatattgttttttttaatgttgtttttaagtttgttcaaaaataagattgttgttttacatgttgtgaaaatatattataaaattgcagcaacataaaaaaggtaaaagtttagatacattctataaatttttttacttccatacacttctatcatatatatgaatgtcacgaaaatattaattctaaaattacgaccatttaatttacatacaatttatatgtttgatataattttgtatctcttttttccatattcttataacttatgtaaggttttttttctgaaaaatatcacacacctaataaaatatttttacattaaaattgtacttctttaaaaaaaaatcacttctaaagagtttaagctataacttttaaaactcgtttggtgggttaatagaatgagagtcgactatgttaatccaatttcttctttaaaaaattatgagaggctgaataattttgttaagagtttgaattttgttctcttttggtttatatacttttttattcattaaaacaatacttatcatgttataataatattatatgttaagcaataatataagttatttttcaacattttaaaaatttaaaatatatatacatttttgttacacaagttcacttcggttcaacatcaattcaccatgcaagaataaacctaagatgtattaatcaaaccagaacacttaacacatacacacagtagagaaaagagcaatgctctgttattttattatgtacaaatggtgtcgattacagcagtagtctatagttgaattacatacccttatatatagcaagagagatacaaagacaagagtattaactaactataacggtcagtgaagaactgaccgtgactaatctattagaacatgacacctaggctaactaactacctatattaactgtcaagacattagataggcaaaccagaaaataacaattctccaccttgactactaatgtcgatggtaacagatagttactataaaggtgagatagaaagcatgttcaagcaatgcttgaacttatcacagggaaaagctttagtaagcatgtctgctggattgtctgcagatggaactttgagaagcttcaccttcccttcattgattgtatctctaataaaatggagtcttacatcaatgtgtttggtcctttcatggaagacctaatttctacttaaaagtagggcactttggctatcacagaatataggagttgatctttgatcactgccaagttccttagtgatgcccttaagccagagagcctcctttactgcctcagtacaggcaatatattcagcgtttgttgttgataaggcaacaacagattgaagatttgccttccaacttatggtgcagcccctcaattgaaagatatatcctgtttgggatcttttagagtcaatgtctccaacatagtctgagtcgacaaaccctatgacatcacagttatttccgttgttgtcttgtccataaaccagaccaacatctatagttcctttaaggtatcttacaatccatttcacagctttccagtgctcgatccctggttctttcataaacctgcttactatgctaacaccatagcataagtcaggtcttgtacagaccataaggtacatgagactccctacaaggctggtgtaaggtacaaactccatgtagcttatgtcttcatcagaggagggattttaagagcaagataatttgaattgttgacgtattggagtggaaacagatttcacatgagcaaagccaaaatgatttaggatcttgttgatgtacccattctgagatagtttaagttgcctttgatttctatccctgaaaatctctattccaagtatcttctttgcttatcccaagtctttcatgtcaaattccttactcaaagcttgtttaactttgttaatctctcccatttgtttgcttgcaataagcatatcatcaacatatagaagcaagtacaccagatgccttgagttcttcacatacacacaactgtcatatgaacttcttttgacaccaattttggtgacaaactcatcaaatcttctataccattgccttggtgactgcttgagcccatagagagatcttttcagtaaacaaacatgatcttccttccctttttcttcatacccttcaggttgcttcatgtagatctcttcatctagatctccatggaggttcaaggtcttcacttgctacaaggctcaacagaattctgatggatgtgtgcttgactacaggtgagaaaatctcatggtagtttattccttctctttgtgtgtatccctgagccacaagcctagccttatatctagcttcctcaacccctggtatgccttctttgtgtctgtatacccacctgcaaccaataatttttttgtccaattggcttaggtacaataatccaggttttgtttcttttaagagcaatcatttcacttcccattgctccaccccatttgagtttatcagatgatttcatggcttccttataggtccttggttcatcctcaagcatctcagccacatggagagcataattaactacatctgcatatccaaatctagcaggtgctctcacagctctcctcttctgtctctgactaattgatagttaagaccatcatcatctaattcactctcatcttctacttcagttccgtgttctgttgggacatcttcactgtctttcctcaaattcaaatctgcaagggtgtttcttttgtcaaactccacctccatttgtgtactctcattagtttcagtgtgttcatcatctcttttagttttaagtgtatccttgtaaacgttttcttcatcaaataccacgtctctaccaatgaaattctttagatggtcaccaggttcaatgctccacattttgtatcctttaacaccttcaggataaccaatgaagatacactttccagccctaggctcaagcttgtcttgtctaacatgagcataggctatgcacccaaaaattctaagatgatcatacctaacattattccttgttctagcttctattggtgtcttgaaaccaatagctgaagatggactcctgttgatgagataacaggctgtggtgacagcttcaacccaaaatttcttgggtaaaccagaatgaatcaacatgcatctcaccctttccataatggtcctattcatcctctctcctaggccattttgctggggtgtttttggtactgtcttgtgcctagaaatgccaacttgtttgcaatgttgattgaatatatccacacagaattcaagtccattgtcagttataagcttcttgattctcttaccagtttgattctcaatcaaagttttccattccaaaaacactttaaatgagtcattcttattttttaaaatatgaacccaaacatatctggtaaaatcatcaatgaaggattgaaaaaacctggctccacctatggattcagtccttgaaggtccccataggtctgaatgaatgtagtccaaaatagccttcgacacatgaagaccctttccaaacttaactcttgtagatttacctagaacacactgctcacagaattcaatctcttggatttgatccttcccaaagactcctttcttcttgagcacttgcattcctccattactgatgcgagcaagtctcctatgccagattaatgttggatctttaaatgatttaattgttgcattcacttctgaattatctgtgtgaccttgcagcaaataaattccattctctttgattcccttcatgactatcatagagcccttaacaattttcataaccccactttctatcttgatagaacatccttcttgatcaagcatagctactgagataagatttctcttgatctca

SEQ ID NO: 36623 - DNA, 3232 bp, Cannabis sativa
aaactattcaaatttttttcaaaaatttacagggatgatactgtaactataacgaatatcgctatgaaaaaaaatttgaaaaaaatattctgacatgtgatttcgaacgtggagataaactaaaaaattgtaatagaatattgtaattagcactcctctatgttttatactgttgcaaaatcttgcttaaaatactaggactatcatggaaaaaccagcaagaagcaaccctttaaaacacttgtcttttcttcaaatcaagactctacaaagcttccaactttcttgggaggagtacataaatgtttgcttcatatttggttaaagttattgtacttatactaattgaatgctattatacagcttgcaatactgaatactactgatcttgttgaccatattcatcaaagccaatttagtgccttctatctttgagtaacatattaatcatgatcctaatattaagcattcatatcccaaatttaagggtgtctttcatgcttccaaatgaaatgaaaatatataataatagaaaaaaaaatctaaaaagttatgaaggctaggtcagattatagatattacatattcttttataatatagtttgacaccgaaagagctacatcttatcatataactataagaaatttctatgctaagtagggcttgagaattacttttttgtcctcttgtgttttttttttatgtgagtttgtatgttttagttatttatgatctcacactaaatttggtgaaattcataaataatttatcttctaaaaataaatttttacactcgagtatatgacatgtttagtagtttccacacttgaaataaattgtgaaataatgtataaactattacttaatatttttattctttattataacctatccatgtacacaaaaacaagttaatgaaaatttgttttataggcaagtgaaataagttgtttttatgtgtatttttaaattttaaataactaaaatataggcagacataaacaaattgaattaaaatttctttacaagcaaagaatagaaacactcatacataaataccaacaaattttcctaaagtccctacattgcattgcagggtagaaggagacaaaagagataacaagccatgtcttcctttgctcctctcccacatgcctttttgtcttttcaaatgcattttgtgctctattatatataacttctcttgttatgataaaagacaagataaacccctcaacttatattataatagggaacttaattttgtcttagcttaaaaacactacaaaaaagtggacttttagtcccaaccttttaccacaacaaaaataatttgtaactaaatgtgtatttttgtcacaactcatgacaaatactattttagtcacactaaattatttgtgacaatttttaaaatttaaagttttataattagtaaaaggtcacaactaaatattgttataaaattttataaccaaaacctgtaactaattatcatttagttagcattttattaggttgtgactaataattctcttttagtcacaactatttattttgtatactcatttagtcacagcaacatttcatttttttgttgtctttctgttgagtttgaggttaagctccatggtcgagctcccaagctaggtaagagttctcaattttaataacgactctattggttggtttgaggttaaaagtgcttgagatttagcttttaaccatatatttgactgctgagaacgattaacagatgctagcctctgctctcttttcaaagattatttattggcctgctctactgcactctgattgtaatgtgaattttatttatactgacttttgggttgcttgtttaggaaatctatgtgaaaaccttacccatgtccatatccacatattattaattatactatagtgtaggataatattaattgtgaatggaacttatcatctttctcaggttcagagctagaggctcgcacattaattcaaatatataatgaagtgattggaattggaaaagttgcgattcgccagagccgagaagtataatttcttttctttttcattgttatactaataacttagttttctctctctaatttcatcattgtttttattctaatttgattattaattctttctttcattttgtgctaagtacggtatggtgaatctctaggtggtgttgtgaaaaatgtttcaagaatgtcgtttactgctagtggaaattatgtcttcaattttcttataataacaacctagaggctatagagtactagaaatgttcttgatcataaacttgaaaatatgaatcttggtggtataaatcaatcataatgctgatatttgttctcaggaggagtgtgtgtgacttaagtatatgcaaagagtttgatcatcacgtttgtgatatgctaacaagaaaagtagggcttcgcaactttgaattaatttggtttacttgtttatgtatagtagtgacgatcacaatatgaaatgtattgaaataaaatgataaactgaactcctcttcttggtgatgtgtgcacccttggctttctcccccaaccccatatctatcttcctagtgatgtgactttcctttcccttaaaagaactcaaaatcaatgtaaggagaatcaccgggagaagtacttccattagtattgacacctttaacttctgacattctcttatctgcaggggatggtgcctctttagtactcaaaaactgacttgtcaatgggcgtccaacaacattgaagggtgtagctcagttgcctgatcctttgcaggtgcctttagctatttttcttattactttcctttattgatgtgtattgtttcttctttttatttactctcttgactaagatatgattcttgtgttcaatttttatatgatgtgttctatatataatatttaggtattgatctggttcaggtcttatccaattgaaaattcttcaatttaagctagctctttttcactttaatcaataatttcaatgattttctacagaacacagattaaatcttctcacaaaagaagtgaaatcgtactagaaaattaaaattattgagatggttccatatgttgtcatgtctcatagctctattctgtaagtatttacttaataaggtgtggtaaataatccactctaaactaaacctattcttatatccaaatcagttggaaaatctgttaatttcagttgtatt

SEQ ID NO: 36624 - DNA, 4631 bp, Cannabis sativa
aatttacaatatagaaaacaatgtattttacacgcatataaagtaaaatagtcacgcgtgcaacacactgtttgaacgtagttttcggtgtgttaaatttttctgaattttttaaaatttacaagatgtcttaaataactataacgtacatgattatgagaaaaaatttgactaaaaaattatttaagatgctaacaattatattatttattaatgcctaaaaaaaaattgcgtccactaaaatattagggtgtgggtatagtgttgggtaccaaaaatgtgcctaataacaatcctgctcacatcttttttcttttcgttatcaagagattccactatactttcagagtcccacgtttcaaggttttgactttgactccgaacttccgacatggcattccctgattgggggaaaagatagatagaacggagcggcaaagagtcttaaaactgaaatttcatcatcacttcacagaatcacaacactatatataattatattaataaaataaaataaaaaaacataaacaagactttatatatataaataataattatgttaaaagtctttaagtaatattatagcactttattttttaaattttaaatcttaatttttatgagatgagatgagattgagatatactatatattgtactgttttagactattcctttggttgggacataactacgtgagattcatattataggatccctggattgtcaaaggctcaggggtcacatgccatttccctggcacacacgacatgacacgtggcgtcatgaggcttagtacaaatatcatatcattggtggaaagctgtttctagaaaaggcatatatataaatatttcagtgcttttgtcaagcactgtcacgtgtaataaaattgaaccaccctcttctgtctcccgggaccctctctcactctctctatttatatatatatatatattttcttccctaataagataattaagctctatatatttggatgtgaaaccaaatctaatatgtaatgttgctactttaataaccagcgatgatatatgattattgatagtacccatttaggagatcatttatattatatataacaaccttatatataaattggtattattgtgaccatgtatattattatatatgttaatgtgtaatatataagcaccatacaaactttttgagtactcacatgcatttatattgattatatatctatttctatttcgagtggtacacgttaatgataagacttatttatgtataataatatatatatggctatatatcaagttatatatattttcaactcttaataaggttatatagtaaaagtttggtcaaaagagaaaacacccatggtaagaaaaaatagataataaagttaataatgaagcatgctatatgtgtgtatatatatacgtaatgtttatatataaataatatcagtccaatgggaagattttaaagaaagaaaaatcaccgtttaatgagaatagaatgatatatatatatatttatatataaggtggaattaatattaatattattatatatataaacaaaagtcgtgaaagagaaaattcactgaaaatgttttacacaaaagtctacatgtatgatgtgcacaattcataactgataaaccttttttaggaacaaaaattgactaagctatcatctcattgattgcaatattttccctcctttatacatgttagtccatgtgagtatcataacgcatactatatctcattcaaacacacacccttctcttttacttatttgcttgttttcttttggtaaatcattaatatatacacaatactattatactaaaacatatgtaccacgaaatatataaatctaaataactcaattataatagttaaacttaactaatactcacgttgttcgagagagtcatgagagctggaaattatcacacaaatgaatatcatgaaatgaaactcatttgaccctataggtcctgttcgaacctccagccacgttatattgtgggataaatagtaaaatattgatcataacaacatgggttactctatgatcacttatggaaccctataatttctaatatagtatcggagtcatatctcttacgggcatgtgatcctgtctgatctgtacatatatagatagtgactctagtcactttgataagatcatgaactactctacttatcatcaattaatttaagatgggaactcataattctcaacatgttacaaaacaaattagccacacgccttaatcaagtactcggtcgtatatatagtgcactctcaaaaacttttagtatcatttttatttatatataatcatgtacgttatatttatttaaaatcatctgtaaattttttaaaaaaaaaaattaataatttattgtgtcgaaaataaagttcaaataattatttaattttcacgtataatttttttaaaaaaaataaaaacaataacagtcacacgtgcaataaaatatttaactttaaaactaatattataaacaattaatttaaaactagtttaaactctttctttctttccttaattaaataagtattactaactaattagattttatttttaagagtgtaaactatttaaaaaaaattaaacataagtaattttaaataactacaaattaaacttagtacccaatcatatgaagaaaaaaaataaattaaaaaattctcttaaataccgaaacaaataaaaaatgtatcatataataactttttcaacccgagtaatatagaatttttactcatgactataaatattattaacttggtccattaaacttgtgctatatatataaattgcaagtgggattattgatgctgttttgggacagggtggggactggtgtactcagaagctgtagagtgtaaatcctataacgatgaaaaacatttataagtgttttactaacataacaaaaagaaaggtatcaaatccatgacaagcttgtaactttcatgaatcttcttgaaaattatgttggaagttaggtctgttggaatcccaataaaataatgaaaatataatattatgatggaaaaaagagatcgatttatctaaagtaataaattaaaattattagctaaagcatttgccctaatcttggctttctgaccccccaaaatgccaataatacgcatgcggtgttcactaatttaattaattactaatactttatattcaaggaaggaaagaaaaaagagtttaaactagttttaaattatgtgtttaatttaattctatactatttgtgttctcacagtctaattaataattactttataactttttttcaaaaaaaaaatagatatcttattatttatgagagtaattattatgactctccaacccacaaatccaatcttcccccatttgactttttttcttttatatgtacatataatcaaattaaaatttacatactttttcatgaatctcctccactaaaccattttcctttagtttctttaattttcccatttggtggagatcaagatagttattattagtttctactatacctactacatagctccattaataaaccttttgagtatctaaaaatccaaaactactaatgcttaattactcaatagtttttaacataagtcattaactaatgtatacatttatatatataaataatctatatagttaaaaagtactaccacttttaaatctccgacaaatataaataatggtgtctaagcatatgcatatatctactttcttcctttgaagttaaatgccatttattaccacttatgtatatttttcttatcaccccctataatgtgtttatatgtaattattattatgaaatatattgtaataagagcactcacttcgtatattttaaaataaaaaaattctaaaatattaaaaaaaaactaaattaaaaacacattacatcatatactttaaatttgctctctatcttaaagcttctaagtaaagaagttgataaaaactatcactacaaaaaatcttacttttagtcataacaaaacttgtgattaaaagtaaaaaaaagttgtgactaattatatattattattcttattgttactaagaggtccgtagctaaaggtattagtcacaaaaattactttatcgtgattaaatatatttttagtcacaatacttgttttgactaaaactaaattagtgacaagtacttgtgtctaaatagttgtcactaaattatttttaatcacaaataattttttgttatgattaaaagtcacatttagtcacaaaaaatttatgttgtcactaaaaagttgtcactaaaagtaaaagtttctttgtagtgtctctaagcttaattcacacccaaccataggagtcaggactaccacgaaatgtcatatattattattgatataattaagtatgtactaggttttacatattttaaatttaataataaactataaaaaattgataacgagtcataaaatgttactggtggtactggtgttagacatcactggagccgattaacaatttttttttttatgatttctatattacataatatattatattgtttgtatatatagatgagattgttgacgttt

SEQ ID NO: 36625 - DNA, 9673 bp, Cannabis sativa
  modified_base (1397)..(1402): a, c, t, g, unknown or other
gttttaaatttttggtttaggggaaaaaaaaatttgattttctaagtatagaaaatcaaatttcccatttagaattgaaagagtgagcaatttcgtccaattaattttagatatttatttcaacatctattgtcgtgtttcaaaattagtgcattattggagataacattattgttcagagatcacaaaagtacaaaaagttgatttgtacgtaggactctcatcatctcatctatccatttattctattttatttttgaaattaaagtatatcaccaaaaatatacatatacataatgaatttatattttttttgttttcttattcgtttacttgaggacaaaacgcttttttcatgctaaaagatcggcaaatgggaagtttgtatttttggaaatcctctatggaaaattaagattaatggtgcacaattaagatgatcaaaattttaaacaatcaaataattaacaatgacaaaattaacaatcaagaacaactactagataaaaaataagggcaaacaaagtatttaaactagaaacggtaaatgcaaaaaaataaaaaaatcaacaccaagctatatatacttgtttaagtacgatagatcaatgtgatttatggttgtactccaattttgaaacaccaccgtaattcttctctattgattgagcaagaataggtacaatacaatggagaggagattctctgataagttctcactaagtgttttaactcttactctttacacttaagaatcttcttcatctacagaagattcttcttacaaaacacaaacccaacctatctcttttctctacatctttctctctacctctcaatcttttctctatcacactcttaatctcatatgaatagagttctcaaactcatatctcaatcgtgtctttaaattttgagtcaatgtggtatttataggcttaggatcaagatcctaaagtcgatggttgtaagaaatgaggtggttaagttagttagaaataagactgtagagtcgactatcccaaactactattccagaagagataactaggtagctagaactccttttcagggaagggctagctatcctaaagactggacccagggtggacatgatactcatctgaaaattgccttccgaacttgactattattctacacaactccttttgggatcgataacaacaagtgaatagtttcctagaaatgatgatcgcaaataccttttcatttagaggaattataccataaattctggacctagttacttcaaattaaaagaatgacaatgatgaagaaagaatgcaaccatcattggttggtattccaggaatcttagtatactgacttttgagattgatcaagttcaaacaatgcttgaacttgtttaaggttannnnnntagtcccaacatcagtaggattatcttcaatactaactttctttaaataatcaaccagcccctcttctatcttttctctaatccagtagattccgatgtctatatgtttgctttgtccatgataaatcagattcttacaaaggtggatggatgagtactggctatccgaatacacagtcactcctccattgatttgtttcaacacataaagtatttcctgaagccataatgcttctttaaacgctttcgtagtcgccataaattctacttgactggtgaaaagagcaaccacggattgtaactgagccttccaaaatatacagttccggtttgctaagaaaacataggaattggctgattttctagtatctctattggaggcggagtccgcatccacgaatactttcaactccaattctcattttcctttctcataggtcaaaccataatctcatgtgcccttcaaatatctcaataaccatttaagggttttccaatgttccatgctcggattagacatgaacctgcttaggatgcttaaagtttgacatatgttcggtctcgtactcaccatcacgtacattaaccatccaagaaccatagcatatggtacatccttcatatattctttcttttttgtattgttaggcattgttccttttacagaataaactgacctcgtaaaggaatggatgtactatttgaatcttccatgtttaacttctgaataatcttcttgatatacccaaaatgcttcaaactaatagttcattccttccgattccgcgagacttcattactaagtatattttgaattggcccaagctctttcatctcaaattctctcttgagcttggctttaatacttttgatcattgatttatcttttctcatgatgagcatatcctccatatagagcaataagaacacggctgtagattgctccagattcttaacataaaggcaatgatcatatgttgatcgtttgaatctaatttgatgcatataagtatcgaatcttttattccattatcttggaaactgtttcaaaccatacaaagatctattaactttacaaataactcaactccttttccttccacccgaaacccagatggttgcttcatatagatctcttcatccaagaatctattagaaaaagatatcttgacatcaagttgttcaacttcaaactccaaatgtgctaccaaagacatcatcaatcttatcattttatattttacgacaggtgagaagattttagtatagtctataccttccacttgagtaaaacccttagccactaacctagatttgaacctcactggttcattctcattgattccctctttcaccttgagaatccatttgcactccataatcttcttgttttccgacttcatcttagcaatccaagtcttgttttttcgtagagaatccatctcctcatccgtggcctggagccattcagacttgtttccacctgaaattgcctcttcatagcttttgagatctttaatttcagtttgttgaattgtcgccaatgtaaatgctattatgtctgcttctgtgaaccttgctggaggttgaatctctctccgagttctatcatgagccaactgataaccttccggacttgtctatatgaacccttctgttacctctattaggtcttcgttatcttgttcttttggttccacaacagcttttggatgtgcattgtcttccagatccacactatcttctgcctgtgaaacttctttcgggagctttgtttcgtactccacctccacacttacagtgtctttgtttcatgtttctcctgtaacacacgaagacatactacccttcctagaggtcaagtgaggatattctaactaattaaaaataatatttctagcaatcacaacctttggtttgccccttctggaaatgtagattctgtaccccttgttcctaaggcataacctagaaaagttcccttcacagacctatgttccagcttgtcaattgatttgtgtaaatatgtagtacacctaaattttcttaaatgcgctaggttgggggttctgttgtcccacatctcataaggtgtcttaaggtctataattctatttgggctcatggtaacaaggtaggttccgtttgctaaggctttccccaaaaatggttttcctaaccaagagctgacagtaaacatctaactttgttcaacaaggttcagtacatcctttcaacaacaccattttgctccggggtcttcactacggttctatgcctaatgagccaaattcttggcacatcttgtcaaattcggagttaacaaagtctactccattattagtgctatggttcttaattttaagatcagtttggttttccacctaagttatccaaattcttaactattccagacactcatctttagtggttagcaagtaggtcccaaaacaccgactataatcatcaactattgaaagaaaatgttgcttacaggagtgagtaggcaccttatatggtccccaaagatcagcgtgcacatattcaagtatctttttagttgtgtgccttgccagattaaacttcagcttatgttgtttccctaaaatactagctccataaaatggtaaggcaccagaatttaaatttttaattacaccttgtttgtgtagttctttgaggccttgatcactaatatgtccaagtttgtgatgccagaacttcatattcgattctagccctttcaccatactagcttcaccagctgggagagtttttccttggagaacatataaaccattgacctttttacctttcatcactaccaaagaaccttggtgatcctaaagcttccgtgcatggacgtgtatccgtatccttcatccttgagtgctcctagggatatgaggtttcatctaaggtctaaaatgtgccttacgtttgtcaggaccttaattctgccatcatactgtttgatggccaccttcccggttccaataatgaccctacatgaatgatcattacccataagaaccttacctccatcaactgacttgtaatcaaaaaataactcttgatttggacacatgtgataagtgcatccagaatcgagaatccactcactatccattaatgaagattctgagatgcaaaataattctccatctgtggagcaggcatcattatcttcatcaattgctgcagagtctttcccatgatgatggtgctggaagtccttcttatctccactgtgtgatttgttgaagcctttttgctccttgtacttcttgcaaaatctttgcaaatgtccaaaccttccacagaagtgacattaatttccttgtgtccttctctttggacttttatcttgattgagagtgatggtgtttactcttcgaactcactttcttgggtgatcttctttcttggaatccttttctaattgtactttgagatcattcgatttaagtgcggcaagaacatcttccaatgcaataacatccctgccatacttgatggcaaccataatttcttgacatgcgattagaagtgatctcaataagatgatggtctggctttcttcatcaaccattcctcctgtataaaagagacttttagcactactccaattttttatcctagatgttatcttctcaattagaccttcatagtctattttcaaaattcttttagagaaaattatcatttcaagatacttgaatggtagtttgctcttttgaaaccaaaacgtaacaataattctttcaaaggttaaagggtacctacaccatacacaacagacttcccaatattttctttgtgcctagaagaattcgagaagatttgaaagcctctaaaaaggagctaggatctttgaaaccacctttgcaaaaaaagtagtaagccatctgcaaagcacaagtggttaagcttcaagcttttacatctctgaaggaaaaaaaatccccattcttggctactctagtgataattcgaaaggtactccatgtcaattacattgagaagaggcagcattcggcccccttgtccaaggcctctcttagattgaataaaattatgtaaggagccattcaccataaaaggaaaatgtggagtagtaacacaagtcatgataagctccacaaacttcttagaaaaattaagagcttcaagcatatctctttgagaaactcccaattcacagtatcataagccttttgcaagacaattttgaagaggcaaccagacttcatcgctttccttttgtaacctctaaccatgtcttgacaaactataatattgtgcacaatttgcttgccttttataaagccactttggctctcagaaatatgtttgacatcacatctctaagtctgttgcaaatcatttttgtcgccattttagccacattacagcaagcaattcatttataatcactaactgaatcaaagcacacaatcttaggaatgagagtataatagtagtggaattaatttcctttataagcttcccaatattaatataagaaagaacaacttcagtattgtcccaagaatccttgaaaaaggcactgttataaccatctaggcttggagctttatcatggagtcgtgcgcagagcatgttttacttcatccgtagaataatcttttatcaaataagtagcatgggtatcccaaaccacccctccctcacgatctttctattcacttttgttcgattacccaataaagtttgataatgtaactcgtacttttgataaaaaatactaattttaatcattatacaaaaaaaaaaaaaaattatactaacttttttttaaaaaaataattagcatcagtgcactggtttttccttcagttataaaaaaaaaaattagcgtcggttcataatcgaagcaaaaaatatcactatatttgcgtctatgattatagcgtcgattacactaatcgaaaaaaattctttatatatcattgaaaaatcgaagcaaaaagtcattgttacagtagtgacctatgttcattcatatttagagcattcccaataatcacttttcaaattttatactaggattatcggtcatgcataagttgatcagtcttaaatatgtataagaagcacaaagatgaacaaatcacaataacaagaaagaaagaacaataaaatagcattaaacgatgggataatctcaatcaatattcatccaatccctaataaatagagatagtagctcataatctcaaatacatattcataatcaaattaaacataaacaaaaatgtaggaaattgaagagaagagtagaaaactagataggggcctgtcatggatcgtcgatgctcgcttcaagcttcttattcttctcttttagggttcgtttttgtctaactcaataaaaattcgaagcctcccttttatttggaacaaaaaatttagccaaaaattgcaaaaagatgaaacttcccaatcttcgtacggaggcggcgccgcagcgacaccatgccttgccgcaacgactagagctcctcgagaaattgatttcgactctataaaatttcgtcatggcgacccatggcaaaattttgccgcggctacaattgagccttgtcgctgtgactagcacaccaactacaaaaaaaaaaattaattttcgatcccgcactgtccttttgatatttgaccaatttttcaatccaaagtgtcaaaacctgaaactaaagaaaacaagtgtaaatctgtttcaaaaattgacatttaaaaagagaatatttattaaaaatgatctaaataataggctaaaaatagtctaaaaaccaacgtgttgaccgacgcaaaaagacaattttttaatagtgtagatttttattgcttttttttttcctctttctactcccttattgaatttgttaggtaaaaataaaactactatatttgaatgtggtaacctatagattaaaagaagtagaaagtcaactaataaaataacagttaatgctataaaatgacattaaaatcgaatctactacatagggatagggtagttgaaggttgccaaaagccaaggttttgacgaatcttaaaaaataatatcaaattagggtttgaaaattttcaaacttgtctttatagctaaattttcctaatcctacctttaggccaaccttattaactaaaccttaattaagcatgcattagcttttttaacttagaaaaataatacaaaagtgaccaaactctctagagcattgcctaatgtggcccatttataatatgagcgcgcgtgcttaaaaacatatttctcatacataaatctatttggtatgctatgatacatatattatactatatactatcctttactacttatatttatatgtttatttagtataagtactcatttttctaaggcaaaaatttcattcaagattaccgtagggacaaacaatggcggacactacaaaaaattgctatttttaatgataactttttagttacaatataatttttttgtgactaaatgtatagcatgatcctaatattaattaattgtatactgacaaattataatcttcccatgcacttaattaatttgccatgatttatggcatcctagctatgagctatctcatcatcatatggcacatgtaatatacttcttttctataattagaattattttctcagtctcattttctttgtttaatttttccatgcatcttaatgatacatttcattaatattaattaattagcatggagaacttgcatgtatatatatgatcaaactgagtagtagtttcatatgcatatattgtttcgcatacataatctcttatgttctctcactcactaaatcttttccattattcatctctaatttatatcatggattacctctttccatctatcttattccttctcacatttcttcttataataatcatctcattgattatgaaggcatcatcaaaagcaaatcatgataaagccagcataacaagcaatgtttccttaacaccaaagttaccaccagggccaatgaagctacctctcattggaaatctacacaaccttataagctcttctctcccgcatcaccggttgagggatttggctaagcaatatggaccattgatgcaccttcaactcggtgaagttcctcacattgttgtttcttcacccgagattgcgaaagagatgatgaaaactcatgatctcaacttttttgaaaggccttttcttctcattgctggaaagtattatggtatagatattatttttgcacactatggtgattattggagacaaatgaggaagatttgtgcagaacaattgttaagccctagacgagtccaatcttttcgatctatcgagaagaagaagtgtttgatttaattcaatacgtgcattcaaaagaaggagagtctttcaatcttagtgagaaaatatccacactaacatataacatcactgcaagagcagtctttggtaagaaatgtaaagaacaaagagcctttatatcagctgttgaagaagttctaaagatcgctgccggtttcagtgtcactgaagcattcccttcacaaaaatggttgcattggattagtcgctcagggcctaatttggaaaagaagattaaattaatggaaacaattcttgatagcatcgtaaatgaacataaaaatgatagagaacaagagaatgttaatcattatacaaaaaaaaccaagggtttcttggatgttcttttggatcttcaaggtagtgatgagctaacaattccactagagcctttaaacatcacagcaatcatcttggtaagttattaattattatatatatgttataacttaattattattgtcactacgaaaaagggtcattatgaccgttaaagctggtcataaaattctttttcacattttttttaatgcttattaataatacgttcccttacagtttttatgattagtatactttcatgtccagctttaatggtcatgaaaaatccctacaacttttttatgacttacactaattatgcaggccatgaaaatggtaatgaaagaagtaaatagtagtagtgtgtataactatttttgcatgcatgtgtgtggcgaaaatacttacgataagttattaacattatttcaggacatgttcattggaggaagtgaaacatcatctgtagttgtggagtggacaatgttagagttgttgaaaaatccgacatcaatggagaaggcgcaagctgaggtaagacaagtgtttg

SEQ ID NO: 36626 - DNA, 6651 bp, Cannabis sativa
  modified_base (32)..(34): a, c, t, g, unknown or other
  modified_base (6624)..(6626): a, c, t, g, unknown or other
attcatttatcagaaaatcaattatttatttnnntccttaaatagaaaattatttccttaattagaaaataatttccatatataaaatattctaataccatgtacatatgaatgattattatttggttaaagaagctattctatcctactactaaacatgatgtaggagacttggtgaattattaacttaaataattaaaagtccaactaggaattaactattccctagaaagactatctaatcaatttttcaaaaatatatatattcatttagaaataaacgacaatatagataagtatcgtttgaagctttaaatattttaaggttattatgagaagaaaaaacttagtccgtcagtaaaggtccatagaaaaatggacatcaaatatcatcttcataagtaatctttgcatattcatatttaatatccttaagagatttttcaatgaattctacagatggttcaattttgattagttgcatcaaattcttttaccgattggtttgagagttagatagtataatttgattaaggattgccgcattgcatatctactatgtaagataataaattataggccaaacaattttaagatgcacgaggaatgaaaatagattgttacataaaatagaataattaatgagattgtatttaatttttagaaattctgcaaagtaaaatgaatcaatattagaatggttgatcagctttgcaatctctcacaagatagagggcttagattagattagattttgatcaaaatttttacaataattgatgtgaaaatatttgacaattaatttgaaatggggtgaacagatttgtaacaaaaataatgatgattataataagaatattgtgttaatcaaactaaatattatttggataaaaacaaatagaatgattagtaattataatttacggcaatattagaacattatgtacaaaaaaattaatcatttcacatgcaaataaactaccaaggtttttgtccaaagaccaaaccaccggcagtagaacttgtaagtcttgtggtaaagaaaaaaagaaaaagaaaagcattgtgaaaagttccatgtgtaaagagaaagaggtctaacatagttcgaaattattacaggactaggcatattttaaagcactcacttatgagaccagcaagaaaatccttcttacccaaattacaaaatttagcaatgattcaattcaagagtgcttagaacaagagagagatgaggatttgattaagctctgccccctttacaaatttggtatgattttgattgagtcatacttcacttgtctttaccaaagtttaaataaattagtatgattatatagtggagaactacaggaacacataataagctttcatgattggttagtaacaatttttttagataaagcaaaaaaaaaaaaaagttaagtatgattaagtgtttataattaatgggattcgcttagcaacaaaaaagattttggagttagtgaattaagcagtacagacaacgtttatcttactggaaagtatagagcaaaaaagtattttacaagtgcttgattattggtcattggtcgaaaatttttatatgtgacatgtgaatatatataaatatatacacagtgttgaggaagagaatctagctttattatatggcttgttggaagaggcacatcaaaatatgtagtccaaaacataggggactaaatatgcatcctcaacccttagatatatagacatatagtttaattgaagagaaggcaaggcacatgattaggatgtaataagttatttaattaaaagagcaccaaacaaagctcttctaagatgttgctacaagacatttgcttctcctgatggaaacaagtgagttggcaagtcctttgaaaaaaaaaaaaaagaaagaaagtgggtttaagatgaagataaaaagacagcccatcaacagcaacatgtgcccttttctttatttttagtttaaactttaaagggtgtcttggaacacctaatattcttcattcacaaaccacctttgatttcctcaagacaccatcttcatctttcttccttactaccatcatcaggtgctaactccctctctttctattctatcatctgatctctatagatttaacaagtcttgtagttgtgcaatcatagtatgttgagtagctttttttttttcctttttttttctgcaataagtgcacaaaaatctagttatgttggtttgtttttccatgtcatacatatagatccatttttcttttttaactataaacattgaaacattcataaaacttaacatttaagtccaaacatgtaaaacactgatgtcttgttaaataatacaatagcatatataaatatgggcaaaaagaaaatatgtgaaatcattggatttacttggttaagaaaagaagctgatttattcttgtacaacaattactaaactgggttttattctctgttcaaatctcttccacttaatgtttttttttttttttgtttttctgctcatgatctttaattgtgttgttatgtcagaatggctagtgatggaccaagttgggctgatcaatgggggaccgggggaattggtgcaatggaagatgaagacaatgccaaaaaagagagcgatgcaaacaagaagggagaaggcaaagctggattaacaaaagccaaagctgcagcactggcaggagcacaaaagatcaaaagtggcacatccaacggcttcaaatggatcaagaatcagtgccagaaaaaaagcaccaccaacaccaatcccaaataaactgttttctacactggctttctactcattttctcaaatagaaaactttgttatgcttttgtgtttaactaaattaaatggcaatctcctaattgtttgtagaagtttgtgtatgagtttcacagttgtggtttttttaaacatcagcttattcaagtcttcaattttcatagaattgttaacaaaatgaacatggtgatgataatttaccttatctattagacaaagaaactccaaagaacagagtactgagtatttaataccattcatttaggatccaaattaaaatgtcacatataactcaaatgcttttcagcaaatataattgatggcattgaatctattaattacaatagacatcatcaatggagtttaatcataattggatgagaacattggtttgaagagacaaagctatgggaatgtacaagtttaaagttattattttactcaaagcattgttgctcataagaggtcccaaaggtgttctcgccactgtaagtcatatataaaaatccatcttcatccttgtgatcctcataaagagcagacattaaggaagctgtaaaaaaaggaatgaaaattacaaaactataacttttgaataatgaatagtatttcttaataagaatggtttcttatagtttaccagtgggaggtaaagtgttcttcacaaagacaaatatagccttctcagcgcttagtttgatcctttttcggacaacatagacaaactgtcctactgttaaatctgctggaacaagatatctgcaattgaaaaaacaaaaagcattacaaccttgattgaatccctttgatatggcccaaaaaaacaattgaacaccggtatttgaagactaccaagaaccactttacagaaaaaagtttaggacccaactctcataatcactcctagaacttcatttaatttttccaatccttttaagcatttgcttgccccagaatccaatccagaaagatgaagcaattaaactttgcaaaacatatgtacaaggcaagcaactacaacaatcaatttgctttttcttttttttttccttaaagaaattcacctcagaaaccaattatatcgtgtccatattggcaagctcaagattaaactttgaacaatatcaatatcatatataacatttctaaggaaatgactaagcccaaaaaccaagaccaatgcagacagttaggtggatatagaataatttatatgattcacaaggcaagtatgcatcaaattaccctgtctcactggcacctttagagacttaataaatgaagttagaaactatggcaagcttaacatgcataaaaaaaacaatttgcagatttagattccagcaaaaccaataatgtaattgtaacagaaagattggactactaacttcttcttatcaatgtcaggaatgtcactttttccagccttctccacaataacctgaatgacacaatcaagttaattatacatccaaagagttaaaactaagcaaacatattcttcataaaggagaaacgttgtacaggtattctgtctggatacttctctttgatgcgaagagcttcagcctgcctcctttctatattgggaagaccaaaaagccataagaaaataaaccaaaaataatcaagcaaaaaaacaatgttcaatcatattcaagaacaatcttaagttgtgtaagcatgaaaaatgtcattagtaggggctaactatgataatataaaaccactcagagaccaagccaaacaataaagttgctatgctagcactaataccaggatttttggatatgttaaaccatgcccaatctttctaaaaaaaacccaagatcagaaagaaccgtagtcttctttaattcattccatactcaacgtaaaaccaactcataagcaattcaaaatacccaattcatctatttaattcaacccaagtgggaatataaaaattctattttcaatttaaaaatatcattgataaacaaacaaacataataataaaattgaaaaggaacaaacccattggatgttcaatcttgaatggacttttggccatagtaaaatttccacctcttgagctatctgcggatttcaaacaccgaaacatcacaaccccacaaaacatcacttacccagaaagaaaaaagtgtcatatataaatatataaaatgaaaatttaaaacaaaagatcaaaagggtcagtgtcaagtttaaccataaagagatataaaaaccaacatcaacataccaatcaggaaaaatgggtgtcaagggtttgggaagataaagattgataaattgggtgagcggaaaaaacaaagggtcaaatcaaaatggaagagaagtagagatataaatgccctatttataatatatttatatgaaatagtttggtttcgtgggcttctccaggaagagacttgctgaagtttcttaccgatacccacacgtaataaataatatatatatatatatatatatatttctgttatatatgcgtgcttgtgtgtttcgatatgcgtttcgttgtatgacagtttaagctaactctcttctcttcctatatccccggccccaagtgacagagagtcaaggataattattattaataaaaaaaaagagaattattattagagatattgatgataaatctacttaaattttacattttgtatcacttaacatatagacttaattttttatggtaaatttgtagtgatttacttaatattaattattaaaataatttaaaattataaaaaaatatatattttctttttctcaaaagctgtcaaaactctcgaccctaatcagttttaataaatttatttttgttttaaattgattttcaaccatagttttgaattgagtgaagagatttaagacatctgattttagtggtagaacaaatggattgattgcaggaatgaaattgaactggtatacaccgcctttaagcagccattgtagtcattttccttgtcaccttattcttcacaaaacaaacatgagaatcaaattctatctaagtatatgagtatataaacacgtagaaagagataaacatactattttttacaaaacaaaaatattctttcttataagatatgaatcaaatacaaagatataaacaaatattaaacctaattactataacagggtatttatagtcaatatacacattataaatagctcgtacacagtctaaacaagaccacaattcaaaaaaaaaaaaaaaaaaaaaaatcctaaatgcaactttcctattaaatcaggagctgtaaatacaacattttatttgtgaagaaattataaaataaattaaattgttggttttgactttttttttgtattgataaaaaaatatacaatttttatattttaaaataatgattttaaataataggtcacaataatatatttttttttgagtccaacacattagtattaagatcaaaaaataatttctaaattaaatattaaataaaagtaccttacgaaatagaagaaaaaaataaaagagctagtgaaagatatctcccaaaaaaattgaaacgaaaaaaaaaaaaaaaccaaatcacttacgcgctataaaatagtgggcatttggtatgtttaattttaaaaattagaacattaatttaagtttgcggtgtaatgcaataattttacattttatgtatatatgtaaaaaattctcaagataaaattaattaggctagaaacacaaatctttatatctattctatataaagtgtgtctataaaccgaattcttggtttatgagaaattcgtgggagactttttatttatattannnataaaatgatttattattaaaaata

SEQ ID NO: 36627 - DNA, 5054 bp, Cannabis sativa
cttgattaattgtgcatatacttgctataaagctgtgttcatcaattaattatttaatcttttttttttcactaagataatttatttctaataccaactccttagtgaaattataactccatcaatccgatgcaatcgacctataatcacttacgttggctagacacttgcttttaggaatgagtgtgaagacaataaaattaatttccttcaacaattctcatatatgcaaaaaatacataataactttacaaattcatctctcaacatctctcaattatcttggaagaaaaaactctcaaatcgatctaaaaccggtactttattacttggaatatctaaaagagctctcttaacaccatctctcgagaaactagccattaaaagctctttctgattgcgagaaatcatcgacttcaaatcaactatactagtttgagaaaattccttctctaatctatttgttgttatgaattctattcattaataataacaaatagagatttaatgtatacatgatggcatatccaacttaacacttaacaaattttttttttattacaaataaagtaccaaagcaaaataaataaaattaaatatcacaaatcgaaaataattcaaataattttacccctaatattctaataaattttaaaatgagtaaaagagcatcataaaacatacttttatacacgtgaaaatgaatttatacatgtccttttcaaaagaaagatacatcactatcactatccactactggattacctataataattatataaaaaataaaaactaaaaattacaaaaaaaaaaaaaaaaagtaccaaatcatgaaattgaaaagtccaccactattggaccacattttccacccctaaaaattccactaaagaattttccacttttaccctttcaaaaaaaccataaaaaaatatatatttatatatcaccggaaaagtgaccggccggaacttaaaagcttgctcttttcaaagaagtgatagtaatggcagctcccaatggcgaaacacccacatcacaatcaaacgaatcataacgaagaaataactcaacaacaaaaagcctagcaaacatcaccacaaaatctttcccggcacactgtttattccccaccgtcggcgactcagtttccggtccattagaccaaacaacatacttcaataacttctctccttcttctccgacgaaccggtcagcaacaaactcatcagctctatcaaatatcttcggatctttagtagcaaaaggttgaaacccaaataacatttcaccttctttaacctcaaaaaccccatcatggctttcgatcaaaagatctttttttgctttaccgtattgtaaaggcacaggtggttcgaacctaaaagcttcataaacaactgatttcattaaaggcatttgttccattccagccatggttacttttccaccgttggatctgaccacatttctgatctcttcagctaattgggtatggagtttgattccacaccgtccgattgatttcaacatatttgggaaaaggattttcattcctccaaatgtgttgaaacaagttgcgaagattaaattgtgacaagcttcatctcttgagattcccatttgttcagcttcatcaagaacgtaatttccagcttcatagaagtaatcgaagagtcttttgtaatcggatttgactaaaaaagagggtaatcgaaaagtatggattgctaattcttcaaccaattttggaagacccaaaactagaattgggtgaagatttaacaagacccatttttgaatcaatttaggaccgtctgatccgagtttggtgtcgtttggattaaccccataaagagctctacccaagaaattaaacgccgcttgatcattagcttctccgaaactgactttcccttttgcggcgagatcggtttctagggtttcgaagagttcagtgtaagttttgtggaattcaggaatcaccatgtctcgtcgagctttaagcatgaagaaaattagggttttgagtttggcgtgtttgggttccgatgggtctaaatacgataagatacggtggccgccggtgagttcagtggagggcatgtaagttccggtgaaaagatcctttttttcgactttgctgacgtcaaacagtaccgggaaactcttcccgtctaataaaacgatgacacgtggatttgaagcgatgaacggacccggtggcatgttggttctgaaaaccgtcgattggtatttctgaactcgtgatttgaaaaactcgtttcttccttgattgtaaaaatagtctaatcgatctaaaattggaccgatcagagggaatccgtagtttcccgggatttttttagtggggaggtttttggattctgttaccggtgccggagttgagattgaagaaggtggttcagaaactgaagcggtgatcggaaaattaactaaacggcggtgaagattgggggttttgattgggtttttggataatccgaattggggttgtaaagaagggaaagtaagagatgtggaagccattgatgagatttttaaggttggtcggaagagaaagattggatctttgatctgaaactgagatgggtttttgatggtttgaatctgaaaaagatgtatttataaagaacagagttgaacagagtggtctttatgttttcttggacgagtttgagcaccggccaaataagccaatggaaataatcaaatttaataatctcaattatgaaaatgaaatgccatggacggtgaaattcttttaaaattcaccactttttttggaaagggattaaagattttggtattttaaagactagcttgtaagtggtattagttgtatgatgagaatttttaccctaattactttaacataagttgaggtataagatctctttaatttacatgtgatctttgggatcgtcaatatgattaaaggggtaaaaaagaaatttgcaccacgtgatctattcatcttgattcaaaaaaaaattaagttgttaaaattttttctcaaactattgagattattaaatttaatgatacttatcaattttactttaagagagtttaacgtgaatagaagttcagagagtataatttgctttggtacatgttaacatttaaggaacataatttgatagatgaacaatagataaattagaaaaaatgaatgaaattaaagaaaaaaaatttaaatctaacaatctcaataattaaaaaaaaattaatgacttaaaaattttaaaggcatgatttaaaatatgttaaaatttgagtgtgaaaattataattaattttttttttttaaatatgtatgtaatataaaatttatgttaaagcatttctaatttattattaggcattaaaagaacatcaccgtaaggttttacgttaaattatgaaagatttgataattaaattataaataattttttaagtggggtatgaagcataatttatagtatacaaatcaataaaataataagtgataggtacataaataaaacagataaaagcttgtaaatcttaatttcatcatcttaaattatttaaaaatttatcgaaaatatactgaatgtttagtataattttaatttacactgtcatttactaaaaaagaaattataatttataatattttaaaataaaaaaaataatttataatttttcagaaaatatagagacaacaacagtattgtctatatctacaaaatttctataattatacgtatctatttaaatttgtttttttgcaaaaacagaaaaagagcctaattttttttttttttttttgactgtattgctgtctctactcggtttggttttattttattttattttatttaaaagggtcgtggaaggtgtgctttaattttatttattctttattcttgattttttttattatttattttaagttcttcatgtggtcggttgacctggtcggggcctacatattttgctatatttttagaaagatttattggcggcaaatttctctttttatcttttaattttttttagtattattattaggtatcagtgctatttagtacttttagatttattgatcgtcttataattgtctagcgatactatttataagttattgcattaaattttatgggacccaatacttagttggaccaatagtaatattaacacgtaaaaaaatattagacacttagtatcttttaatatttctcttaatttttatacacttaatccttaattttttttaaatttatttttttttttcacaaatttgaggacatcaccgttaatacaaacggattaccactgtatatgaaagtaaaatttcaaagtcaatacatcaataattcagtcggtatttaacggtgatatgcaactgatatcttaaatttacgaataaaagtaaacataataaaattttacccaacaaaataaaaaattaaatgtataaaatcaaaacataaaaattttttactggaaataattttttttgaaaaattataacatatatatttttgtaaaaataaaaaagaaaaattaaataaaaaaattgaagataaatttaagaattgtcagttgttctaaatttcttcttcaaatttgtaacgtagtgacttttaatattcattggtatgatgggacacacgatgatatacttttctgctgagatttttcttaatattttatctctttgtaatttgtatagttggcttttgatttccataatcagaatatataattattaatttaaataaatattttgggtcatttaaaaaaacaaataggaatattttactaatttttaagaatcatgtttttatttgtttttgtcaaaaacaagtcacacatttcacaacacaattacataaaccaaatttaatcacattcacactgttacaaataatatgcctattggccaccagtgatgcccatcattttttataaatggcattttataattagtttgcgatattttttaaaaattattttcttaagttatatgagattcaatacttaattatatcaatagcggt

SEQ ID NO: 36628 - DNA, 6475 bp, Cannabis sativa
tttaataatttatttttgacatatcaaattgtttagaattattaaatattatgtaaaattttaataattacagtatacaatgttataaataaaaaaattataatttttacaaacaaagtgagaaacatatcgtagcgcaacaactaggactcattttcaaggatttttttttttttttgatacgggtattagaggagttttaataggaataaaaaatatttttatgaaggttacacatggggtgggtatctagatttcgggggtaggaaatatctactaggggtgtttagaaagtcatccaattcaattataatcgactgattcaatagaatcggatatccaatcataattggataggaccgaatgtaaattttaaaaaatcaatcgaatcggatcagatcggttgttggatgagacatccgatccaatagataaccgaaccgatcaaattattatccagtggtcatctaattatatttatatattttaaaatatatctataattttatatatttaacacatgagattaagaaaaaaaaataatctaaaatattaattcttattttcttaaacgctaattaaattgtcaatgcgaataagtttaattttttggcgttattataagattatgagaattaggttagattaaattaatatttattaagtatgttgaattattaggttttaaattaattttttttttatatatatatattttctttttaatgaaattaacttaaatggtagctaaaatgaattggatggattcaatccaataaaaaaccagttatttttttaatttttttattgtggggcgaatattttttaaaaaatactgtgtactgtgttaagtgtttactgttgttctacagttatttttttgttgttccactgtttttttagttgttatgttttgtgttttactgttgttttattaaaatataatatttttaaaataatttccatgtgacagtatttttgtaaaaattattctaaattctaatattttttaagttttcctttgtttcatttgttggttggttacttttataaagtattaattttcacgtattgccagatacctttaatagtgaataaagtttactcgaacacttaatgtggaattggatgactaatttacataacattaattaggaagaaaaaaaaaacaattttatatggtaatactgaaaaaattatttaataaaaaattgttagacaaaatattataatttctaagagccgatcatgacttgggcctggacccagtccagagaaaaagcccattggttcaaagtccaacaaattcagaactcagatcagaacagactgtaaacagagagaaagtgataacacgtgtgggaggtcaattctataacgggacgagtcatacacgtgtgaacgggtcggatccggaacagaaccggatacgggttcagatatggaagaatatataatattataaatatatatttatataactaataatacatagttattgatattaataattgcaagaaaataattaaaaaagatgcataaattaagagttccaccattaataatcaaccaataagctaaagcttcttaggttcgtcttcttcttgtttcttttcgatttctcttttttattttctattattggtctgataaattcttatttgcccactaaattttttcctggctgttttgattatattatataaatatataaatatatataatatatatatgatatatatgtataattttttaatactgtgtaaactgtgtaatattttatgcgctttaaaaaactaaaaaaaagccatcttaagaaaagagagaggtagcaaagtaggagatcaccttcatcattttgaatctatggagcaactcgtcaactttatcattcggcctcccaggtatattattctttgcctttattttaatggagaattcgaggcttttgagtattgtatcacgaaaattctgtatgggttttggttgttctttaatcattattgggtcttggtgaaattttaggatttggaagttttcgaatttttgtagcatccatgatggttttgggtaatttgaattcataatttgaaggagtttatttattgaggtgcaagtagaattatgctagaattcattttagtgttcttgtggttggaaataacatatttctgttttgtgtttttcttttctttctaaaactggtgtagaattattcacgtgggatttgcacttactagcttcatttttctccccctttgtggaaaagttgagatctacgtagtctgctttgatttaatcgtgtttttgtttaatgtattcttgtgtaacatattctatatgaagggttaatttgctcaaatttgatataacttatcactttgttgattttttttctacttggaattaaaacctgttttttaactagaatacctgctgaactttacaatatttggggatcagaaaactatagcaattgcttaatgtgctgactaaaaatattgttgggttgcagggctgagtatgatccaaaacacgatctattggaacaagagtttatgctgaggggaaaatggtatcaaagaaaagatttggaggtgagtttaagtgttatgtgtagtatttcattacttattcaagatttatattttcatggttgcttcccatgttgtgtgtaagtcagatgctatagaaaatcagctgttactttcagaaattgcctgtagaaagagtatggtaatccatattagaatatggggtttctttcatatacagtattaggggaaatcattaacgagttttgtatttgtgttacgtgctttggtactgaaagggattttatcttacttgggcatataaacaaagtataatacaggatttgtttttatttattttttttaatgatcacttccttttcattagaaagtattttgaatattttgcagattaagaattgtcgaggagatttgcttcagtgtagtcattatgtgcccattgtaagtcctgaagggaagcctctgccctgtgtaatatactgccatggaaacaggtaattccttgatttaaggttttgatcattcatgactgatataataatggacaaacctccgagtattttgtctctagtactaaccctatcataactgaggaaacaaaaatcgttttgctttcttacaatttgggttatacttactcgtaagtaatggaaaattaatgctgcactcccttgtgcctcattgtggatctgtgattactggtcatgacattgtttgcaaagtgactacagctgaatcccttttttaagtttacttgtactgccagaattaaacacatgcttttgtggtatgtaattactgtgcatacccaattgactttgacttgcaaccttatcacaacacttcacagtatctacacagatgtcatgatttatgagaccagtgaaaaatgaattttcttttctttttttttttaaaaaaaacaaaatcacttatgtagtcaacatttcattgtttatgcttaacttattaatgagctgccttgttaatatgaaaaaattatcttcatttctttactaactgatacactatattcacagtgggtgcagggctgatgccagtgaagcagctattattttgctgccttcaaacattacagttttcacccttgatttctctgggtctggtatatctggaggagatcacgttactcttgggtggaatgaagtaagtacagagaaattatttaaaattaaagccatattacattcatcaagtgtcataactgatcatttaggtctccaattttctccatttttacagaacgaatgccgtctatgatgttgtctttacttaaataacaacaatagttcaaaatttgaaagtatattttttgttacatctgaatttttatgtagcagcatgctgatcatatcagatgcttccaaaagtataattataagtctttataatgcaattttgtacatactttttcgtgtttatttgtttattcaatatatgagccccataaaattgtgtctaacatgaattgaagcaagagatgtagtttaatcaacttaaatttacgtaaggtatttcatcactcttttcataagtgtaggatcctttagcagtggattgccattttgcatgttggtgtgttccatgatgtattctattatcataaaatgcagatatatgacaatccagttctttctttcttcttgtttcttctttgcagaaggatgatttaagagctgtggtcgattatttgcgagcagatggaaatgtctctatgataggcttgtggggccggtcaatgggtgcagtcactaggtttcagtttcattcattcacttagtgttttcctgtaagcttgcataatataagatgcaaacaattaaaaatatcaaatgttcttgtaaaattaaaaatcatctttccataattgcattgaagattaacaaagatcttttattgaatgaagatcaatttggcttcttcttcttcttcttcttttttttttttggtgccaatagctagttttttaaatcattattaccgtagattaacaattgaaagccttggaaaatcgtagacaaaatcttaaatgtttgattacatgtcatgcattattcacctaacatataggattgatttacttttctttccttttttcataaacatttctcatatatggaacatgtggttttttaggagctatctgtgtacttagcaaagcaattgagtaatcatactaagttaacaagatttataaaatacagttaaatgtggtaccatttctttttcctcgttaacttaggcaaccttcaatagtttaggccatttctactaacaacttctgctattctgcacagccttatgtatggagctgaggatccttcgattgctggaatggttcttgatagtccattttctgatttggttgacttgatgatggagctggtggatacgtacaaagtccgtttaccaaagttcactgtaagtatatacttgtgtaaactttcaattgtgcatcttttgtgaaaggtttcctcaattttaatttctttcctctgctttttgtaggtcaagtttgcaatacaatatatgcgaagagctattcagaaaaaggcaaaatttgacataactggtctgaacacaatcaaggtattaacctcttaataatttatttatctattaggatggaatttcttcttgattactttgagatgcgtccaagggaaaaataaatgaacccagatgcatgtttttttgctcactcaattattcaaaacatgtaataaaagaatagtgaaaattgttaatttttctttttcttttttcgtttttattcttatgaaaatgacttgattcgttttcatactatgtaggtagcaaaaacatgctttgttccagttctgtttgggcatgctacagatgatgatttcattcggccccaccattcagatcgtatatttgatgcttatgttgtaagtttttttcttgatagtaagaaaagtataaaataatatgcatagaaaaatcaaagtatactttcttttgcatgcctttcatatcttgcaattttctagcctaattcttctaaaccaaacaaacctgaaatctcaaaattttctaccaatgaccttgtgtatcaagtcaaagaaactagcaaatttgcattttggtcgtctctgagcatacatattttgattgtcagcaataaaattagtagacttctgtttgttgatgcccactgtcggttatgattttggacatttttggtttggcattggatgttgtttggcttgtcattctatgaatatttttgcagggagacaaaaatattatcaaatttgagggagatcacaactctccaagacctcagttttactttgactctataaatatatttttccataatgtcttgcaacctcctgatgatgaggtgggggaagcattttttgactccatgcaggattactttggtaaggtaaataaaacaacatttaatatctgttttgacttccatattataatataatattatttagacagagggtagttaattgttgcaatttcaggttggttggagaatgacacctccagtagaccatggccatgacctcaaattttcaagtccatcatcaggcatggacataaaaacttgctgtctcttctactgattgcctgcaaatattattactatcttcaattggaacttcattattaaccttcaatttgttcattgcatgcagaaccaacaactggcagcacagaagacgccattgagaaacttcgttcaagaagacctatgagtcggacagaggttagtagtaattacttagtttgggatagctcagatgtcaaaatgtgacagatgaaaaaggtttggaaagcataccacttgacttcatgcagtgaagatatactcattattttcgtttttgctccttcctaggttccttcggatattc

SEQ ID NO: 36629 - DNA, 8379 bp, Cannabis sativa
  modified_base (6363)..(6363): a, c, t, g, unknown or other
aagtgttaccaaacgccacttaaactattccaaatttttcaaaaatctgcatgaacgataactatgacaaatattgacatggtgaaaaatattttggaatgtgatttcgggcgtggagatttactaagaagttgtaattagcattgttcgaaagagtttgctcttcaagcccttttcatccaagagaccatttttttcattttcttgtaatgattgtcttaggtagagagagaaagaggaatcactgtgaaagcccagacggcaaccatgttctacaaccaccattctagtcttggtgttggtagtgataataagctagaggaacaaagttttttgttgaatttgattgatacacctggtcatgtggactttagctatgaagtttcaaggtcattagcagcttgccaaggagcccttttggttgtagatgctgcacagggtgttcaagcacaaactgttgctaacttttatcttgcttttgaatctaacttaactataatacctgttataaacaagattgatcagccaactgctgatcctgaccgtgttatagctcaattaaagtccatgtttgatcttgaccctgctgatgctcttttaacatctgcgaaaactgggattggtcttgagcacatacttcctgcagtcattgagcgtataccacctcctcctggggtgcacaattcacctctacgaatgcttttgttggattcatattatgatgaatacaaaggagtaatatgccatgttgctgttgttgatggcgtgttacgaaaaggggacaagatttcttcagtatccactggccaatcttatgatattttggatgttgggatcatgcatcctgaactcacttctactggaatactacttactggacaagtgggttatgttgtgagtggcatgcgttcgaccaaagaggcacgaattggagacacccttcatcatagcaaaagtgttgttgagcctcttcctggtatatttagtcagtttctttttcttcatttttatcaaatgaaaaataattggatgttttgttaacagttcaatagtggtttaaaaatgatagggttcaagcctgtaagacatatggtattctctggtctttatcctgctgatggatcagattttgaggcgcttaaccatgcgatagagagattgacatgtaatgatgccagtgtttccattgctaaagagagtagtacagcactaggtttaggtttcaggtttggcaccaatagctcactattttactatattactatttataaatgatgttaatttaaacatcatttgttgtcttgttacatttacttcatatgggatatttttatcattcttatgtttatccacaggtgtggtttcctaggcttgcttcacatggatgtttttcatcagagacttgagcaggtatagaatattaagtattgatggagaaaatgccattcccaccttttttttttttttcaattttgcttttgcttttaatttctatcatctagtatcctacttagccatagccttttaaacaaaaaaatcaaaaggatggtgataataactgcaaacatcggcaatgataaacaaaaacctatttgcctggaaaaatagtgatcattgttattatatccatgtcccctttttcctgctatgtggcattgtgatcataatttctttttggtgatggctattcgcataaaattgtttcttcaattacacttttttggatttagaaatatttcgaatttaaatatgtttatttaaattttaggaatacggagctcatgttatttctacaattccaactgttccttacatttttgagtatgctgatgggaggtatgtaactaataatatattctttcttgtgcattttccactttcacatctctatcttagaatattttcttactcacaatatgtaccaaactttcttttggctcttgttgtagcaaaatttcggttcaaaatcctgccgcattgccctcaaatccaaagcaaagagtggttgcttcatgggaaccaacagttttagctacaatcattattcctagtgagtaagctctcatacacccttggcattagttttaattggctatacaaggcatttacttgtctgacttttttcgtttgccaacttgaaggtatgtggggccaattatcaccctttgctctgagcggagaggggagcagctggagtatacatttattgacaggttagttcttctgatattaaaaaggaaattattgtacaagttcagctgtcttaattcattccattgatattcctcatgtcataaatgaatgataaatagtggggacattgcagcattttatggtctttgtgttcaaaaagtttctcttgtatatatttatatattttagtagtgctaagtaaactctattcttttacactctccttattaatgcatgacatgtaaatattatgtaaatatcatacataatatagagatggtgtaaagtacagtctaatatagagtgcatttagcattcagtttctgtattatttgatttgaattaaagtaaatcttttttaaagatgcaatgaattttcgctgagctgaaggtgttatattaatcccccttctgtttatgtaaatgcagcctacgagttttcttgaaatatcgcttacctttgagggaaatcgttgttgacttttataatgaattgaagagtataacatcaggttatgcgtcatttgattacgaggactcggagtaagtgtctaactattctcaacacatctacctgcgcttcctgtcaagatcagatacagaggaacttttttacttcatatatttataatgttcacttgttatgtgtggtattaattgacagatatcagcagtctgacttggtgaaacttgatatcctgttaaatggtcaaccagttgatgcaatggcaagcattgtgcataatttaaaggcacaacgtgttggccgtgaacaggtggagaagctgaggaaattcatagacaggtaattttatctgtaattagaagttacatgttacttcttttgtcaatggtgtccttgctcaggatgttctattatgaacaggcaaatgtttgagataattatacaagctgccatcggatcaaaggttgttgcaagagaaacgtaagctcttcactttagaatgtttggtttcgattttgccctcaagttagaccattcagctacttatttctattcttttattaggatttctgctatgaggaaaaatgttcttgccaagtgttacggtggggatgttagtcggaaaaagaagctgttggagaagcaaaaggaaggaaagaaacgaatgaaacgtgttggttctgtcgatataccccaagaagcatttcatcaactgcttaaggtttcatagaaaggaatgcccaaaaaggaaacaaacagccatatctgcaagtagttacatgctacggtatgatgcttgatgatattttctaaaattttgtgaaaagatttcatgatgaggattttacaacagattagaagccatatagaacattttggagctattaaagaagcaaagaggggtgccttggctccaagaactcctagcatatgttgtcaacatacacttttcatttttgtccacacttttttcttttccagaccataacccatgaggattatgtgtacataaaattgtaactcaattttgttcaccagagaccaaatgttggaaaataaaaaaataaaaacagaattcttttatcaagcagttggtgatgggatttagcttttaaatttcagcaaatttgtagttatcaatttaccttttttattatttaataatgtgtcgttaatttttttttcttttagccattacaatagagagtaacacaacacaaaactgtcatgcaacacaagttgtcttatttacagattgtttgacaaaatttaaacaacctttttcttcattcatttaccatatttagtttcttaaattgataacgttgcttgaattttaataattttgttatgtaagatggtacactttaaaaagaaacgtcgaacttcaagcagagaaaaatttgtaaaaactagtaagaatatcaatattatatatgtatattatgtgataatataatgtggtagcgtttcaatactgttacatgaggaactatatatatatgagactactaacaattatgaagcagtgttgatacgctgccacaccatatacaaataccactatacgtacatattatatatatatttatgtaacaacattaatgctatattatgtaataaatctattaattcaagactaagcttaaaacttaaaagtttgaagatgacaatctgttgaagtagctagaagaaagtccttgaccattctgcagagtcaacggattatgtgaaacagccttactagtattattattagtatttgcagttgtagctgtagtagaagtattagtactaacatcacccaaagtcaaccgttgacttaacttctcaactccatcttgcttccggccaagatgggtttcaccacctccaaccatggacgagattgcagccgcaataaccgatttgaaagtgcttgggtcagaagttatagccttggtcaacgtttcagtcaacgtttcatgtgcagatgaaccttgattatgattattattattataactcactatcttttctgcacaacgttggtaaatgaattcttgggcctgtttattaccaccaagattcaaaggcccattattagtttgatgggctttgtcgtaatacattgggccgtaatttaagtagcccacattattaccccaaagtggtggttgtttgggctgagatgtgggcccaaaactatggagtgatgatgatcttgaatttgatgatggagcaaaagctgatgttgttgaagaggttaattgtggtgtggtgagatcaagtgtgatagttgggaacaaaggagataaactagtagaggaatagaattgttttgttcttagggtatgatcaaaataattgaagttgttattattttgtacaagcccatttatcatgttaaggggtgatgagtttttgttgggtgtgaaaaatggatggtcatgatgattagatgatgaggttgaagagccagataataacatagaggccgcggccgaagtggtggaagccatggccgtggccgtcaccggaagtgggtggttgtgactcccttcataggtggtgattagtatggacatgtcgtccgcacatctttgtacctgaacaattaattaataaatattaaatataagcacaaaattaattaattaaaaaaaaaataatcgaaagtataaacttcattacgaaatcaaatcgttttgtagtagaataaaagctcttaactaaatagtgagccacccaattcatagattgtttaacctgtaccttaaaaaatcatattaattggctaagttttcattttattttggtttttaataggtaaattgaacaaaatatattacaaaaatatgttatttttttttttaaaagaaaaaaagttattctatgaaaaaattgaagaaaatgttgaaaaaaataagaacatcaagtaaggataactaggtaattttatggtaaacagagtaattagatacttttttttgataattagagtaattagatacttgatactgtttttttcatattttatatatttttttctaaaactttcccataaaataatgttttttttttagaaaaaactgtgtttttccaaacttatacttcaaaaaccataaaaataaaaactaccctgaaaatatagctcaaaaaccaaaattataactagctaaagataagtaaaatatttgatttatgttttttatttgataactatattttaaaaatatgtttataatgaaaagttttaaagaattttatttttttggatatcattcaaaaaataatattttttgctagtaaattataaatttcatataaatgattgttttatccaaattaacaccccaatattaaaaaaaacatattgtacctgttttctaactgggcaggatggtgcaaccgtgcaacgatagtaagctcgtggacatggatttcctttagcaattttctgcccatatttcctccattgacatccatcgttcatctgttcaaaaatatcatcatcatattaattatctcttaatcatacatatattaaaactaattaataattaaataaatatatatatatacgtaccgttggagtatcacatcttgctctgacagaaactctagctcttttaacttgagcttgtgaaactacttcatcttgatcattattactactactagtacaagtactactcttaatcatcttattattattattattnttattattattattaatactatttggaattttgttattattatttgcttctaataataactctgaactattatctggggtggcctcattaatcacaatctccgaactcaattgctttaattgatcattatcattattagagcctaatccaagtgtgagatttgcctttatcaactcctcttgatattcttgatcttgatcttcatcatctctactttttctgatcagtaaattggttttagtaatattttttggactccttccaagcctaagagacacaagttgatcagcttcttcaatttcatcatcacaatttgtaataattgtaattggtttcttcaaatcttgatcatgatcatgatcatgatcaacttctttgactatgtcaaaaaatctcaattgaagagacttgtaatccttctccatgtgatttaacacagtttttagtctcttgttttcttctcttacttctcccatttcagtttttgtattttcaatttcacaatccttctttataaaacaaaacaaacaaacaaaacaaaaaaaaaaaattatatgattaattagtaaacaaaattataaaaattaccaaagataaaccagcaaaaaaattgaaaataaaacccctttttgaagtagtgattataacaaaaagatcaatttaaatcctatgattagttaatgaaattataaaaactatcgaagttaaatcaaagaaaaaaccgaaaataaaacccctttttgaagtagtgattattgtaatagagagattatatcaaaatcctattggtaaacaaaattatgttaaaaaaaaatacctttgttgagactagattattggtttgaagatgttgatcatgtgaagaactataagagtttggcatctttgaagtaagatcctaatataataacacacacaccaaacccaactctttggaaagagctatataagctatatattacaacaaattatgggaacgatattatctcattattaatttaattgcctctatatagtagtacctatataataccagttttcttttctttgttattattataacaaaaataaaagcactactttcagactttgttataaacaaatacacaaattcaataaatcaaagaatcgattgcccatattacgcaggcaaccaaaaatgtcaactctctctaataatctataaaaacatgcatatatatatatatacacactcttattatataattaattatatatacatgagagtactattctattacaactatgattaaattatggttttggaaaagttcaatttcaacgttttcccagctagactacgaacaagtagtttgcttacatattgagttgtatttttcagcttcattattttcatataatatatataaatatatatatatatatatatagtaccatatctttgaagcttcgtacaaagaaaaaacgtcacgtggttaacagtcaactattgtatacaaatattatggtggcccaattgggttttataggattgttattatagctagctaggtatattattaatcttcaacaaaatttataataattattaaattaaaatttgtaagattaagatccaaactagtctattaatattactttgaacatattaaaattcatctaatttaattataaaaatttggatatttaattaatcacagttaaattaaattggatgtaaatagttagattctaattattagattgtatccgttgttgggtaatatttttaaaatttaataaaaaaacttattaatccaattacatctaatacatgtattgaaaccatttttttattagttataataaaaaaaatattttgtagtttttatgcatatttttttagttaatattaattggacaaaattttttgaatcaaactttacaagtttgggagaatttttaacaacagaaaatattcaaaattatgatttaagcaaaaaatttaaattacttttaaattttttataaacctctttaaattattcacgtata

SEQ ID NO: 36630 - DNA, 5814 bp, Cannabis sativa
attattagtaactataatacatgaaaaaaaaaacttaataaattaatatatatatatgtatagcggtcggcttcatttttttggttggtttactacaaaaaaattgaccgttcaatggcggtttaaaccgttagcggatttttcagttttcggtttcatcggtttcggttctaacggtgttcggtaggtcggtttgaacggtttttcgattttctgaattttatgctcacccttagagtgggccattcagaagttgaattgtatgtttgagagtgaaactacttcagctattctgaaagggggtagagcccctaatcaagagaaagataaataggtctggacaaaagagttcaacaggaaattctcttacaaatcgacttatcttactcaagccttacgtagagttcttccttgtgaggttgtcccatccatgtggaataagctttataatagtaaaatcctggagaggtataagaccctttgttggtgcatcttgtcaaaagcccctccaaccatggctattctttgtaagagacttaatgttgaggatgttaattgccctttatgtggagtggaggaagaatctttggagcacctgtttctcaaatgcgatctgcattccatttgtggagatcttctctgtggggtatctttccaatgtgtaattctagctttcgtatgtgagacggggtcaagtttatttagagtctgaataataggggcattaatgttgacgaagtctttatctatgcttctattgttgttgatactatttggcgagcccgaaatgaaaaggtacataatcataaactttttaatttgaaccaatatcttaactctatttgttactcttatgcagacttgagagtgattcttatccttgctccctctcctgttcgtgaggaggtctggcgttctcttcctcaggattggatcaaactgaacgacgatgttaaagtgggatttgaaagctcatgtatagctgttgttgctagaaatcacttgggtgaggtgatcggggttagcacggcagatttagttttttcggatgtactctgtggagaggcggcaacgtgttgctttgcaatcaagttggcaaaatccaaatattacaagttcatcattgtgaaaagtgactcaaggatagtgatcagattgaaaactactcgtctttttgctttaagctttctacttcttttgatggttgtatttttttttttatattttcagaacttataattttgcagtgcataatatagttaagtgggcatttacttacgaacaatttagtattttgcctgtagcgattattccaacaaatttattttgtgatgactatgtggtctaatttatatgcaatgaacatttcaattcaaaaaaaaatcaacttctaagatgcctctttacccttttcatgcaccattctagaatccccatatgacaaaatttctacactttcactttcatgcaagataaaaaagaaaagatcttaaatatgagaaagagagagacaattacatatgaagcaaacaaacaagcaccatttgattattttacttactgacatacaagacagcctagagtaaaaattgttgtgagtgttgattcataattttacttttgatttcaactttcacttccttttacaacacaaaccaaacctgaaccaacatttagtgtaactgctaaaaatgattattatctttagtataaatcgaagttttgttttttctaattattattactataaataaagtgatattcttattaaaatttaaaatttaataatcactcagtcttccagtatttttaaaaaagagagtttaataaataaatttatattttcttgaaaaattatttagagtaattatatttttaaatagtttaatattttaatacaatttaactttctagctatgtgggatacaaatgatatagctatatatatatctatatatatatataaataaatatcatcctaagtaatgcaattaccacaattgatgatatatttgttttttattgtagactggttttggttggtcaaattgagtggtattggctttgttggaagagtttgggtggcctgaagatataaccatcaactgttgttaatttaatttcttacaaattaaacattacaaaataaacaaaatgagtcttcatcaagcactttttatatttgttatttttatccagtttttaaaattgagatgtcagtatttgtggaaattcatctttaattgtgtattcaaattagaaaatagttacaagttacaaccatgattaatgacaaataaaaataaacgacaaacaaaaatatgagagaacgacaataaatgataaaaacgacaataaatgaataagtattttttttaggggtgaaaaacaattaaaaatgtgaaaaacgacagcaattcaaaaaaaaaaaagagtaaagaacgacatttttaaaaaaagaacaccaaactactcaattttgaaaacgacataaaaatactaaaacgacaataaaggatacaaacggacatgagtatgaaaaacgacagtaaatgtaaaaaaaaataaaaaagaaagaaagaaggtgaaaacgacaaataaaaaaattacatcaaacgactgaaattggaaaacgacaatgaatggataagaaaaacgacataaaaatgaataaacgacaataagtaataagagaaaatttggaaaacgacaacaaatcattaaaatgacgctaatttataaaaacaatataaaccgagtaaaacgacaatatgtaagagaaatactgaaaaacgttaaaggacatatgtgataatttcttatattataaaggtcaaaaagtgaaataaatatataataaagggccaaaattgaaattaaaacaaaaacaaaaagatttggggccaaaaaaaaaaaaagagagagaaagagaagagagaagaatcaatggcggggagagagagagcagtggcgactctgccgaaactgataaggagtttgagaaatcagccaccgaagcctaaggtttcaatgcccataactcaccaaccacacaatcaaatgcttccttctctaaggcgagctttttccctctacgatcagatcaatatcatcgacaacgttccagaagaccagcttcgttttcaaaggtattgttattagcttaattgttcccattctaactcaatttgattcagtttagctgaaatttgtcttctttataggtatacggatactgggtttactgtcaatggtgttgactatgaaggtagcttgctttctgttggtaatttgctcatgtcttggtcacccaaagatttatcccaaatcactcctgacaggtactttttttgtatattctatatatatatatatatatatgtatgtgtgtatgattttgtggttgaagtgtttgaaacttaatgttgttattcttgtcagttggaaagaaagattgtgcttttttgaagataacttggattattggtttactcattaggattggtatatcagatattttttgttgggttttgacatagctatagaaaaagacttgctttttaggaaatggtgagtagattgatgtgaattttctgatttattggtttttatagtggtattaaagatggactatatggtttgttgaagctgtgtagaaattcagagctagttttataatgctgttgatgatgtgaaatgtctgtttgggtctgtgagtttaagtaattgattgattggaaacctcttggatagaatagattaccctttataggacaatggaaacttcggtttcaaatggttatttttcaaagtgatttttaagagagatttcaggtttctggaattatgattagattgtcgaaaagcatctaggtgctgtttaatgcactagatagctgtgtttcttggtttccacatcaaataatgcacttcttgaggaagaaatttgagctggggtagtgagaaaatttggtgggaaggattaaattgttgttaggacttataaattagtaaggtggaggggggaatgttaaaatgtggttgtcaaaggggcaaatttgaggaactgtgagtaattagtacagacatttgatctcataggccttttatttcctattgtacttaacaatgtactaatttggaggaatcattggtgctggactggctggactagcagcagcaacccgacccttgtcatttggattcaaggttatcaaaagatgagacaggaaggtaaatatgttgctgtggagcttggtgacagtcttattactggtatccatgctataagcctcttggagttaaagctaggcaacttaccatttacttcataaagcaagagataattgtcccttgtacaagcatgatgggtcacctaggccgttgattaagatctggactacaaaattgaaattatcttttttttaagttgcttaagaagctcgtggaaatgagactttttatggtagacttattagtttggagagataacagaagttgtaaactgtaggtagaaaggagagttaacatcttgattctccccatgcgaattcggaatatgcaaatgctgaatgttttgcagactttttggtctcctattggatcagaatgacccttctgaaatgggtggtgaccatttcttatttattggagattgataaaagcattggaagggattctcatattctatgggaaaaattgtcaatacttgatgaccaactagtgagacatctttgatatctgattaaaactttacatagttcgaattcaaacatgtactattatcttattttaggtggtaaagaatgattctgaacaagattcttaaaataattattggtagctattatgtgttgtgttcggattgtctcgtgtttttctgagatggcttgtccttctctacctgtgttatgttgttatctgatgttttgttttatcttatgatgcagtctttccatcttcaaaattgtgcgtcctataccaggtacaactttatgttaagaacccgatttgtctttaccatatgtaattgtgtcattatcaaccttctattggcttctgacatttctattaacctttcctctttgacaatttatagagattttgattctcggttgtgggaggaacattgtaccagtagatcctgaactaaagcgcttcatacgatcaacaggaatgaaattggaagttcttgattcagtaagtttgctactatatgaactctttaaccataaaaagttggattgtagttggtgagtattcatgttcattccttagataatatataggattgacatcaagtgaaattcttaacaacaccgaaagagcgataagctcgaatggttaggcacgatgatacggttcgctcccacaaagtctgagcttcgagtttttctaacgatatccatttacttttgtttcagagaaacgctatttcgacttacaatatactgaacgaggaaggtaggattgtggctgctgcactcataccctatggagtttcttcatgaagcattgaattttgtttctcttaccttattccaaaggttcaatctttgtaataatctgatttttgagtagtttaaacttttttgtttgaatgctaacttggcattactctactcggctgtgatgtatgaaatcggattttgagtatgttcatatttctagttctaccaaatgctttcattctatttatttttaaaatcaaatgatgggcggttcattgaagccttcacggtcctcttggaggggtgcgtggacccggtcatagctgaagttgtgggggttaaggaggctctgagttggataaag

SEQ ID NO: 36631 - DNA, 5338 bp, Cannabis sativa
  modified_base (3371)..(3386): a, c, t, g, unknown or other
agacttagacgttatttataaaagtgattagtaacaatgcaatagagaatgccgccatgaaatgccccaatatgattatgatacaatgccaggtcattgcttcctgtactcaacctatgacattgcttctgtcatttgactttaagtcggccaagcaaagcaatagtacaattatacattagtttatttcgcatccttatgcaatatatgttatattctcatttctcaacctaccatgcaatttaatttttatatggcaaagtaattaatatacgaatgtcttcaatgatttatgttagagatattcaaaaatagtaatagtgtctaccacttaaatattattttattagtataattaaatataaaattctacataatttaatttaataattattataaaatataatcaattatttaataactctactttcttcccatcatatatattccttgtaatttgtttgaatattattcaagctttttaaaataatactaatataatgtaatttttccttttttttttttttataatttaaactttaggcaaaaataaaaattaaaatccaagtaaaaaataaaattgttgggagttgacttctaaacttcttagtgattactttaattaaattatcattgagctacaatatatatttaacattgtaagtattatttttatttaattactaactttattttaaatttttttcgaaatagagtcttgagtggtagaagacctaaagtagccgcctcattcatctcaccttagggccgactctagagttgacttcatataaataaagatgtaactcaatagagaacatgaaaccgtatataaggtttaaattagttattttattttgggttgtcttgagtaaattaaaaaaaaaaaaaaagcttagaaataaatagataataatgtaaatgaattaatgagctatcatgggatggttcttttggatgatgacgtaggtaataggttgcgtggttaagtatgaacaagatctgatctattggtataaaagtggcttaaaagcgcgatagagatggtgaaagccccctaaaatccaaacaactaacatcaagtggatcatataaatatatatggcttattataatactcataaataaatatatatttaatgtaaattaattctattataaaaatacagagaattattctacatattatttttaatttatattttgggttacatagttgttttggtggtttatatgtaatttgctttatgaattttaattactattcagcttattcggttaattgttaatataaatttacgtaaaatatataataaaaattattttaaaatgtaaaaataaaaaaaattctaaaaataattatatcatttttctgtttacgtacttgcattatatttgtccaattatattatttcatgtaaaatgtttggataatgtcgacgatttcgtgtaataattcaagtatatcttttttttttttcaaaaggaaagaaatgttatcatctagtcatttacaataacaatttgattaattaggcattttgtcctttaaattttaacatgtattaaatttatttttaaatttttaaaattgttaaaaatctctcttaaactattgagattgttagatttaagaatttttatctatttttaatgaaaaaagtctaacatggatcaaagtttggaaaatatgatttagtacataacattaccgaattagtaaaattgaataaaattgaacaaaaattcttaaatttaacaatctcaatagtttagtagaaatttttaactaccaaaaaagcttagagcataatttagtacatgtcaaagtttaaagagcaaaaatcttaagtaatcaaataatttagagaaacttacaaaaatactgaaatttggattcacttttacaaaaatattgccacactgaatttttttttttaaatatatatttttttataaaataacagtagaacataaaatagaacaacttaaaacaacagtagaataatagaagaaacttaacacaatacacaatatgaaaaatataccgtaaggtaaaaatccaataatttaagcaccttaaagttaattttttttttctttttcttttaatgaaagaaaggattaaacaatttaataaacaaattatatttttaaattaatattgatggcaatttaaactaaaaccaatctcaagatggaaaaaatcaaggtccaaattttacatatccttttaaaaagaaaaacatatataattttaatcaaatatatttattttctatcaacttcatcaacccctactccacacgcacggcaccgcgttttatcacaattgaacgcggtggtggctagtctttatcatccaatactataatttaataattcaaaaatatcaaaactatctttcaatctttaccataaccactaaaaccattgaatatagtatagagatatatttatattttaaatcgtttctttttcatttgagaaacaaaattgttcgaggagtgatactagtgataccataaagttgttacaattttttaaagcatcttcaatgccagttaactataataataatcttgctacatatacaatatacaatgcagtttaattttcaaaaataattttatataaaatgttacttaatatagacaatagttacataatatttttttttttaatttttttattataaaaaagttatttttacctaaaaaatcattaatttaatgtgatataagaccatagtagacaacttttagatttatgagctattgaatattcttttaagagaagatgataaatcttctatggatgagagagaaaacaaaataaaaaaaaaaacaatattttagaatgatttgtgtattttgacaactatatgtgttgcgtccattggagatactcttagtcaacctttgtactcgaaaacacatgttgattttttatttttcaaatttttttatgacagtgttcgttgtagtttccacatcatttctataaatttttgaaaattttgttatagttttttgaacacgtatcacgaactctctttttggtactattcaaaatttttcaaaaaatttaatattctaaaatgtgttatcggacacagagattgactaagaagttataattattactcctcaaattattattattttttggataaatgataaaagagatcacgtggtgcaaattcttttcccatctcatgctggccctaagcatagacaggctaggcccgcgcctagggcccactcattttaggggccaaataaaaaataccttttaaaaatatacatattttttaataatttttaaaataacattcatctttatagtaagggctaatttttttttttttnnnnnnnnnnnnnnnncatttcaactcagggccagccctgcccactcctttagtcattttgacaatcttagggaacacatgtcagctataggtagggatgcacattttcctatggggataggccccgcggggacccgcccctaatggggcagggttatctcgtctaaatgggaaacagcgtggagacgaggattaccttttgtccccgaatattaaatgggacgggaacgaggacgaggatcacactctccgcttcgatgggattcgtttagtattttagtttataattctaataatattttataatttaagtttgtatttttttaatatattagtatcatttttatgaattttaaataattattaatttattaaataataattaatatataatatattaatttttatgtagtttaatatttttatatatttaaatttttattataaattttttttattagaaaatttttcgccctatttggaaatttccaatctcatctttgatgagaaataataagtggattaaaatttttaacaagacaaagacgagagagcactccccgccaatttcctgctaggtgtgctaggtgtgcatccttaagtataggaaccttaacatccctttttttttttttgaaaatggaaccttaacatcccttaattggatactaagttggtttttaacatggaaaattttgtgaaaaaaaacaagaatgaaaggctgaaaataccgagacataaaaaaaaagtaaaacaagttagaaaaatgagacgttggttgatgtgtgtgtggaatgacgagattaccctctacgatttaaaagagacaattcaactgtagggggaagcagagaaagacaggtttttgtcagtagagagagagagaaggcaatgagacgaagaagaaagctgctgctcaatgctcaatatcacacacacacacactatagatctctctttctctctctaccaccacacgaggccttcttcttcttcttcttctctttctccctttctctctttctctgtgttattatataatctcagtcagtgaaccactttttctctcttcctttctttctttgtttctctttctatgcttattattattattatattatatataaagagttataatagctggcggagctgagttactgagtcaactcgaccgagttatgggctgttgtgcatcttctgccttcaaaggactcaactctggatttaaaactcagcaggggcagaataacaatccaatccaacctcattcccccaacggaactgactcttctaccactgccactgccattgctactaccactacagccgtcgccggaaccggtggtgtgtcggtcttctcggagttctcgctcgctgacttaaaagctgccaccagcaacttcagctccgaattcatcgtttccgagagcggtgagaaagcccccaatgtcgtttataaaggccgccttcagaaccagaacaatcgtagatggatcgccattaagaaatttaccaagctcgcctggcccgatccccagcaatttgctgtactcactcactcactcactcactcactctcattcttgttgcttaactttttgatttttcttttagggttttgattttgttggcctcttgattggtgtttgttttcttttcttttttcgattttgactgttttaggaggaagctaagggcgttggaaagcttagacacaaaaggcttgcgaatttgattgggtattgctgcgatggcgatgagaggctgcttgttgccgagtacatgcctaacgatacccttgcgaagcatctcttccattgtatgttttgagatttatttttgggtatttctgttggttttcaagtgcatttctggctttgtgaagtgacaaatagggaaatgttgcatttgaatacgaaagcacattaaatagagactctcgccgtcaagccactaaggctagcttag

SEQ ID NO: 36632 - DNA, 7516 bp, Cannabis sativa
  modified_base (6509)..(6511): a, c, t, g, unknown or other
ttaaaatatagtgtaattactaagctgtgtaattaccaccctaataattaccttacttagtaattacacagttacttccaaacacataggcacaatggtacacctctagaaaataagtctttttgaaaaataataaatttaaatactcaaaaataaaaagtcaatcatgagaatttaaataaaaaaattctatatttatttaaccaataaaacaatttaaaaaactttttacaccaaaacaaggtctcatccttatttacaaaataaagtacatatttaattttatcatcttttctaaatatgccaactaaaaactttacatatgttttgataacacatttccaatcttattaaaggcattttttcttgtagttagtcatgaaaagaggcataaagcattaagacattaagacatattcattaagttattgaagtcattcatgtagttcagagaaaaacctggtaacaaatactggttattagaaaattggggattgttagcaagttgtacatgattgtgtattcttctcccatatgatgtaattacggatcgttactgaacatccagaacttgtactcgaacctgttgtgtaaaactagaaagagttagagagataactataaacttaatttaggccaattaaatataaaagaaaagttagaatttcaagcatactatcaccatcccaacttgggagaaaaacagaactaaacctgtaaaagagtagaaatagaaaagatcatttcaaacactgaatgtaccttggatttccattgctaagcattgtttgaccacacttacgccatcaatgactatcttttaggatattcagttggcaaaagtatatttgatcctccagcagccatcaaggacaaagctgttgtttcagttgagttgttcaatttgttactgtgaaagaggaaaaaacaaagcagaacataattatgtaccatgcaaatacagctttctttctgcttctaagtaaaatataccttctttctgcttaagatttttcacaatcttcatctaacacaaatgatttgtgtcactcaatatttgaagttgatgccatatatgtcctttttacagattttctacggttgtagtcaaaacaaaaattttaaaaaaatcggagggagaagaagctggaaagtctggcaagaaagacccaacagaagtaccaacaacatgttgagtctcagcgcggttaggatcatacttaccaatactgtcttgttgagggccaataatggggttaggatttagtccatacaagtgagaattactcaagggaaaataatggtgttaggatttagtccataaaagtgagaattagtcaagggaagtgaacctgaaaagtcttgcctcgaagagtctaaagaagtactgctttgttgagttgcaaatgtagatccataagccataaggcataacagatttttcactattgtagtcaaaaccaaaatttggaaaactggagggaaaagaagctggaaagtccagcaagaaagacccaatagaagtataactaatgaaaccctataaaggaaataaaccttcgatttgtatttcctttgacagcttttttaccatactttcgccagcggtaaccaccatcaagtatgtctaaatcagtttcaatttggataacaatttttggctcacgaacagccgttgaaggcaaagctgttgtttggatcatacctcctccacttacatcaagcatttattcgtcaaatgaaagcagcttctgatgatgatgatgatgatgatccaagacctgctatacagtttggaagcggttttgcatgattatgattactctcttaagtaatttcttttatttgacaatcatatgatacttccactcttctcttcacagttttgatgagtgcattaacaataactcctctgatattcactaccctttacctgtttttgtccatattttctacaattgtatccatcttctgaagttctagccccaactgagcagttcaatttcttcatgtgaatgagagaggaacaatgcagaatataattatctacaatgaaaatattaccttctttccgcttcagatttttcatcaaacccaagtgagttttttccctcaatatctgaagatgatgccatttttgtcttttcttgtaaacactggtcttgattttgtgattcgaacaaaacttcagagcattccaaacatctctggcactttcattacccgccatttgagcttcagctctccggtcatggaggataacagtaaattcagaagctggttgtcctgttccaagttcaagaatttttggttgatattttccaagaaattcatcttcattattcagaagggttctttgggggtagctgtgcttggaccaaataggtacttctcaagctcgtaacaatgcacaatttctagaatctttttctgccatgaaagaaagttcgaagaattgagcttgacatcaagctcttaaggaaagttttcctccattaaagaccttcagcagcttgtcaatgatcacggcacttcacagccctgataaaataaatgaacgagagaaattttagagaatgaatgatcttcaaaatgtattaatgaaaacatgagtgtgttaaagagttacaagttgtcaaaaaagtacttaggtaagtaacgaaataccttaactgaaatatattccacttgtcttgtccaaatctgtaagaattttcttttttgcttgaaattcaagaaagtgacttgactaacccaaaaacacaaaattcccacaagtatttttttttcattcgctctattaaccttaacaagtgaataaataaatgtaaaaagaaatgtacctgtttaaggggagaagaacaagatgtcaaaagaaaaatgtatctttatttatgtcacatgtaaaacaaaacctggtctgccaaagcgcaaagtaaaattgtagagttgagcccaaaattgctatataataatagctcataaaataaaggcttttcgaccagtttttaatgtaatttgtaagcagaaaacgaaaccgaacacagtaaattgctaccatccaaacgccaccacccatgttccatttggtgaattttgaagctccaagaagaaattagaaattcaccggtagacttgacccgaaatcgtatatatttgccttgcctcatttacaaacttcttggagatggagaaaaagaaaaaaaagaaaactactaaaatcttccaacgatccggtcgtatgatgatgatgatgatgttgtattagcatcataaatgatttcatcgtcatttcgttcttgtttaggttgaataaaccttgtgccattttcatgaactgttgcagcaacaacagattttccactgttgtagtcaaaaccaatatttggaaaactgatgggaaaagacgccggaaagtctggcaagaaagacccaacagaagtaccaacaacatgttcagttgcagggcggctaggatttagtccataagtcatgggattttgtaaaggaatgttcatttggtaaaaggaagaaggtccatatctgaaatcactagtactgaaattcccaggaaaatttggcctcaaaaaatcattattacaaaattctggttttctgtcaaacaaaggcgtaagaccatgaatttgtgtttcaacttttggaatgttggtgtttcttgggtgagaattgataggagtttgtgttataggttgtggattattaggtccagctgagttgatatggttattgctgtttctagcagcaggcacatcatggttgtgttttccctcatatgttgtaataatagcttttagatcgcctgaggctctctccacatgcttccttactatacatccagcacttgtgcatttgtagtagctcctgtgggagtgaaactatattcttatacaaataatttactgggctctataaagtataaagaaaattaagttcttttttatataaagaaaagtacattgaaaacctgtaaaggaagtacaccttggatttggatttcctttaacaactttttgaccatacttacgccaccggtaaccatcttcaagtatgtctgcagcagtttctatttggataacaatttttggctctcgaacagcccttgaaggcaaagctgttgtctcaattgatgagcagttcaatttcttcctgtgataaagaaatacaattatgtgtaggtattttttaccaataccacggtagtccaaacagttaccaactctaacgagactccatatatcttaggtaaaatagtaacttttgttcatctcctctgttttaacaaaagtaattgtacaattatattaaagtaattataaaataaaaagatagctgtccaatatattaaaaaaattataacgtaaaaaagtttattgtccaatatattaatagtgtttcttttcgttctaataatatgaaaatatttgtaaaagaaaaaagaaaaaaaaacagaagctccccacatatactacactttgttaagcagtcacttttagtgagcttactactaccttctttttgcttcaggttcttcatcatcaagtccgtcacccctaagcaacatgttccccttttcatcatcatgactagaagaaactgtagttgaaacctcaggagtattttctcccaattcaatggattttccatgcatacttgataaaggaccattagaaagttcatttggtgttcctgtaatttcattggtaccatcatgatgattgttcttcctatccaaagatgatccaccttcaactttaaccgaaatcccagttcctccacttagttcaagcatttcatcaaaaaacaatgctgctgctgatgatccaactcctgctctacggtttggctgaggttttgcatgattatgattactcttataaatgatttctgttatttgaccatcatgtgatctttccactttcttcttcacctgacaatttggatgtgtacatttataataactcctgggatattcactaccctttacctgtttttgtccatattttctccaattgtatccatcttctgaagttctcaccccaactgaggggtaatagtcgacctggtttctttctgatattgatgaggtggtggtgtattcttctgtcatatcatttttaataacatttgatgaatcgatagagtttttggtgacagcttccacttcaatgctctcaaaagcatcattagactgagaatattcaaaaaaaaaaaaaatggataacaaatgacttttgtattgtatgtacatgtttggattgaaatttaaatttaggttgtttgagagcacatcacactacaagaatcattttttttaatttgttaataactttgcaatagtcttccccttttacctttctctctctacatctcaccctagtttgcttccgccggcgtcttctgttctccgatgttgttcgttttccttgggtgaattcacacttgctttcgcttctgaaccctagtaagattcattccttttaatattcttgtatatcttttgaatgtcttaattttatttcataaaatttgttctaggtatatcgtttgaggtagaacgaaatattgaatcaaaaaagtagaagagaaaggcagtgacttcaatatatatatttttgtattcgtgcatgcaatgcaaagtatgctcatatgtttttctgatccaatttttcatttcaagttagtgttagattttgcctctatgactaacatttctctcttcccaaccttttcaggtttggtcctttcgatctctttcacattctatttgcgttctgtataggtttttttaattcatttctttaattattttgagaatttggtatgtgatattcttgttttgtgccactggtaaagggctttagggattcaaatgctttagtatactcatctaattttctatgaccaaaaaacagagcacaaggtccttgcataagttggaaagtggtgaggaagtcaatcaggtttggtttcttaatttaataagtgattttgttgggtttgaatggtgaatgaggtttagaaagcatctttggacattctgatgaatatatactaataaatttttatatgcaattaatgtaggaaatgagaacatcagctggtttttgcatcagtagatggttagctgtttacttatccaaggtataaatttatactctattcattaagaattgaattgttgaatattattagttcgggtcagtttctgatttgaaaaaaaagatttattcagggagcaatgtttcttgacatgggaagactattcacatgctatgctatgacattggaattctctgtttatgtggtagcttctctgaataccacttaactgttttaataaatttttaagaataaaatatattccaatttaataagattagtaatgtgaaaaaatgaacaggtccctgacggatacagaatttttactttgtggaggcttatttattattaaaaaatatttatacttatattataatcactcttactannnttatttaattttgtgagggtttttctactattttagtctataattatcaaatttaaaaattacatttaattttttaaaaggcaatatttttgttagtggggctatagcccccatatcaacactactagatccgtccctggctgagatgtcacccaagcatctccatggaggtcttatacaaaacttaattaggtacggtaagagattaatttcatcttaattctgtatgagatgatccatagacatctactctgtattcaattttattatagtatgccatatgcattataataaaactctttccttcctttttgtgttgaatggtgataattcatattgtttgatgttgtagtatccttgaggcttaagcagtactataagatggattctaattttttcttttaattggatgtgaaaaattacagtgattagttgcttctaaacatctttgtatgatgatatttatggtccaaagatggcctttatcatgagaagggctgacgaccaggttctactgccagagaacttctaaggctcaatgctatgataagtacatttagattggcacatctatgcttcaagtcaattataagatgcaagaatgtaattattttgcattcctctaatctattttctatcatgtctactttcattatgttttcaggtttgcaaaatgaaggtttgtctttgtattattttgttcatattagaaataaacattgaagaattttgttttattgaatgagtagtatatgtacaagtttatagcaagaaaaatcaactaagtacacacttgtgctacttaatgatcaagggaacttactattttaattattcctttcattctttctttctaatgtcctgccacttttgtttttcactgttgtagtagtatgagttctgatttcagatgtttggattgagaaagtatggagcagggagacaaatgtggtagatgatacaaggtataacattgctctatttactttatatgttttattaata

SEQ ID NO: 36633 - DNA, 3592 bp, Cannabis sativa
  modified_base (1898)..(1898): a, c, t, g, unknown or other
  modified_base (1928)..(1928): a, c, t, g, unknown or other
ttttacaaaataaccgtaaaacaacaaagtagaacactcgaaaaattctgtcaatagtaagaaagtaaaaagttaaaaatttcatgtggtgtaaaaatcctttttaaatctcttttttttttaagaaaaaaatgtattctctcttgttaaacaacataaaagaaaaaaaatgctcataatcgaaatataattatttatacagattcttaaactttacaatatattttttaagtctgtatttgatagagattccgatgaatgatttgtcatgttctcattgtaatggagaggaaaagacatctttgaacaccctttttataaaggtctcatactaattataattagaggtgtttaaacaaatttataaattgtccaacctaaataaatgtccataccaacccgacaaaaaatataactgaataacttaactaaaaattcaaaccacctaataaatataataaacgagttaaatattattttaatctgatcaaataactcgaataaactcatttatacatttttactaaaattatgtataatataatatataaattacgtttaatagttaaagtatattttacatttaaagttttgtattttatagtgtttaatttgaaatttggattttatagtgtttaattttgattgtatttgaatattgaagttaaaatttagaatttacacataaatatgcttttttcttaaattttttaaagaatattgttgaatactttaatgtttattcaatttatttgaaaaccaaaaactactattaaaaactactaaaaataaaaaaataaataaaaaataaagatcagtttggacgggttaaactctttttatatttttattcgacgggttacaattagatatttgtaactcaatatttatattgggttggtaaaatacaatataatctgaccaaatcgaccgacatacacctttataaattagagaaaataactctcgttgttgggattgggtgagatttatttggaatctcatttagtatgggatgaatgaaaaagtaatttttttgtatgcgtctattattgtggatattatttggagagtcaagaatgataagatccacaataacgtttcacctactattccccatcgtcagaagggagtcaatgataattgttgcgatagctagaaaccaaacttacaaaacttttgtggattgaagccaaaaagctccattcttagaagcccattgtgggggaagcaactgcatgtgggatgaagatggagcaggtaataggcggggagtgctccacccattctcgtttattattttaatacccatccccacctcaattcttgttaattattttaatacctatccttaacccactttgcatattttccatcgaaattcgggcgaggaatctccattaaggtgggttatccccttttaagtaggaaattctctctccattagaggtgggtacctgcaagccctgtacccaagggtaagattttcatccacagctgcatgttgtctcgctatcaaaaatgtgaaacttatgttattgtggaagtgattcacaatcaattcatgatgctcttatagacattgaacctaggtggtgtattgctaattatatttatactaatgattgtaagagactttcttctgtaggagtgtaaatggatcggatcggatctaatccaactatgatttaacctgatccagattatgtaaggatccgccatgtcttgccttcctagatcagatacttagattagattggatcagatctgacctgacttatttaaatcatctaatttgatatgttctgactcgaccttttttttttaagaattttaattttatatctaaactttcatttttatattcattttaattttttattagtattatttaatanaatactatgtttggtattaacttgtattantttggtattaacttgtattaataaattgagtccaagactgggtctcgggtctaagtccagatcccagttttgagcctggggccaagtctcaagtcccgagtctgagtctggtctcaggtctaggtctgatctcgggtctaggttcgggtcttgtcctaggtcagggtcctgagtttgggtctgggtctaggtccgtgtgtccaggtctaggtgcgggtctggtcccgggttcacgtttaggtctcgaaacccaattatgggtccggtcttgggtttgggtcagggttcgagcttgggtcccgagcttgggtctcgggttcgggtcttgggtctcagggggtctgggttcgggtctagagtcagagtcttgcattaagttctttttttaaaatattgaaatcggatcggatcatattcgatccgaaaaaaaaattaggtgaggaggagcaaatctgatctgaaattcaataagtatctgaatgtttcgaatcaaaagtgacccgttggatcaaagctccacccgctctaactaaatggatccttttgacatgcttacttttgggatgtaatttctcttgaatttctagagatcattaattaactttattgccaataatgttgtcaaatgggcattggcattcaacaattctaaaactattgagggctccttagttaatgaccttatggtcttttatcttttagttataactaatttttcctcaaaaaaaaaaaaagttagtccttaaatttttaacttattcgtgtggggaaggatggagccaactgcaagtaaaaggcaacttcaatttaatcttaatgaaatcaaagctgaatgagaattagtccattattatttgttataacataaataataaattttatttgtagcaaaattaagaaattaatttttgagatttaaatccacacgtgtgaggcttagccctatatgtgtaggtgtcatataaaagcctttaatttttatttgattattttttataatatatattaaattaaaaagtaataattatcttttattatttggattaaatatattataggataatgtatttaaattaaaaataatataaaataaaagggtataattgaattttgttattcagttatatgatatttattttaaattttaaataaaaatataatattatctttttattttataggattaaaaagagttttaaatattataattttaaaacaataaatagtgatatataaaaaagaggatgggactacagtttaacacacaaatatgacttctagtacggtagttgtaatatagattaggtggttgatttcacacggagttactttgaactttaacaaacatgctatttttctttcttttcttttcaactttgcttcttcctctttatttcaacagaaatgcactttaactcttacaagtaaatcataaattaaatcaaaatcaaatatttttatttataaaatatattacaataatctcatgaaaatataaactaaaactcaatttattttatcatttgaaataaataaaaatatatttttaaccactaatcaactgcaactgagaaataaaacaaaattgaaattgaaatttaatctctctctctctctcacacacacacacgcatctctctcttctacctcacgcctctctctct

SEQ ID NO: 36634 - DNA, 5957 bp, Cannabis sativa
tcaatacaaattttctcttcaataagcaattgtcttcgaggagggcccaacagcaatggaactaataatttcagcttgtctttcttcacatttgccttgtaacattaccagaaggcaaatgtcaataccccactagaagttgtggctgggctgaagttctaggaaaaacacatgacatgacgaattaaaaggaaggagacaataatcaataaaacaaaacataattttcgattctgtttcactaattaaactcatccactaaagataacaaaacctcaaatatattgtctatttctgaaccttctttgaggattcttggaattttaatttgcatgagcttgaaaattacataattttagaattaaaaataatgataatattgagtgattccacacgtggggttgaaaatgagtgtcagcatttgttcacaccggtatcaacgcaacactacttcatttgtcaatctatataagaaagtcataactagagacatagcaccaaaagaagaaagataacaaaaagagagtagtgaatctcaaagctttttatgacaatgaatacaaatcttatggaggcagtcagtcggaatgacacacaagcattcaaaaacttggttcagaaaaacaaagcaattcttgatcaactggaagcaaagtccaagaacactgtcctacacctcgcttcaaagttaggacatgaggaaatgacggcctacatcatcaatttgaggcctgacatggtgcctgcccagaataaggacatggagactccattccatgaagcttcccgcaaagggaatacaaaaatcttgaagttgctactagaggtggccaaccctgaggctgcccgaaagctcaattctcataacgagacagctctgttcttggcttgcagttcaggtcatgttgaatcagtgagtctgctattggctcaacccgggttaattcgtctaggggaagacggatatgatctaaaatgtattcatgccgcagcctcagctggatacacaggtaatatattataaagataaaaactaaatttcaacacttctgtttatatggttcctgattatttgttattgtaatagatgttgtaatggagctgataagcaagaacagtgagtttgctcaaacgatggatgagaggggaaatatgatactgcattgggcatcagaaaaagggcacaaggaaatcaccggtatgcttctgaagcttgatccaaagctagctctgaagtacaacaaggacggtttcactccccttcacttggcaacaatcaactataaagtcttagtcctccaaggatatgttaacaaggcggctgtttcttttcagtgtctgacaacagagggagatactgtgtttcatttagctgtgaaacatggccgaattgacgctttaatgtacttaatcagtgtctgccatgggatgagtttgtttaactgccaagataggtttggcaacaacattttacatcttgcggtcttaggaggacatcataaggtgaaaatgaatttacattaataatgctatatgtatcaattatcaacactcatgataaattaatatagtccgttctttgtttaattataatattggtttttgtatcagatggcagagtacataataaaaagagcaaaagtagacataaattgtgtgaacagtatgggacttacagcactcgacatccttgaccaggctaaagatagcgtcgaaaatcaacgtctcgaagccttgttccttaaagaaagagccaaaagaagcacagaattgttatgttttctaccaaaattaccaaaaaccagctctaggcctgttccactcaatatcataccacaaagaatccttaaggaacacgaaatgcaagtctttgatacatgttcgccctcatcaagcaaaaccccatcaagttctatgtcgtctcctctctcgagatcttcttgtgtgtcttcaccccagtccagaaaatcctccccgagacttcctgccgaaaagggtccggagggattatcaccattaggacatgatggccaaattctctgcaaaaggcacgaagaaattctctctgcaataatggccaagcgtcgaaacaagcagcaacgtcgtaaagtctacgcagaggcgttacagaacgctaggaacaccatcatcttagtggctattctgatcgccacggtcacttataccgccggaataagtcctcctggcggcgtgcaccaggacggtgagatgaaaggaaagtcaacggtggggaaatcgacagctttcaaggtgtttgcagtaagcaacgacttggctctgttcacatcattggccatcgttgtggttttagtgagtatcataccgtatcggagaaaggcccagatgagattgttgtctgttgctcacaaggtgatgtgggcagccgtggctttcatggctattagctatgttgcggccatgtgggtgatctcgccgacaggcaagaaggcagagttggtgtctgtggtggctctggtggtcagcggaggaaccatgggaacggtttttattgcacttgggaagaagctcgttgaccattggttgaccaagaatcggtggagatcaatgagaagggatgcaattggggataatgatgatcttgaaatgggaagtgaaaactctgatgttgagagctctttccagaagggatatcactcctattgatttttatttttcttttgtttttcttagacagaaaagtcaaatttataggtaagtttctgtaggagtattatataggatatactagttgttgtacacatgctctcctttctgttttctctttcatggtaaggtgacctttgtaagttgttgtattcatttcctttcatggtaaaaaatttgtacactacttgtccataagtgtttgttatagttatattgggaactgagttctgtctcttatttctttttagaaattctattctgatctgaacttttacttggctccacagtaatcaatcatattgtctcaatattatatcatctatctttacatccgtacattacttgtataggagactatgtttggcctattttaattggagaaaacataaagtacgacaaccatatataactaataacttggtgaacactgtgtaaaactatgtaaataatatagtattagtatacattaccaaattatcacgttagataagtttatacttttcagaggacttagatacagaagtccattaatatttgtttagtgcagattaatggaaaacttgagagaagcttccctagaattgataaataaataataaagtgtatttcttgcaactttcttttcaatttcttcctaaggactgatgtcatgggcctcttggcagataataatgttgggccacacccaataaggctttaaaaacagttccacaaacccattgaagggttccaattccaataacttctagagatccttttggttttcgttttcagtacaagtacaatgagggaacgttggtcaagattcatactccttgaacttgactgagtctcattcttcacagactataaatatatattttttatttagtgttgtggtaaagaatatactgtaacaacagactaaacaaatgaataaaaaagtagagtactacgtacccaaatctttgttcaacttatttggattcttaatgacaagttccaccatattttccaagaatttactagatttcctacttataaatattggtacttgaatacaatacctctactaaccctctcttagttcacagccttagtatacttataacaacacagtaatgatggatccaaggcttttagaggcaattagcagcaacgatgtatccacattccttagcttggttagagaaaatgaaggtattcttgagcaaagaacagacggtttgaacacagtcatacactttgctacaatgtttggacatgtagaaatcgtatctgaaatagttaagctctgtcctgaaatgattgctgctgagaacaaagacttggagacacctgtccacatagcttgtcgccaggggaatttagatgttttgaaactacttttggaagctaatcccagagcggcttttaagctcaactctgataaacaaagtgctttctatgtggcttgtagtcttggtcatcttgacgctgtgaatctcctattcaaacagcctggtattcttgagtcagaagaagttggccttgatcaaacttgcatccttgtggctgcaactaaaggacacacaggtataaacatctactaaccttgatcacccttttttcttttcttcatttgcaacatatataattagttgattatgcttattttaacagatgttgttagggagatactaaatacgagtccttatttggctcaaaagattgatgagaaagcaaactcagctttgcactacgcttgtagtgaagggcatagggagataacttggatgctgctgaggcgtgatccaaatctagctctacaatacaacaacaacggttacacacctctgcacttggctgccatacatggtgaagtttcagtccttgaagaatttacgcgaaaagcacctgcagctcttcactacctcactaaagaggaggaatcagtctttcacttggtagttagacatggaaaattagaagctttggtgttcttggtgtatgtattcaatggtacaaaccttcttcactgccaggatcggtatggtaacactgtcttgcatctagctatttcgcgagggcggcatcaggtaaagaattactaaatcaaaattatgtattagaacatgtatatttttttactgaattttttgagcttgtgttccagattgctgagttcttgatgagcaaaacaaaggtggagattaatactcgaaacagtaaaggtcaaacagcatttgacttgcttgaccaaagtaaagacagtgcagaaagtaggaaacttgagagcttatttacaagagccggtggagaaagaagcatagatatcatagcatgttcacctgacaccttgtcttcaaggctaagttatctattcgaatcagataacgaaaacggttccccctcaatgcctacagagataaccaactgcatcaatctaaagagccaaagaaaatctcatgtttcatcaccccaaaaccaaactcaagagattgagcttttgtccccaaccgatttctcaaagcagaggactcacagcaaaagacttcacatgagtagtttcaaagaaaagaaccacaagataatacatgatgaggcaatactaaacgcaagaaacactatcatactagttaccattttgatcgccacagtaacatttgctgccgggattaaccctcctggaggggtctaccaagatggacctaagagagggaaatcaatggtgggagagacgaaagcttttcaggtatttgtaataagcaacgatttggctctgttcacgtctctttcaattgttgttgttttggtcagtatcataccatttagaagaaagcctcagatgagactgcttgtggttgctcataaggccatgtgggtggctgtggcgtttatggcaacagggtatgttgcagccacatgggccaccttgcctaaaagccaggggactgaatttctgtttgtggctcttctggctgttagtggagcaactcttgggattattttcattgctttagtcgttttactggttgaacactggctaaggaaactcaagtggagaaaattgatggcaagatggagtcttagagatgctgaagtggagagtcataattctgatgttgagagttctttccatcaggggtatcattcattctgatcaataaagtttctagaaatttgttaaggttgtatatgattatcaagattaatcatgttatttacagcttgtgtggaaaaatgttttatgctttcaaatcttgtaaacttgttttgcttgtcctgtgtatttggtacatgaattaaat

SEQ ID NO: 36635 - DNA, 3338 bp, Cannabis sativa
  modified_base (352)..(352): a, c, t, g, unknown or other
  modified_base (2514)..(2517): a, c, t, g, unknown or other
tttgtgttggattttaaacttgaaaaagcttattaatctcacttagataggttaggtgtatgacattaatgctcagctaacttaattttttgagtcaaaatcgagtttatatagtgttggggtggaaaaatagttgtttatagccgttggacacgaaaaatgagactcccactaggcaaaccagttcaccggcttcaaatcggttaacctctttgaaactggttaacctaaatcgactctattgcaactaacgctgtaacttaatttgtaacaaaaaaacgtatagaaacctctattgcaactaacgctgcaaccattttattataaacacaaactgtaaatttgaaaaaanaaaaaaaaagttaaaaaaaatactatataaggtaattccccttaattttattagttcttcagtttcttataaaatatatattgcatataattttattttattctgtaaaaaattaaattaataataataaataattaaataatttaattttaatttttttattaaaattattatttttacgttaatttgtattaatctaatttatgtatgtagctattatacagttcaacattataataataaatcattgtagtcctattcaatctaatttaatcccactcacacccaataataaatccaattcaattatattgtccaaacgcgcgagttgctaatgggctacaaattcaactattatataagaaatttccttcaaagttttaattttacataagaagtatagagaatatggaccacaaaaacgcctacactcgagtgagaaaagagaagacttaaaagatggggtgatgaaacaaacatattgccgaaaaaaaattaatttttataatgccctctcatattttttgtgggttaaaaatttatattaaattattaagattgttgaaattaagaatatctgtctaattaattcaatttactaattcgatcaatatttatgtactaaattatactcgcggactattttaatatgtatcaaattatgtctcttaaattttgatatatattaaattatacctctaacttttcatcatccatgtaagatttttctttattaaaataaaatttttaaccgttttaaagggacatttggtatatacaaaattcttagcatatatataaatatcatgaaaacatgtctttataatttatttatgctttatttgttagcatatatataaatatcatgaaaacatgtctttattataatttatttatgctttattttaattttgttaaagttggttgtataaccctaaacgctggggtgagagtcttcttcggagaaagtgtattccacgtggctgtagtgcgggtggggtttgcaaattaacattttgctttaagaatctgagagagagtaagagccggagagaggttgtggctttttggccctataaattggggacaagcccacttgcctcttattcaaaccagagatatcaaatactaagcagcatctcatctctcttctccttctcttgcttagaacttttagttgggagaagaaggtgagtttttaataaaaaggaaattcagtacttaagagagaccataactctatatatatttatgtaatggaaggtgtaagaaggcaacaatccatggagtattacaaaggagataatactatgacgagtgatgtggcagttgaagacaacactgttgattggagaggcagaccttccaagcctaagcatggtggtatgagggctgcggcttttgttcttggtatgtatatattatacatatatacatatatataaaattccactagaagtattggcaggaaagtctatcttcttttttcttttttccttttttattatcttgtgtgtggccttatattagtataagtattttcatatcctttttcttcaggctattttatttattattttgctgattcctacatgcatgtatatatttttcttatttcgactagctagctagctcttacaattcagcctaactagtttagtttagtttggatatatataaaactatatttactaaattatttcaaaaaaaaaaaaaaactatatttactaaataaatatatatgtattaacacgtttcttttaaagtgggtttgccattattgtcatatgcctatataagctagctttgaaagcaacattttttacggttttattatttaaaggagaacggaaaaaattaaatatatgataaaaataatgagacagagagagacataatttatatatattaattatgcagggcttcaatcgtttgagataatggggatagcagcagtgggcaacaacctcataacgtatgtgataaacgaaatgcacttccctctttcaaactcagctaacatagtgacaaactttgttggaactgtctttctcttggctcttcttggtggatatctctctgattcttatctaggcagtttctggaccatgctaatctttggcttcgttgaactttctgtaattctctctctctctctctcnnnntctctccctctctctctcttatataaatatatatttatcacactgtcaacttctctctccatcttttaacccaatatattacgaaataaaatattataaaaataataaatatattattttcaagagttgactaaataaagtgtgtattgcaaccttatcggtttaattttcctccaccgcacatataattattgattcaattcctataatttgactcaaataatctatttgtcaacttatatatattatattctgtaaaccacttaacacagatatcatcattgaaggccattaccacttagcgcagtcaccaccacaatacataaatatatatgtatcactaatgtcacaacaatgtcaaatctattatttaaacatatatattctatttatgtagtgatgcgtcacctttttcgctacaattaaacgtgtaattgtactatttattaaataaattaaattgtgatgatggatcaggggttcatattactgtcagtccaagctcatcttcctcagctaaagccaccaaaatgcaacataacgagtggagaggtgtgcgaagaagcgaagggtttcaaagcgttgatattcttcatagcactatatttggtggcgttgggaagtgggtgtgtgaagcctaacatgatagctcatggagctgaccagttcaacccagataatcccaaacagaccaagaagttgtccacctacttcaacgctgcctactttgctttctcaatgggagagctcattgctctcacactccttgtttgggtccaaactcattccggcatggatgtcgggttcggtgtctcagccgc

SEQ ID NO: 36636 - DNA, 5664 bp, Cannabis sativa
taattcgttaggtttacataattgatttcggacttgcaaaaagatatagggattcaacaaccaatcgtcacattccttacaggtttgtttgacttttaatggttttcatttcttatatgtgcattccttttccttttcacacgtttcccaaataatctctctttctatcgggacccaaagaaaagaaagaaagcttatactacctattattattttccactgacgattgccttctatagggagaacaaaaacttaacagggactgcgagatatgcaagctgcaatacacatcttggaattggtaagcagaaaattttatgttgtttatatttattatattcttttgtaccttgatgaaactaagtttacttaatggtgctttccctgtagagcaaagtcgaagggatgatttagagtcacttggatatgtacttctgtatttcttgagaggaaggtatgtcattagttttcatcatttagataagatttgctatttctttaatttgttggatgtgtttattctttacttgttcattctcgcttctaatatgtgtatctgtaggtagaatttttaaatgctctgttcgatagtatgcaacggcaccatcaatttggtcattcatattttctttctgttctatatcttaagtttatttttgttaatattatctttaacatcatcgttgccataattttgtattaaggaattgctattttttgtttgtttgtttagccttccatggcagggtttaaaagctgctacaaaaaagcaaaaatatgacaagatatgcgaaaagaagttatcaactcccattgaggtgcatgtcaattactattttgtttttggatagttccattgtattgtaaatctaaccaactgctattttgagaaggttctatgtaaatctcatcctgtggagttcgcatcatatttccattattgccactcattgacatttgatcaaagacctgattatggattcctgaagcggctattccgtgatttgtttgctcgtgaaggttggaatgttaaaaatttaaatgtttctcttcccttccatcattttttgttgctcctctttattttgaactcattggtgatcttgttggacaatggcaggatatgaatttgattacatatttgactggactatcataaaataccagcaggcacaaaaaaataaaacacaagctcgattgtctgtgagtgtgtttgctgaaatatctttcctaaattttgttgatgttacctttgttgtgtgcttataacaatgttgaatggctgttacagccagctcatggaggcagcaataatcattcaatgcaaatggatacaggtagtcaccaaggttagacttggctttgggcttttgtttatgtctccctattctatttttctaaatcgatgtattggcttgtgaagtagagctcccttttggttttgttatttttatttttagttaaagattgcgggaaacatttttttcccattcttgtctgttaatgtctattttccagcttgcctctattaaatgaaacgaatttcttttgtaaattatgttagtggctggagctgctaatgtttcttactcaccggaggtcacagatcgcattcgatctaccaacgctactggtcctagcattcgcatgcaatttaaacagccagcgacaaagaatttgagttatgataatcctctcgaaaagaatgtgagtaaatgatttttttttttttttgagaatagagtaaatgacattctaatatctactagtgctttttttccccgagattatgttttatatatatgtttcctacttgtcctggtatgctcaaatctgactccaaaaatgtcaacgttataactgtcttttttttccttagcttgtcagtgatgtgtatacgccatcttcttctcatgcacttgctggaacctcaagaagacatgttcataaatctgttttgcctgctgaagctgcaaattctggtcatgaaagtggtaataaagtgggtcattcaagtagctggatttcatctcttcaacgtgtctcttctgccaagtgatatataaggtaatgttattacctgtttgctatattatatttgtaaatactgaataagcttttactgttcattgatcattttgcaatgtgttttcagcagtgtcctgggtcaagagtttctctaccaagttgttcatgtagctgcagatatgaggtgattttgatggtcttttcctcaaattcgtctgtttgagaagaaaacagtgatgcatcagtggactgcaaagttgttaaatttgatgatttgcattggttccccagttactgcaatagctcgcattattcttctttaaggttactgcaaatgccttagttgttgtgaaatacagaaaacataaagcttggtttctgtgttgtacatagatatgctataagaacacacagcgatcttgtattcatatttcttttgtgtaatgtgaatgacatgtgaagttttttttttattctcatttttttttttgtggtaccaaaactctttgtgaattgcgaaatttatgatatgctgaggttgttgacaatatttatttattttcttggtccctggttattactggctgttgtgatcttttagatttttatatctttcagactggggtctctggtgttcattgaagattttctctcctggttagccaatctttccctaactgatgattaattcttatattatgctatttaacaaggagcttccatatttttatgcagtgtatgttttgttttgagtaatttgatctattagaaaagtaaataaactaattgttttatcctctttggtttcaaaatattcacttttcatgccagctacttctgaagttaacccagcaatttgtttagtacatcagaaagaaactcaacttcatgcgcgagtaaactttggctcaaaaagctctaggattttgacactttagacacattgaaggtagagtttatggctccatgttttacaccagatatatggttttgtgttattatgttctctacggtaaaagggtcatctaatgcctttttacctattacttcatttgagacgaataatgatatgtgtacgcactttttgcaccaaaacattatactcgcttatgtgacaagtttcttcaaccagtaatattaattcaagtgtaatgttttggtacaaatagtgtgcacatatcgttactcaaattttctttattcttcttataattgtttctacctcgtaaaacaatacttttccttccttaaatgtgattagtatattgctaccatatggtatgggcttttgttagcataagaatgtcaatattttcttaatcccatgtatcggaagcatggcttagtacattttctaccgttggaatgtgattccacatgtttcatttttctgcttattagggtaatctgaaacttaatgctgagagcgttcactcttggaactgcttgctgcttagccatatctcatttatcagaggccagcattccttgtccaaagtccgaccaagctgatcactattcaatcttttttggggccagtgattcagactggcgaagaaaggcttcttgtcaacagccacatgattgcttgagttttggattacatggttattctttaggtaaaggtttgattatttgtaagccatgtctttccttgttttttggttttggcttctttttgttttgtttataaaaaattcctgaagtcatatcttttcatgttcagtgaaaatgtattgtacaaaatagtgttgcataaatttatccatacccatacaccacatcaaaagaaaatagaaaaacaaaaactttcaaaacccatcagattcaaaggaaaatagacaaggcacaaagagcttaaattcgcattcttgtcaagtttggaataattagctgttgtattaagttaacactttcatctttttagccgtgtcaccatttttttttttactaatttgaacaatttcttgtttcagctattcaggtaccatttcacctcctgtaagttggtcaaattttatattaatttatggaatgtcttactagttgatggtttacattgttttgcagaacacaattacagagcttagttacatcttttgtggcctttctcattcgcccatcaccattcttatatttgaatttggattttatatatttattttcttctgttgcacttattccatttagtatgttttcctcttttgctgcatggcctcgtgaattttatcatttggcaaaatgattcaactatttcttattgtccttaggacattaaatttagtttaattaacaactctaaattgtaactatttttttcctgtcctaaggcccttaaatttagtttaattgacaattaactcaaaattgtaaaagtttgacagtttattgttttcttaaagaagatatgatgataagttcaaaaattaagttgaactggtaacaaattcaagatatcaaagctggttacagatttaaattgtggagttgattgttattatttaaatttaatttgattgctaaaaaaaaaaaaactgaaagccattgtgcttatctaatcgattaacttctaaagttaactgtgctataaacccttttattttgtgttcccttcctctttaaggcttttaaacattttccaatttttctctgctatcaatcaatctgtttattagaattaacttcttgttcaattttaattgtatttaatgttttcagcatttgatgatttgatgctgatctcattcaagacaatgtggatatcaacccttgctaagaagacaacaagtgctggacctcttatgtatgctttcttccataattgagatatttcagtgtacttgttctttctttagcaaaagctgtggagttgtttcaaagctggccaagggaattgtactcatgttggacataggatccatgttacatggggccagagttgtttatcataaaagaatgatttgggtaattggtaattcactttcccagattggtccgcaagagaaaattacgtaccactcaatcgtcgacgagttgaaaagtacagttatctcattggttggttgggggggccagattcaacctaaaactcttatgtcccacctttatttttaggacatcacatttagatgttgaactcttcttgacaagtttattttgtggatattgtttgctcaatttacaagattatataaaactcgttttcttctcattggattacgaaaattgattttgtggtatgtttactcatctttatcggggaaggtaatgaaccaatcaatggggaagagttttcacttttctattcatgttgagatggaatgacaacttgtggtgataattaatgtattcatttcaaattaaagagggaataagaggactgaatgattctgtacttttgcccttctttttacagcaagttgtttagaattgaactttttttaatattgccttagttgggaagccttttggttagatattctagtctacaaggtttttttaagtttaattttatgaagctatttatctttgttggtttgtagtacaagtgtcttatcaactttttttaagctaaaacactctttgggtgagattaaattgaccttaagttacctttagtctttttttttttttttt

SEQ ID NO: 36637 - DNA, 6938 bp, Cannabis sativa
tttactaattaataaatatatttctttaataaataattattttatttttttatgtaattaacatttaatagatataataaaaaaatatttttattttaatttttcaaaataatatataagattcttgtactcaaccaaacagtgtaatttaattaacaggaatacgataacatattaccctacacagccaaacacagtttacacatttctccttcataatattccctataattacgggaatcaatggtataaaatagttacatttttacatttattcacttaatttattaaaattaagaataaaaatacttaattaattaaataagatacttaatcaaaaaacaaaattacagtaataatattcgaagatagttcatgttaatgacatgtttactaataaataatgagaattaatgataaaagataattataaaaatcaatagtaaaaaataattatttttttatatttatttacttaatttattaaattaaaaattaattaaataagagaataaaataaatatttctcactaattttgtaagaaaagtcaaggatgatgaccttttatttatttttattttactttttaaaattaaatatttaattatatttttgtcttttaaaataaatcttataaaataattatattttaaccaaataaagtaatatttaatcaatttaaacatattaatttacattttttaataaaacaaacaagatatatcattattattttatttacaaaaaaatttagtaaacaatatattaaaaatattaattcaatttactgataaaaaaaatattgatttcaatttttttttttcatttattgtgttatatttctccattagtttatcctcattttcattagtataaacgtgccataagtttgttgctagatgtgaaatttatacatacaattggtccaagttaggggtggtaatttgtgttcgagggtcgtattcgtgttgtgtcgagatccatgtacaacagatatatgctcgacccaaacatgacccatttaataatcgtatcaaaaaatcaaacccgaacatgactagtttataaatggattgacccgacacgacctgtgtaacctgtttataagcatattttgtttaaacatgtcaaccaataacatatttatgaagtattcaatacatttatgacttgttaaagaactaaaataactttaaatatgtcattaacgagtcagtttcatattagtcgtgtcaacccgaatacgactcgtttattaaatgagttagacaagtcaactcaaacacgatccaaactcatttaaagcaaacctaaacctgctaattcttgtgcgactttcgagtcttcatatcgtgtttgacccgttttgccggccctagtccaagtcatttattattatttaaaaaattaaagttaaattataaaaatatcaatatacatatttgtaaaaaaaaaattaaaatactattttttatgttttattttactatttaagatttaaatttttatttataaaaatacgtttataaaattttaaattacaaatatacactttattaagtaaaaaatatataaaaaaaataactaaaaatagcaaaaaaaataaacaacaactataaataaattaaaaaaacaacctcatacatctataatataaaataatttattgtttttattgaagtatttttggtaaatgaaaaaatttccacatattttttcttttcaaacttttgtttttctttcgtaccaaataaccattttttttcctccacttttcctttctctcccttttctcaccctaccaaacatagaaagagaaaaggaaagccagggaaaggggaaaatattagtattagctcacatttagcctatctggctttctttcctgcatgggcggccaagtgttttctcagtaaccaaacagccttcttcatggtcagtctccttcttcatcatcatcatcaagttacgatagctcagcaaacgggtccaacccgtagataatgaatccaccagatgacattgcggaccagttctctttgttccctcctatcccattcaccttatatgatccccatgaaatctctcttccccttcccgaccttaatcctaacccaacccctcttaacgccatcacggacccggtgccagttccgagctcgattcaaatcgaagaacctagctccactcacaatattctttcattctcgatccccaagaagcggagacgaggcaggcctcaacgcggttcaacctccttcaccattcctcagtttcctacggggactttaaaccctagtagtaactattttccttctacttctaattcatttcgaaacggtgtaggaaattctaattctttgccacacactgcactagatacctctgatgaaatcattgttatcaatagagaatccacggctgaagcggtgattgcgctgacagctggattccctgcggattccctaactgatgaggaaattgatgctggggttgtaccagtcattgggggaattgaacaggtaaattacattctgattaggaatcacattattgcgaaatggcgtgaaaacgtgtcaaattggattgcaaaggatatgtttattggttctatacctaaacactgtcaaacccttttagattctgcttataattatctggtttcacacggatttatcaattttggagttgcaccggcggtcagagagagaattccagctgaacccagtaagcctaatgtggttattatcggtgctggatttgctggtttagctgctgctaggcaaatgttgcgttttgggtttaaggtgactgtgttggagggtaggaaacgggcgggtgggagagtatatactaagaaaatggagggagggggaaatagggtatcggctgcagcagaattagggggaagtgttttgacaggtacatcaggaaacccgcttgggatagtagcaaggcaattaggctcaacacttcataaggttagagataaatgcccattgtatagtttggacgggaagccagtagaccgagacatggatatgaaagtggaaactgctttcaaccggcttttggacaaagccagtagacttaggcaattgatgggggatgtatcagttgacgtttctcttggtgcagcattagaaacattcctacaggcagatggggaggcagtaaatgctgaggagatgaacttgttcaattggcatcttgcaaatttagaatatgcaaatgcaggcttaatttcaaagctttccctcgcattttgggaccaagatgatccttatgatatgggaggagatcattgcttcttgcctggaggaaatggaaggctagttcaggcattggcagaaaatgtaccaattttatatgagaaaattgtgcagacgataagatatggtaatgatggagtgcaggtagttgctggcaaccaggtttttgagtgtgatatggcattatgcaccgtgcctcttggggttttaaagagtggctccatcaaatttgtcccagagttgcctcagagaaagcttgatgggataaagagattaggatttggattgctaaacaaggttgcaatgctttttcctcatgtattttgggggacagatcttgatacttttgggcacctttctgatgatcccagtcgccggggggagttctttctgttttacagctatgcaacagttgctggtggtcctctcttgatcgctttagtggcaggggaagctgcacataattttgaaagcatgcctcctactgatgcagtaacgagagttcttcaaattctcaagggtaatgtattatcaaaaataatttataaagctttattttcattttaatttaatacccagttctctgacttactaaatctggaagaagataatgcaatgaatccgacacaataccatcattcactatccaatatatcatggatgattagaaaataagaaaagaaaacccaactatttttcatgcatgtaatatcaggctcagctgttcagggttttgatgctctcatactttcactctaaatctatagtaattattatcaatgtgtatttagtatctaggcactttttcttgtaggtatatatgaaccgcaaggtataaatgttccagaacctatccagacagtatgtacgagatggggaagtgatccttttagcctgggctcttattctaatgtcgcagttggggcgtcgggtgatgactatgatatcttagcagaaagtgtgggtgatggtagattattctttgctggggaggccacaaccaggcgataccctgcaactatgcatggggcttttcttagcgggcttagagaagcagcaaatatggcgcgctatgctaatgctcgatcactgcggattaaaggtgataggagtctatcaaagaacgcccattcttgtgcctctcttcttgcggatctatttagggagccagatcttgaatttgggagtttctctgttatttttggtcggaagaatgctgatccaaagtcaacagcagttttaagagtgacatttaatgaaccgcgaaagaagagtcaggaaggttccacacctgataagcagcattcaaataagttactttttcaacagcttcagtcacattttaatcaacaacaacaactgcatgtttacactttgttatcaaggcaacaggcacttgagttgagagaagttagagggggtgatgagatgaggttaaattacctctgtgaaaaactgggagtgaaattggtgggaagaaaaggtttggggtccactgctgattctgttattgcctccataagagctcagaggggtaatcggaagcctacttcgacttcattggctctaaaaacaggtgagtgggtgcttaaccaatatttctcttcaattactattgttacaaagtttaataatgttccacatccttttgtgaaggtacatcaaagttgaaagctggcactttaaaacggaagttagtgaggtataagctgcaaatcataatattcttattgcttggatgtctcaagtatcttttcaatgttcttctcccacgtattctactaaatggatgttaaaatattactgtcccttatttttaaattcttagaagggcaaaaatagtgcggagtggcaatgggatggcaccttcttctggttcaaacttggtaaatgacaaagtatcggaggaaattagggctacacatcaagcatcttttgatacacatgtgtcaggtaaaacattcaagggttttttacagttatgggtggatgtgtcttggaccatggaccatctagcaatagtgtatttcatctcttttgcagattatgaattctcattttctttggttgaagaattattttattgtagttactgcagttattttttgtttccttatggatttagaacatatgcttgatatttttttcgtgaaagttgatgtcaaagttctcaacagatctaattttgtttgtattttggcaggccaaaatcagggtaacatgtagagcagtgaacataatgccacatcttgttaagaggtgagtatcacactaactgatacaggcaccaaactctgctctctttccccatctgtaaatgttggattaccaaactgttgtctttactagaaattctaccatctcaagttgaattgcaaatctttgagtcatcgctatcccttgtgatgacctttctgctttagagctttaatttcctttcccatctgccctttttctttttgatcttttttcagatggggttgtagagttttatggaaagtgaagggacatatgtgtgaatatttttctttttagcatataaggggaataaaagaaaaagaggaatggagaaatcagtttaaaaatgtttcagttaagctgcattctctctctaatcatgttcactatggacaatatcagaatatcctattgggtgaagaccttctttataatggtttgtgtggtaactggtaatgttatttggattggtcagctggagtacatgccaactccgaagacggtattcaatcgacgtccattgtgcctgtgaatatctgaggccacaggtgaatctccggaaaatttccccagtaaaagaaaacattcttgcaatgacacttactgacaagcttattgtgcattgaaggataggtcctgctaaattttgggatcctaatacaagtgtcgattgatgctctagtgataaaatattggatttggaagagggtattcatttttaggatctcggattggtcggtgatttataactactgggacaccttcagtagatgtaagttatacaactgtacagataattttgtaactaactataaagcaaaaatatgttttagactagctctacgggcacttaaaatatttattagaatagttgtaccagtagttttatgaaggaagactagtacaatgatgttgttaactaccaccattaattgagctatgcaaacaaacttaaaaaggagtaggtctattatttcgaatgtatggagtttttttattattattatttttgaataaaatgtataattccagtggatgtttccttcattggagttttttacttttcagtattttagtgttttactgttaatcaaatcagagacgtggtggtatttattcaaattttgtggaatgttgctgtcgtaattattataattacaaaaaaaaaaaatggaagaagatgtggtttttaatttctataatatggacgaagatagctaattgtaattgtagtgacatgaaacaacaacagctgttgggttccaaaatttaggctgtttgcttattaattaagttggagaatttgagaaagcaatatattaacacaattttattggacaatgataagagcattgttattgagtattagagcatctccaatggtaatattttgggctatttacaaaaaatatgggaaaataaagata

SEQ ID NO: 36638 - DNA, 2806 bp, Cannabis sativa
aagtcctttttcagatgattttttcattgtagtaaagtaataaccttctttttttgtgaacagagaacaatggttcagcttttccatctatagttgcttttgagagcagtaacttgaaggcagttttcaacttctcaaagacacccggaaacccacaaacaacactaattcaggctacatttacgaatctgtcatccgacatcattaccgattttattttccaagcagcagttccaaaggtaacatatgataatagccgttgctgctaattctagcgtactttgtcctctattctaagttaatataattttaccattatatccaattttacatattttttataagtgttaatatcacacttagtttatcataaatcaattggatctaaaaatcatgacatgattaagctttaaactaattctgttattcgagttctttgaattgttcattaccaacttactgatattttcttgacttcatcagttttaaaatatgtaaaattggacttcctctctaggtggattatgctcttggtgaaattctataaacttcataacatgagctatggttattattatctcaatgctcatacattgcatagggtgcccatgtttccgtgtggcagctaaaaccttcaggtgctgtttggttgtcagtaatcataacagaaaactaggaatgaaaacgaaaatgtgaataggaatgaaaatgaataaaatttaatactgtaaagaagtcaaatattttttatattattatgcttcagaaggacattcctttcgtattttcgagaggaatagtcattctcattctaccaaaatggcgggaaaatcgttcaagtagattcttttgccatttcattccatttatttcccgtaaatgctagtgctagatatcatatccttgtgtaagcagtttgaagttgcacatggacctaggattttgtcatgaactttgttgttggcttcatattaaagttatatgatctcatttgtggttggcttttaatcaacagtttctccaactgcacttggatccagcaagtggcaatacactgcctgcaaatggtaatggttccatgacacaaaatttaaaagttaccaacaatcaacatggaaaggtatttgaacttctcaacttattttatttactttttaatctatcccttatcgaccttagagacgacgtgaataattgattgaaataattggcaaaatgatatcgttttagttatcttgtttaaatattcaaccagttcaaccacctgtctaagactatcgaataccattttgcaaagaaaatcgaaattagcctaaagagcaaaatgactggaaaaaaagaggccattttgccaaagaaccctaatttaatttagttcaactcatccgttttcagaaatctcttgtgatgcgcttaaggatcgcttacaagatgaacaacaaagatatattggaggaaggacaagtgaataacttccctcgcggtttataaggtttggagttggagatcttcaaaagacactaaattaaatccggtgttttctcctaacagtcgtctatataggggacgtggttgggtggtggattttgagcctgattttgctcgactcgagagtatggcttcttttctttttctctttcttttttcttttactcttttctcatttaggtggttgatgatgtacattagtacaaattttattcccgtgtggaattgtgggaactgaattttgccattttgtgcacacaacaaaagaaaaaaaaaaagaagagagctcatgaatcatatcgataacttgagatgctatttttttttttagtttggatttgatcattagggtttattgtcttgtttggaagctgattttaattcgagtcgtatcgtatagtattatattcaattttcatgtaccattttcctttactgttaatgaaatgtaaggttatattatttgtttgttgatttttatatttacacacattgcttccattatatatattgattcaaaaataacagtaacatgttttccaaaatttaaacaaagaataaaatttgatctgacattaaattttgctggatccgttgcatacttgtataattttaaattattttcttaagatctgtctttattaatttaagaaaacaagatctagagagtagtagcttagctcatgtatttaataggtggttccttttctaagtctttttccttttcttaaatattaaaccttgactttcataattacaaactcagtcaaagaaatgtgatctggcacagcaaatcaatcttcaaaattaattttcattattgatgcttgtttattgatgagaaatgttaaaagatattagtattgtttaatattttttttaagtgtatattattattggtgtaattaattatcgggtaatttttaagaaatagacgtcacttatgatgtttaatagcaatgctctttatcttttttactcagagaaatattaaaagacattaggctaattagtatttttgccctttgaactttgacatgtactaaatcatgcgtcctgaacttttaaagtcgttaaaaatgccccttgaactattgagatggttggatttaaggatttttttttctaattttaataaaaaagtctaacatggattaaagtttaggggtcataggtgagggagcaaaaatcttaattagcctgtgtctaatacttttataatatccgattttatttattttaatttaataaaaattgtcaaaaattgatgcattgtagcaatcttcttttactcacttttaaacatgcaaagaccttg

SEQ ID NO: 36639 - DNA, 5995 bp, Cannabis sativa
ctccgattatcccgagaaaatcttgctccgagaaaatctctcatattccacccaccgacttgtaaatatatatataaaagggcgagaaacacaactatagatggatcatcggagaaccgcgagtccggtgtactcgcgccagtggagtggtggaagcagcacgggctcctcttctcctgctatgtcgccggctcaccctcactcgcgcctccagcctggagcagctggcggcttctccaccatcaagcgaacccaaaacgttgctgctaaagctgcagcccagcgcctggctcaggtcatggcgtcgcagtccgccaacgccgatgatgatgacgaagacgacgatctggggtttcgatacccgccaactgctaagcctatgtcattcaacaataattcgggttccaactccgctgctgttccggcgatggctttttctcggcctaatagatctccctctcctgcggttagtttcagatgttttatgttatgatttgtttaaaatcagaattcagtttgaattatttgataatcgactttgttgcagaaatttgaagtttcgggatctgatatagggtagtttgtttttcatagattaagtgatttaggttaggtcgtagtgtacttggttgcagttttagattaacaaagttgcgtggaggttgagtccgcttcagtctttaaagtttagtgattggaattttgcagctttgtcatgactttgtttgattatatgacttagattgtcatatgagttttttcgtgattctcttatctagttacctgtttatatgtttttgatgcactttagagactaaattttagtttcttattaagttttggttgatgggtttttagctcatattcctgaatttggtactagaggtgctaatgtaggtaatttagcttgtattcgttctttctttctgaggagactaattggatttctctggtattttaattagttaggtcggaactttgtagatcatactccgtctgtacggtccacttcggctggaagaccgtctgtttcacttcgttcaacaactgtagtaccaccaaccagatcctcattaagaactccaatgtccatacctcctattgaccctcctactaataggagcagagataataaaaggcaaggataaatgctttgtattttcttgttttggttgggcaagagtgatcttttgcaataaattacttggtttgttagatttgatcttttttatcaatgcaggttttcaacagatattggacagatgaacttaaaaaatcctgcagaagagcgtgaagcttcagcacttcgagatgaagtatgttacagtaatttgctagctcaaagtggttgggttgggtggtgttgtgtagtcttggttcaagtcttcataattgtattttataataataataatgatgagtgggatattgaaactaacatgagatgaaccataattgcagcttgatatgctacaagaagataatgaaattatacttaataaggtttgtactgtgaatctcctcacaaatgaaacatctttgagaaacatgattctgagaatttatagttgaacttgttgtacagcttcgtactgcagaagaaagacgtgagcaagcagaggcaagagctagggagcttgaaaaacaggtcagttctactagctatgttttcttctttacaagatgtttgatacttgtaaattaggttttattttctatggacaagtattgtcaatctttttgttgttcactcttgttttcaccaaaggagtaggcccatagtagaagattctttaggtctattataactactatcaacgtaacttagcttgaacgagagtctaatggcgcatatttgagcctgtttggtatcctatgcttgaacgagagtctaatggcgcatatttgagcctgtttggtatcctataacttgtccagaagcaggataataagtttttgtgatgggtttttctggctgaaaatgatgactagtatcaaatggttgagtgagctcagtagtgtaattttcgggttattttggctgaaaaagaagtatcattagtagtggacttttgttaaagagagattatttgtagttttcatatatatgagacatgagaagacttcttagataattggattattaggtaatgtatgttaaaatgcactgccactcttcttccactaaataaataaaataaaccatcactctcttggttatgggaagcatgggactaggaagcaatgcctaatttccatttctttccacccctttttgtttgtatgtttgtttgtttcttctcttcaaaatagcgacttttcttcttctctttttgtgtttttcttcccacaaagtattatatttaagttcaaagttcttttgtatgaaagtttgatttttccgggactgaagttaatgaagagaggaaattggatatagctgcgttgtgcctacaggcttgactcatatattcttaccttactgttttttcctaaaagcaaattccagcaagaattcccattttcttttcacttttattgctcacattatcctattctaatttggcttcgtaatttcattttagaactctgcacttgtataactccactattcctttactttccttttatgtataaaggaccagaaaagatcactccaaatgagagaaaggaatggcaaatgatgaacacaaacacagtaaaacaaatattaaatattcctgttaaatgctaagtctggagtgactagaaaatattttgtccaaatcctctttggacactaaagtgaaaagaaagagaggcagaaattagaacttatgtaaggcaacctctgctttgagcaacctttcctaatcacgaagttgagccatgaaaagcttggtaattttatttgtatgggtggtttagtttttttctggagttgttacgtcttagatgaggcatgtacttgttaatgccaattttgttcccttgtcatgaattttatgtgatgaatgctgttacatttatttatcactcaatgctgttttctgcttcaacaggttgcttctttaggagaaggtgtatcactggaagcaaaattattaagcaggtaaatttgagatatgttgctcatgttccttctaagtattctagttttaatgactaatttgttgattgattatctgcaggaaggaagcagctttgcgccaaagagaggtaaattatgagaaaaatatgtgtccttcagagacttgagactggtagtaattgcttgggaatatttactccactaaatgagctaggttacagataacgtgatatgggctatctgaaaattatataaaagtattcaggctatgcactgttttttagagggctaattttcattgtcataggctgctctgaatgctgcgaaacaaacaaaggatggtagaaatgatgaaattgcagcccttcgttcagatattgaggtaaagttatcatttgtttgcaattattttgttcatggtattgtacatctgtataactggttgagtattttttttttccatataacatatttatgtttgtttcacctttttctttttggttaatcagaatttaaaagaagaagcttcaacaactgtggaacaacttcgagaagcagaatctgaggcaaagtcacttcgcacaatgacacagagaatgattttgactcaagaagagatggtttgtcctttgacagtgaactgagttttatggctgatttgtggtaataatatatatttctcttaaatgtatacttttgcttttctcttctaggaggaggttgttctgaagagatgttggcttgctcgctactggggcttagctgtacagcatggtaccactttttccaaattctatcttgctttattgttttctatgtatgaaatcagtggttatttgttgagaccaagttagagttgttttttactgggcacgtaatatgtaactgaaaccaaactagtcttattatgtatttattttttccaagaaataaatagaacaaatgatgtcaagttagtcctttgtttaattccctttctatgatggttgatattgtagcttagtggtagttatatatgcatataatggccagttttcaatgccctggctcagatgtcttttccctttggcttcttttggatttgtacttgcagtaacattttgtttgttgtcttttttttcaggcatatgtgcagatatagctgtgtcaaagcatgaacactggtcctcccttgctcctcttccatttgaaattgtcatttccgctggtcaaaaagctaaggaggtgtcccggaatgcaggctagtcatttgattgaatctgttgtatttatttctattgctgttattttttctccttgtatccttgtactcccaatgaacttttataatgcaagcaggtggtgatgattcagatcggagcaagcctgttcgagatttaagtgatcttaccggggaaggaaatattgagagcatgctttcggttgaaatgggtctaagagaactagcttctttaaaggtttatccctaacctgatttcttgttaacttcaaaatttttgttgtatcttgctttgttgtcatgaaatattcttttgctggggttatctaatatcgtaattaggctcatgacacatgctttgcatgtttcatcactgttgttgaaccatggattctaagtatacttgtttgtacattctttttaatgtgcaacagtaaattttcttctatttgtgttgtggttgtttacttatgctcttttatttgttttctacattaaggttgaggatgccgttgtgctcgctttgtcactgctgcgccgtccaaattccattcgacagttgggaataggtttgttttccttgttttgtcacgctagtttcttgtacacttcattttttaatattgttattttttataggctttatttgttttatttaagcatctctttgagagttaagagctttctgtcatcattgatactttataaaggcctagggctagactatttattttcttctctctttcctttttctttttatatcttctttcactctcccgatgctaaaatcttcagttctttcaagctccatctcattttagtgctctgctttagtatgtattatatttaaggcattgatagtactgtatggcttacatgtaaattgatttgtttctgttagaaaccaatttcatacagggtatttcagtgagctctgccagggttttactgatggatcaatgggaaaaggaacttacgttgtgtttttattttttttttccattttcagattccaaagcacctggtgaacccaagtttttggaggcttatggtaagacaagtattttcatgatctactagagatgtatttcttatatgagtaatgatatgtgcacacaaaatatgtacaaatattacacgttgtgtgacaattcttttcaactatttacattgatttaaaatgggccatttcttttaaaaaaaccttgccacatacacaactattatgatgttttggtgtttttctcgtgtgcatatcattactcggtgtgctacatatgttggtacgtagggtagatatttttttcctaaggttacactttacaaagctaaaattgtttttttttttcttcactatccttgtttacatgatgatgacattgcgtggcatagctgtgttgttatctccaaaaaaaaaatgaattttctccgtaagttaaatgagttgcccataaaattatatgattgtggtctagattggcaggccatgttttcttgaagtaattaaaacatctaaataagcatgtccatttgttctggtcaaacctttacgagttatcttctttccctatttgctgcagatataagtgaagaggaggcagaagatgttctttttaaagaggtatgcttttctttttacttatttttaagaatacaaccttatagtttcttgcagtacaatttttcataccccccccccccccccc

SEQ ID NO: 36640 - DNA, 1925 bp, Cannabis sativa
ggttacagtacatcacggattgaaatccgtgtccgtacagtaacgggacgaaatccggtccctaaaaatatatataataaatgtatttttatatctcgtctttttaacacatgctctctcacaaattttaatttattattatttttttaagaaataaaatacaaactcttattctgtttttttattttttttattttttttactattctcactctaactattttaaactaattttctttatgttgtgaatgaacgcttcggcaagataacacattaaacacaataatgatcaatgaaaccaattcaagacattgcactaatgtaacaacaaacataaactagcaacaagaacagtaaacacacacaaagaacacaagaacttaacgaggttcgaacaagataatagcgaatcaccttgcctacatccccgtccagagaacaaccacaacaagggccttagataatctttattagctgatctttaatgagagattacaacaattcagttatacaacttgagaagcttgcttcagtaattgacctcttcttatggtgatgataacacacaatgtatcacaccaatacaaacactaatgggcactcgcaactcatctctctcactcactaaacaacatcagaattcactctttctctcaatctacttcccttgaaaaacagccaccatttaccgaaccaattaagccttaaaaaatagtagtgcatgagctggtgagtgtgactcaatcaccaactgacagttggttaattcgattatgcactccaggggtagtttaggtattttgatatttggccaacacacaacttatccagcttggccatatatcaaaaaatagtagcataaaaaatgttgtaactgatctggtcttaacattctcagcaagtgagaatgcttagcaagtttagatagagtctgaacttggcttgtggaactgctggattctctttagtactaatcttcttcacttgtatttctttccatgtaatgacctctctaatgaaatgtagcttgatatctatttattttgatctttcatggtatataggattcttcattaagtgtatggccctttgattatcacaatgtactgtgatatcttttgttttgaatccaagatcctcagagaaatcctttaaccaaattgtctctttaatggctttagttgcaaccatgtattctacctctgtggtagataaaactaccaccttttgcaaatttgatttctaacttatgcatccaccaaatgctgtgaatgcatacccagtaatggaccttctagtgtctatgcttccagcatagtctgaatcaacaaaccctgtaatctcagtgtcaaactttgcattgttcttgtatagtagttctacctttgttgtccctttcagataccttaaaatccacttcattgcatcccaatgtatcttccctggattagagataaatcaactcaccatactcaatgcataagccaaatctgacctattgcagaccatgcaatacatcaagctcccaacagagaaagcataggatacataatccatgtacatcatgtctcccaatattctcttagcttcaccaaggttcttcatatcgaattctaaactcagttgatcctttagcatgtttatggcctttctatccttcccaataattaatatgtcattaacaaagagtaacaactacataggtatgtcattatggtatacacaggaatcatactcacttcttgagtaccctatttgcagaatcatgaattcatggaacctcaagttccattgtctttgtgtctgcttgaggccatacaaagatttttgaagcaaacacacctttcagcccctttggtcttgtatccatcaggttcatctatgtagatcttttcttcaagtttttcatgcaaaaatgcagtctt

SEQ ID NO: 36641 - DNA, 4590 bp, Cannabis sativa
tttttatatttttaactaaataattaacttattgactaaaaattaattttcattaatgattgtattcatatccctctctaacaaaatttataataaatattaaatattttttgtttggccaaaaaaaaaagtgattgcattataatttaataaatatttgctattaattatagggcatgcctctccattctagacatgcaccatgctgctaaatctagcaattttatttacatttttagaaaaattcataaataccataaaatcagaggacataactgcaaaactcaaaatatttataatacaatccgccccaaattatggaacaagtcctcaattttattttatttacttatttcaccagacaagaagactttctttgcaataataataataaaacctttatttatttataataaaaaaagaaaaatttacagctgctaatggaaacggcgggacccatttttgaatttaactttattattatttattttattttttatatattgatttatatttatatttattttctctgttctttttttgtttctggttcattctctctttctctctctagattctctctcctccaaatcttgtgactttgtctgaagaaagagaagactctgtgtggactctcacaccatacctgaacagaccaacgagcttcacaaaagatttgaataaacgaaaccaaattacacaatctcatattcgtgttcttaaattatgcttcggattgatttggaggttacacccaaatctttgttctttattttgctttgactgtaagtcatccatttcttttgattttctttctatttttatatatatatatgtatgtattttgatcaaaatggtagtgtatatatatgtttgtgtatgtatgttacttttcttgttcgaaatcttggtggtttgtaaacagtggttttgagatttttggaaagtttggattttgtgattgtgtttttcttttttttttttttggtagatttagtagatcattttttttttggtggtttcagcaatggtttggagtatggtgttagtatttttcataacaattttgaagtgtttttctttattctttggtaaagtttgggattttatcaaactgggttttcatagtttttttgttgtatgtgaagaaatattcttgcatgaattcatctttttcttttattttaaaatatttatttttgttctcctgattaatgggttttgtttagattcttgatttggtttttaatatttagtatcagattggttctggttttgcttttgaattgttcttgttataatgtcaattgattttagaaaattttgaatccatggaatctctatagtttacacagctcttattctatgaagttaatcagtatatgctaatccatatgaataattttaaaacacatgctaatctatatgaataattctaaaacacatactttattttttttatttcttattaagaacattgctcctttttgggacactattttgttttttcttcttaatgagtcaaagttgggtaccaatttcaacggttagttttctggatttcttatttttgtagattatatgtgtagcatgtgtcataattgtggtgtggaactgaacaagccaaaggaggcaaggaaaatagaagagaatgtgaacggtttagaaattaccacgcaaggctccattacgtcttgcaaatgttgtgaggttaagcatgagcaaggaattgagacagatagtagaagaaacagttcttatgtagaaccaatgatcagtccaatggcttctttgtctagcagcgatcggtctgtatctagttgcagtaagttcctttcggtttgctattgccatcttactaaagttcaattgtttcacagcttattatgggctctattgttttatacttttatttatcttctgtttttttaggtgagatttcggttgatatgaacttacacgataggtatgtgtctttgcttctttgaattcggaattatgtttatcatctgtatcacttttgggtgttttattcatatgtacttatactacttgtagggctattcaagaaaatggaagttatagatcatattcacatatagaaagcaatggtaagactctaccaaagagtaatggccatgaagaaaaagataatggtgttgaagcaacaaacaactccgttgatgaagaaactgaggattcaaattcctttgaagatgatgttaatgcccagatttgggatccccctgaaccagaaaatcaagaagatgatttggtgggcagtgtggctttcaatgacgacgatgatgaatgtggagatggcacgccttggggaaagccaagttctttgagcccttcaagcagtgacagaagtgggaattataagtttgaggaaaaacagagagctatggaagaggtgaagaatggaaagtttaaggctcttgtttctcaacttcttaaattggtagatgttgccccctgtggacaagatggtgagaattgggttgatatagttacttctttgtcatggcaagctgctcaatttctaaaacctgatgccattgttggtacaattgatccaaatgattatgcgaaagtgaaatgcatcccaactggtgctcgcagtgaaaggtaacagagttaggctgtttgtaattttaatgctcttcagattttctttcctcagtttaagatcagttaattgtttcgcatattttctctctgtattttaataatgttcattctctcagttaaatgtattttcaaagtatgtttcaagcctgaaatttttgatgttgcagccaactaattcaagggttggtcttcaagaagcatgcagcacacaagcacatgccgactaaatacaaaaatccgaggttgctgttagtccagggtgctcttggccaatcctccagtggattgtcatcatttagtactatggatcaggtaatttatcttaaacatcatttttgatcatgtgaagattatgcttcttactgatcttatgatttggttcaaacaggaaaaggattacctgaattctgtgattgaggttttagcctcgtgtcatccaaatgtgattttagtggagaagtctgtttctcgtgatatccaagagtacactctgaaaaatggaatgacacttgtctttgatatgaagctccatcggctagatagaattgctcgttgtacaggttcgccaattttatcgttagatatgatggcaagtcaaaagctaaaacattgtgactcttttcacattgaaaaatttgttgaggaacatgctggttctaatgagggaggaaagaagccaagcaaaacattgatgtttattgagggctgtcctactcgtctgggttgtacggttagtattcttttctttgtttaaacaagaattgcttatagataatttagttatttattgctctagcatgcttagccagtaataatttcaacagggattcacattgctttggtgaattgattttttaacgtcctaacattgtgaagtgaagtaattgttttttgcatgatatgaccttacagattttgctgaaaggagcaaagagtgatgaattgaagaaggttaaatgtgtggttcactgtgcggttattatggcgtatcatttgatacttgagacttccttccttgttgatcagaaagcaatgttttttacattatcgtctgctgaagaggcaaatgtactgtccagggatcaagaacccactaatctagacattgatgcatcctctcctcggcttgaggcttctgctgaaagtaagtcacatgatattccaatatccagtggctttaatgatggagatttctacaactccaacactgagtcagacggaaattccctgttttatgaaccatatagtcctgcgatactgtctggcttttcctctctttcagcttcttttaagaaggctgttggcgaaaatttccctcttgcatcttcttcttaccagtcactttcttcataccttggtttccctgaaagtgagtcgaacgataattgtatcaaatctgtttctggtttaacatctcctaaggatcttgatcattatgaggctgaagataagagcagttctgatgaagagaagtctccaaatgttgaacagtctgattcttctaatgaaagctcggaggcatctcaagaattgaaaaatggtgactatgatgaggtgcaaaccaaggatggcatcaatggaatgttggattcccagagtattttggttttaatgtctaagcggaatgccttaagaggaactgtatgtgagcaaagccatttttctcatatcatgttctacaagaattttgatgttccacttggacagttcctggttgataatttacttactcaggtatttttttgaagaacattttatcattgtttcatctcttctgtcactaacttctgtaattccctatttcataacacatgggttagattatttgaatttgaatgccactcatgaaaactatatgatgcagagaactcagtgcgatgtttgtggtgaactgccacaagctcacgtatactactacgcacatcataagaagcagttgaccataaaggtccagcg

SEQ ID NO: 36642 - DNA, 4981 bp, Cannabis sativa
atttattttaaattacattttaaataaaatgtaaaaaaattacattaaaataattaaaagaattataaaagtgaggttgaaaccgcgcgaagcgcggcttagttccctagtttttttattaaagaaatctctcaagcaactctacaaattatgcaccataatttcacatcacattaaattaatgatttttttttcgtaaaaagtaacttttttttctcaactatatatatataaaaataaaaaatttatgtgggatggaccacattgcttacgtggcaagaccattccaatagacaatcccattagatatgctataaggcagattaaagaaagcaaaagcaatatctaaagctctaataaaacccaaaggtacaatttttctttattcttattctactatcccctttgcttgtttaactcatagttgttgtaattaaggttcgaacaacctttctgatcacaaagtacaataataacttgacaaatcttaatgctaacacggggtgcaacaggtgcagatggacaaaagtgaagacactcaaagtacaatattgtcttgtaattcattcatgtacaatgtcgaattgaaggttgtaataattgctattacgtatatgacatttgtaaaatagcattgcctcgcgtatcttcacaaatgcactgtcgcaacactcttgttggaggtttttgtgtcgagcttagatggttcatcttttataaataacatcttaaaagtaagaaccatcgtattaaatataaggcttgtgtttagcaacgttgattcgtcaacactggtcaaaaattgaacaaatttcaaaaccaaaataaccttcaaagttagcatgccctatttcctagtctactcaggggatataaaatgaatgagaaacaatactgcataactactaatgtgattgttacatcgttctctcgtaaatccatcaagatagaaattaaaagttcaacatggctacttcaaaatttataacttcgaggtacctttggttggaagagtaggatggatattttcaattacttttagtatatatatatagttaaaaaaagttaaataaaaactaatacattattattaaatcggattgacctttccctcattttgtggaaataatatggtttataacgagtagtagcttatcccttctagtagattcaccgttgctttataaaatgtggctaattcctacaagtctttataacatgtggttaatacattaatcattattataccagcttgcaaatgactagataagaaagagggtatgttcagggcttctcatatgaaaaagatagtaaataacatcatgtgtgcaaattagtgacaagaattttctgcattgatataggtgtgatgattattcaaagtgaatgttttgattgaaatgaattcttgaaacacatacatatcttatataaaatcaagactgatcaaacctgctattaatgcagctgctcaatgttgcattgcaaaagattcaatgaagcatatgtacttgcagagctgaagggttgtgaaaaattgaaatatccacaaaattacacttataaatttctcaactatctaagaaaagacaaagaacatgagctttcgaaattcaactatggcatacaatttcggagatcataaatatagatggttgcagacagcttacacaatgcaaaaaacatgatccacaatcaaccctgagatgaattcatgatgccaaaaccaccatcagtcacaccgatcagctaaaacaagaaagctcctggccacagactctactgctaccgcaaaaattaaaaattctgtattccgggtcctcacagcaaagtccacacaagtgaacatacagaatctgaaaaaatatcaaaaacatgtgtcctccttattggcctgacaatgagatattatgcatagcaaacagtggagccagaaatttccatttcgattcatacatacaagaagaaaaagtagaactaaatttccagaacaaagacagaagatatatttgtcatgtctgggtagattcatgaagtgaaatttccccaaaaatttccatataagtaaattgattcagctggattatattttatagtctgcatgccataatcaatagggaactagaatgaggtataaaagcattcaactggtttgaagcaagtcaagtttctttaagaaataccttatttatcaagaggaaatagagcttacaaaactaaaactatcataagaataagtataataactaaaagaagtaaagcattgaatcacatattttagaatgaaagcagcatcctagagcaaaataacatatctatctaaattaaaacaatatataggcttaagaaacagcaatcatcatagcttcttacatgctagtttaaagcgcaaaattcaatagcatatatcactttaaatcttcggtgtcaaatatgactaatttttatttactttcccactggattgattttaagagctctgtgggcattttgctcttaagtattatgggctactccacacacatacatatgacagactaaatatacataagaagaactacataaaaagtactttgtcaatttgctctatttcttcttgttacaggggtcttctcctgtatcccttcttcagacaaagctattaagtagtctttgttgaggacttttattattcttcaagagttcatgtctcatttaagttgcttaaagcttaaaaatggcacattacatattttcctcccttctcgttcattaaaatatttaagttgcttggatttgtttactacgttaacaatggcttaacaatagaaatttatgaaaaaacctttgcaatgcctacgaatacaaacataaacatgagttaaaacatttaggagaaagaaaggggaataaaaaaagagagatgacatgaatgagcacaaacataagttttaaaaagggaggtaattcacctttaatgggattgctcaatgtgatcagcttaaaccaatttgccgccatttgctctatcctcacaaagtagagaataacattcctcataaaatggaaataactttccactcagggcgaatacaaccctggttgagcagagaaattgtgattctaggattttgaagaggcaaaaaaccatttgcagccactacgacggctaaaagtccacaagtcaatcagtttgtgtccctgctttcacccggaagctgagtctcctttacatccctcaaattggattcctcaagaactaaaccccggcgacccaaaagaacaagatcaagaagctttctcctagcatcataaactggattggggtgaaccaaacatcccctatcataagcctctctcagaaaaacagtgtgtctcttccccttggttgacaaatagaaaatcccagggtggtccaagaacaaatcccttatattcagatcaattccaaaccatttcctgaaatgacttatcttctccacttccaccatcttctcaacagtcaaactcaaaaattcatgagctatagcaactgcccttttctccaaagccatcgcagtagcctttgactttgatctcattgcccctggaagcattttctcgtatggccctacatatggcaaactctgccacaagttaaccttagccttaaaattcttagacaacctcatcccaggagggtatccgtgcttaaaactgaactgaatcgcagtcctctcaacaccacaattctctttacaacactcctcaactctccagttatccacagccgaagtaaaagaactagttttattcctaatattatcaaccatgcttagagtatgagtaccgggttcagacccatctaaaagcttgaacaaatgagggttttgggatagtaccgagtcctcgaagtcgtcaggcaacccaagctccctccagaccttgaaaatggctcgaagcggcaccgttttggaggtggacatggagagaaggcggagaaggcgatcaacgacgagggggagagaggcggcaatggcgttggattcttggtgagaaatgcgaagagcatcattagttaatgcgcacaagggttgggacttggttgggtcgtagaagatgcggaaaatgtgagggtatttgcggaggaaggaggtggagccgcggttgaggtggagcttctgggcgagcttggagaggaattcaagagaaacaacggggttttgagggttagcaaggatgaggtcttggatggagataactttgaggaagttcttgtagttgtccatgaatttctcgaaagtggggtctctagctctggaagacacgtagtgagatgaggttgttttcaatcggacgataatggagggagagatgaaatggtatgattgattattcctcatgaatcccactatccgactccccatcgaaatcattcccagtttcttcctagtcatattcattgttgcagcaagcaacgcctacaaatggtttaacagcaatatgttcatgttgcttttatttcagggagagagagatgttttttttttttttttttgaagagaagaagaaggagaaggagaaattgataacagtttctttctgaatttacgtgaatttcaatttcattttttttagctagggaaacatgtctcctctagcaaaaaagagaaaacaccctcttctctagatttgccagcctttaccttaggcctctgtggtggctcgggaatggaataggtgagtggttgctatttggcaccaccttaaggttcttataagaacacagataattttcaattaaagcattaagagaatgtttcccactcttacatttctatatcatcacccccactcttcaatttttgatatgcatattaatgatgggcagtatgctataactcttaacttacccgattctaaagtgaagtacacctcttcacagtgacagaatcttcaacatctcctatctcaaacatgttattcaaaacaattatatctctcattgtgtagcagaatcatt

SEQ ID NO: 36643 - DNA, 4983 bp, Cannabis sativa
  modified_base (2047)..(2052): a, c, t, g, unknown or other
ggcaatgagtggagtagcccatgtacttatatatggctcaattctctaccatttatttcatgtgggacaatgtccacaatagtctataagagtaacaagaacatgaaatgaaattaagcaatgttcagaatctagtaaattgatcagcaaaggaatgatctattgacatttctgttgccttgttaagtcaaactagctagtatctattgaagtttaatgagaccaatcaatcttttcaactttcaatggtcatttacaaaatctatgacctttgtttctctgatctatctcttaaatagaattagttgatgttataacaccttatgctccttccatttcttttttactctttctagaatctgaatcagtaaaatgaccttatataacaacttctaaagataatatttttcaataatcatatgttgcatatgatacaaagagcaatcttagcctatatatacaaaaggtattaaactaacaggtggccttagttgaagtaaaataaggctatgattaaggagattttcaggacaaaactattgaaaaaggaaaatatctaatgcataagtaagaatctaataaaaaaaaaacactttagtctattttaattgacatattttcattaaaatacttttttttttcaatatgtaattattaatgaaaactctttaacttcttattttttttcttaaagaaaaattatttaaatatggtttaaaaaaaatcaaaaaaccagaaaaatttcccacaaagagaaaaaaataatgtagcaaatatagtgtttatacaagtgagtcttattttgttaggctgaatttgatagtacatataaatgtccagatatttcccaaaaaatatgcaaaaacaatattattgcaatccttatctagaaaagtaattaataataatacagcttacaacataaacaatagggcacaagtatatctttaatggggggggctatatatatatatatatatatatgcctacatctaaacaatcaatgaaaaacaataaaatttcagtatgtaaaatgaagtttttatattacaaaaaaaaacaccattctttcactgtaaagaaacatgaaatataagaaagttcatagcttgaaattggttattggtatcttttggggtgagaaatcctttgactacagctcaaagagtatcatagcaaagctaaagccaccaacatggctgtaattttgccacaattaatttggtcataaatgtgtctcctttagctataagaatcactacttgacctaatatttgtcctaatctttataaccatatatgatacttaacctatatagagccttggctaaagatttatttctctctcccttcaaaggtttaatcttttgcacaacccaatttacagaatccaaaaaaggctcactacagtggagatgaaagtagttaacataacacaaccagaacagaacagaactttcaatgtttccacatttttagtcttattttgttgcaaccatacattttgttttacttcaaaggtactgtatatactatatatatacatatctataaaaagagagcaaattactaaagcaatgatgcaatgcaattttctataacattgtcatgcaatcatgctaatatgcatatacaacagctacagtgagaagttctaaaaatgctatttggcttcaaacagtgatatccaaaaaatatttattatacaactaacaaaaattacttaagatagtagcaaaaggtattaactaatgcagtgcatttaatatcatacaatataacaaaccatttaagataacaattctacaaaaaatagttctacaaacttatcataaccaataaatttaagcactgtttggacttggtatgcagtattcaagaggaaaaacataacaaaaaaagtaaatatttcatcagaattattggagattagtagaagattaaccttggtaaaacaaaatcatacgtttaggtggcgtttggttggaggtaatgaaatgaaatggaatggaaatgaaccgatttttattccattcttttgtttggtnnnnnnttaaagtattggaatatcattccaatggaatggcctttctactattttggtggaatgactatttcattttgaaatggaaggataaaccattccaatgcaacatttgaaaaaatttaataattttgttaatcaattttttatgcattttaaattttattccattccgttcctattcctattctcattcctatattttcattcttctcaactaaacgccacattaatttctaataagccaaatacaatacattagtaaccaaaaatagtggaaactatagacacgggtggatttacaaacaaatggtctatagtttttggctataaaaattggatggttctctttacatatccaaagttcatgcaccaattcaacatactagtctaacttaactatcttcctaatatatattacttctctaatcactttgttttatcaaataaggattaatctatggtttagcttatagtggtgtaacttaattttagtcaagtagcattatttgcaaagcatggctcttgtatttataatcttcttttacaaactacataaattattttcttgtaaatttataatatatttcctctttatacacaaataaagctacaccaactggtactaatgtactatattactccaagaattcgttataaataggaataagaatggaaatagaaatagagcaaaatgaaatttaacatatttcatttttaattggaataattaaccatttcactaaatccatggaaaagttactctaatattttaaaatgcataaaacaaatgagaagaatgaaaatagaacattttccatttaattctgctttattactcttaaccaaatggaacctaaattactaaacaacttttaaagcataatatattataacatactgagagttctggcatctatagcccaatcacaactgcccaaagttaataaattacaggtctttggtatctgagagacttataattggtgcagaaaacaaagaacatggtaaggtttgttattactttagtaaagattttactctcatttcaagtataacaactgtactattaggctttttgtaaatggagttatatatctatttgcctagcttaagattatctaagttagattaaatgccattaatcagtaggaataatattttatcaaatacaagtagtacaataatactcaatattataaaaaataaaataagggaacttagaacaaaacaaacacattcttaccatagaagtttaacatttctgattgtataattcaaggccaaatcatagtgtaggagaagataataagaaaataaaaatattgtttcagtatataatatacatatatgtgtcctgagtttatacctaattatctttatgatttttcattttaattacttataaaagaactctttttttaattaaaaaaaaactcttaagaaatagtgattattttacaagtacacaaaaataacaataaaattataaaaatacgattttaaatatttttatgatttttataattttatttataaaaaatacatattataaaatttttacaaaaaaaataatacattgtgtaattattcctaagaataataccaaataatgttcaatcatatatatactactacaatatttcaaaagtttatgatacaccttagggttaatttaaatctatttatttacaatatttagtgtttgcatttattgctaaattattaataaattaatttaaggtctactctacatcccacaccaatattttatttatttttcatttttagaaggaattgggaaatatggcacttaataataaagtactaaaatatatgtatatacatatggattctaaaggtcatatccacacataaatatcccaactttttctaacctattctattacctatttgtctgccattaataccccatcttgctccatatattcataaacacctatagtactgtactagctagggttagacaaccaataataatcccttttatatttgttaataaatctttaattaattaaaaccctttctctatatacataactttcccactatttcatgacttttaaaacaacacaaaaaactcaaagttattagctttttaggagcttgagccaataatacctatacatacatatagccccattgcacttcaattttcttcattttttttataacctatttcaaagtttccaaatttattattaagaatttagttatcattaataaagttaacacatttactcattagatcttttcctcaccatgcacttcttttctaaccattatatttacttaatcattagatctttcttcataataaatagttattagctaagagccaagaatctatcaaaacatgaaaagaacatatttttaaacagtaatggccaatgtgatcaattcatcaagaaactacaaactacgttcatgcatggcatgtttttttttttttttttattaaaaaaagaaacttttgaagacccttcttgtgatttcactcacatcatttcaaaacataatctagaaaaccagttgcacagtgattatttgccatgtgttgtgattggaaagcaggaaaaaggaaaagaaaataagagaaagagaaaagaaaaagctagctatatatactatatatacaactactaaattactaattatatgtaaagcaaggtgttttataatttttcattataaatttttgattttgttttatgggttaaagtgaggttgttaattaagttatgttcctctcataaccaacacatgacatagccatggggaagttaacatctgtcaaagacttccttaacaaatgctagtgagaagggaaccaaaacaaaagagagcaataaaaggagacaaccagccgatcatggaatcatatcacattattcattcacaacaatccatgcaggaatc

SEQ ID NO: 36644 - DNA, 8836 bp, Cannabis sativa
  modified_base (4515)..(4518): a, c, t, g, unknown or other
  modified_base (8717)..(8723): a, c, t, g, unknown or other
ttttttttttaaaataaatttttacaaagttaaaaaaaaaaaaaaaatctggcgggctgtatgaccatccggctcccttagcccggtctggtattataattaagaagtttttttttttttttttattattttacaaaaatatacgtagcattccaaataaaaattattggagcaactaaactgtatattttaaaaaaaataataataaaaaatagtatataaaataatttttctataattaaaagataaataacgaaataaaaaaaaataatctatattaaaaataaatactcttaattaaacttatttatatttacttataatttccataactaaaacaatattaaactcaaaataaatatatgagattattgtgataaatatctagttagatgaatgtatggtaaacatgaaagtacgtagtagtaatagtagtagagtagaagaatatatatacaaatagttatgttaataaataatgaattaaattggaataatcacctattagatctgaagggacctttccatcaccaaatctgccggtaggtactcgtcccctgaaattttcaccataaggagcgaaatcacacttgaccagagtcttaagagcgttgttgttccctgtgtccatgatcgagtctccgaacacgatcactgccggaactgtctgatttggcggtaactttatcaaaccccacgatggattaataaaaaataacaatactattgttgttattattatgtgacgataataaaaacaagaagaagaagaagatgaagccatcactttccgcatcatcatcagattataactatatattaaacctatctagtacgttattataaatctttgttattttcttatttgtgtactttcacgaaacttggattgtatgtggaagagagagagagaccaaaaacaagaagaaaggaaaatgaaatagaagggttatgttgtctgcctcatccagatactttctgctatcatttatatgcaaaaataattgaaccccactccttattttattattatatttaactcattattgtttttataagttacaaattaattattttaattattatcagatttatttactaaatatttcacagctcaaattctgatttttaggaaacggcgggaggtacgcatatttaattttttttctttgcatttatatttatatatctatacgttactagctattgttcatatctctttagatttaattatattaatctaacaattacatgtataaaaaaaaaaccataaatgaactagcaaactatataacattatttattttgtttttgctaaaaaaaaggatgtgcattatttagcaaaatagagcataaaataatatgtaaacaattatatacataaaaaaaacaatgtatatatggtacatagatattaataaattaattaaacctctatatgtaatcctaatattttgcaatatatatttattcatcttggtgatcatgttctgttattaattgtaacgttgtaacaagtttaattattcaaagttattattatttaccatgttgattagagagagggaaaacaaaaacaattaatctttttcattaaaaaatgcatttaccacaaaattaataaattatatatgcattaatggtaaaatatataaatctttcctaatagtattattttattttaggttaattagtatttttgtcctttaaactttaacatgtatcaaatcacgtcccgtaaactaatctgaccgttaaaaactttttttaaattattgaaattgttagatttaaagacatttatccaattgcattcaattttactaattcagtatttgtttatggacaaaatcatgctcctcagattttggtatttaccaaatcatgccctcaaaattttgacatgtaccaaattatctccctgtattttcatccatgttaaactttgcttactaaaattagacaaaaatccttaaatccaacaattttaatagtttaaaaaaatgttaataaccttaaaagttcaaagacataatcttaattagcgtatgataagtgaatttttggaagctacgtacccagccccaggtacatttttttttatatttaatcaaaaattagtgcctcgctaatctattaaagtagagaaacattgtctatggatagatcttatattaatatataatataggattattattattattattatctatatatacacgtgtgagctgttataatcagctgataattagattatcagtttctattaagtactaaacatatggacaggtttaggtggattcggtcggttataacatgaaatgtcttattaacaaatagagacaccaaaacaaagaagcttctaattttgatattttcttacagtaaagaaaatcagtcaattaattataacattttatttatatataccttatcatatatgggaacaattcccttatatgataccaaaatgtgtcagaagaaaaaattctcatggtttcatgctctttgaaatcaaatcgaaattgtctagttttaattttcttactatctatgtatatataacagaatttaaccctaataatagtcaaccattcactgatctgttgacttttcctagttggtatgatgtgatcactgcatataaggtcgtatgaacatttttaggacaattataatttgcttaattattgtgggccttgcaatccgaattcacaatttttttttgtaacttatatatttaatatgaatacagcaacgttaattatctagcatactatgtgtataaatatttataggataattgtgggaatataaacacattatgttacttcacaaaacgactttattcttttgataattgtaataatattgaaattgtagagatacattagttaaaaatgtgggagaggtatattgcaaaaatgatcaattttttatgaaatgaatgtcattttgaataaagatttcaatgtatctatagctaaaaaaaactcgtaaacccatcatatctgtgtaattcacatcaaatattatactaaatatcacattaaataaaaacagtttatttaaaagatttcactatgatatataatatgtattttatccaccaatcaactaattaataaatattttttaaaatcaaattaaaaaagaaaaagaaaaagataagaatgagaaaaaataagttatatatataaatatatataccaatttagtaaaaattcaaaatctagtactattaataatatataatttagtacaccaatttgtatataatttgatatagagaaatatgatgtgagaattctatactaattgaagatgggcactttcatcagcttccatactctattcgttgaaatacttaattaaaattttactttctattttattgcaaaattttacattaaagttacatcatatattatttttttttataaaaccgctaactaattataaaatatcatactgtagtgttaggcactttaataataaggtatcaaataacaatagtgtattaaaattaaatgataagttgagaaatacctcttttttgtatctattaataaaaaaatactcttatattatattttattaaaatatatatttttttgggtgggttgcccaatctattttcattctctacttaaatttagtatataatttacatgaatttaagtggtctaaaaaataaatatatcttaaaattatgaaaataaaagtaaaaattaaatcaaataaaacaaagtgtgtgtttcttctaaaatgaattgttgatattgaccctagtggtacttgaaatgaataaatattggcgggtcgggtgagcaccaaatttgggttgaaagagttgtctcatcgctactcgtattcgtaccaaaaaagagttatgatgtgcagagagggcgttggcagtttggcctgcttctttgtccttgagatttaaatctactaattaaaatactcatttcttcttctctagttggtggactacccctaaattaatcatctacctatacatctttattataaattattaatcatgctaatcctatgtctaattatctcttctttccataaatctatgtgtaataaatctatgtgtaataaatatataattatcacctttaagttttctttttcctaagagaatagctaaaagtcactattaatacttaataagtatttttcatagtgtcatatcactattagtgtaattaagtattaagaatttttttttaaaaaaaaatatcaataaccaatcatcaaacaccatgtataaaaagtgtttgacaccacttattccaataacaatgttattttgctaaacacttaatccaaccatatatatatatatgtatatttatataagtcactactacttaattcatattacttaccaaaaaaatacaagtaacgtgagaacatgcatattattaatgtttaataatttcatacttatgagttatgataaaagatggtagctagttatattattattattattatnnnnattattattattattatttaagttccagctgtgatgaattttgacatcttagaaattatttaaaaaagacagataacttatgtatttgtttaattaacaatagggcatttatttcacacttgaatgtaaaagattaatgttcagttaaaattaaaaacaaaaaaggtaagaaattaatgaagatttaattccatattaatcaatagttagccgtatataaccccccaatacaattatatatatgttgtgtgggagattcatttattttggtcctactttatttgagatttattaattaatcaaaatctgttttagtatcatggactaacaacttcaaatttggacagtgcattttttataaagtagccagcattgaaaacaataaaatcacaatttttttatatggaatttttatgatttattgaaaatttgtttttacataattaaaaaaaatatataagattttggacatgtaatatataaatttcttaattaattaccaataaaatattacacggttaaatgaacatttgtcatgatattttttactgattataaagtgaataacttaggatatgagctaaattaaaatatctattctatataaaatgtggttatataacagaattcttagtttatgagaaattattgagtgacttttttcaaattttgatatttacaattagttaaattttaaatattattttaaattaaatttgaatgttatattttaaccagatgagcattttcattaattccgaaaataaatttagaacgaataataattttttttatttactattacaaaatataatagtaatttttgtttttatttaaatcactattatgctttaaaatttcaacgattatcactacattaaatattattaattttaaaattatgatattcaaaaaacctaaaaaattaaaataaaattaacatacgtgacttgacacgtaacttctatctagtaattgaatatatgtgtatatatatatgcataaaacaatttattctcgattgtatataaatatctacatttaatttatgatggtaataatacttaaaattatatttttagaacttccgtaagtacttaattattaagtgtcaagtaaatgattacgtaacagtacttatataattagtccatttcattatatttttattttttatttaaaaatcaatttaaatatattaataaaaaaatgacacgtaaataataatatgacacttaatcattaaagtttcaaaaatataaattaaatattattattatcaaaaattaaatttaaatatttatctataactataaattaaatttactatttacacagtaaattactcaatataatcagacgaataagtcttttgagtaaatattccacgacactaataaaataattagtactcatttcatgagtcattactcattaccaatacaagtaataatatacgaaagtaaataatatacatattgtgactcgtgggaattgctgacaaaatcaatctcacataagattgatctatttcgtgtaatataataaagcattgttaataagagtacatgaaccagccaatattagctacacaaataaggatagttcataacaaaaaaattaaaagtcctacctaattagaattatgacattaattaatttaattaattagtaattacgtacagccatcctagaattaatattgatttattcttacctaatgaggaaattaaagttattatcgttgcaaaagatgaatagaactcaatcaagtatagtaagctttcggaatttgaaaaaatatttatactaataatcaataatgataaacacactttgtcaaaaaaaaaaaaaaaataatgataaacacacttttaaattatatattttttttgtacattataatatgtaattatttataatcatatatatttaaaggtgaaggtcttaggtagggatgtacacggggcaggaaattaacggggagtgtttcccgtctctatcctcgttaagaattttaattctcatctccgcttattctcggagatgaggtgaggaatcatttaatggggcaaggacggggcaaaaaatcctttaataaaaaataaaatttaaatatataaaattgttaaactacttaaaaatatattacacattaattttttttttcaatatattaattattattcaaaacagaatttaaaatttatagaaaggatactaatatactaaaaaatatcaacataaattataaatattattagaaatataaataaaatataaacgagtccccgaccgtcgagatggagagtgtcattcccgtcttcgccccgtttaacatttggaaataaaaaataattctcattttcgtctagacagaaaatttctaccccattaagaatgagtttccgcataatatagtattacataattattaataatgacacaatatagtataaaaatagtgtgctggtgtactctttatgtatataatatatacataaataccctagtagtatcgtaccaaaattgattatcttaaacaagatgtcatttttcaaaatctaatcaattaattaatcataataagatgttttaccattcaacattaattataaacttcagttggaaaaggaaaatgttggcttcaaagctgtcttccatgacaattctctaagggatcaccacaaggttggccacgttgcccaaaatcaattaatatatctctaacaattacatacatttctaaaatcttaaaatctaagaatatatatattggacaaacaagcagaggtgatttagactcttattatatataagagataagataagatataaatagacctatatcattaatcacttggtttaattaactacacatctgctaaccatatattttatataatataatatcaatcactattatatataattaagttttatttaaacagtaacggttatcatcaaatatttatatgaatattatgtattgtttgacaactgcatgatcttaaaatcaaaataagattccttttctctcactttctgttgggtctaatttaataaaaatgcaatatattgaaaagttgatataaatgcacacttgctatgtacactatattgtctccttcatactgctcatatgaatcccactctacattttggaccacacacaatactttcaaactgtaagtaattaattaagcactgtcattaaagtaattagttaattgttaacataatgtgtataaaaaataagaaggaatttattatatatatacatgtttactataaatgtaacaaatttgtttttcctttttcctttatactttggtgtgaatattctattttatgatcattagtttcctatcacgagatatgcatgcatgtatatatgttttcttactattatttatatgggaacattggtcaagtgaaatttaattgggttctttgtttttaatttctaattagaaacttcattaaaaagcaaacattacaaagtcataatgggtagatattattattagagatatttgcggctaaacaacttaaaccttaaatttttaaatacttaaccacaaaaattaaaattttgatggcaaaacctactaaattcccattctggttattttttacacttttgttaaaaaacttcaattaagtgctacagtagcctgcttaggtgtacacttgtgtacatgtgtcaaatttttattggtccacacaatattaactattaaaaaataatttaaaatatttaaaaaatttaaaataaaaaaacaattatatgaaaaaaatatattttattttattttttcttttttttctttcttcttcttcttcttcttcttctttttcttcttaagagaacaaaaaaaaccttaatcttcttatccattccaaccgcctccccattcgcttttttccttctttttcttttctctgttattcatctcattatcatcatcaccaccacacagccactattaccaccaccaccacacaaccaccattacaactattgtcactattttttaaataaaaaaatagaaattaaattagaacaaacattaatggttggaggagataaatcaagagagagaacgtggagcttcgactccgacgactaccacgaagagagagagagagagagagagaggatctgggaaggagaagatcgagagagagagagagannnnnnnagagagagagagagagaaatagagggcaggtttgagtccggcgagggcctgggtgctttggctccagcaccagtgaggtcctgggtggcgagacgagagagagagagagagag

SEQ ID NO: 36645 - DNA, 3126 bp, Cannabis sativa
  modified_base (732)..(761): a, c, t, g, unknown or other
gatggcaattacaattttctctctagatttgagattatataagttacaatacaaaattcttgcgtttagactaagcttaaacaaaagccactaaggctagcttagtggtgagggaggggagaggtcatgggttcgaacccaggatccttaaactattaagcaaatatatgattgtaaaataccattacgctacactcaaaaaaaaagactaagcttaaacaaagctactaatagtactagccgaatcacaagtagcctcaaatacacaattgtttctattgcactaaatatagtagacaacagctgccacaattgatcaaaccaggctgccaaaatttcagtctagccttccactcctcaaggttgcaaggccaatcaaaggaccccatcatcctaatataccaagagatttcggggctctttcgtaaatatagcaagatatataatcaatttgcaaggatatttcttgctaacaaataatcattcagggtcatttacaaaatgtacttgtatttaggtatcaaaagtttgtttcaaacaataccattatatcagattttagatgcagtcatcggagagttaattaaaattcgtgtaacaattacatctctaagtttgataagctaattgaaataccatttgctatcttaactcagtttaaactcttaacaaatttcgttcttcatataaattgcattaatctatcgattccaattattattattattattnnnnnnnnnnnnnnnnnnnnnnnnnnnnnnattattattattataaaatatttttcaattagattttacttcaattaatcccttaaatgtatatatataaaaatttaggcaaaaatattattatgatattatcatacaacaatgtaaagtcatgagattggagaaattaatatttaaattaagaaaatcattagcatattcataaatttaaacaaataggtaagaatattattatgatattattataacaacaatgtaaagacatgagattggagaaattaatatttaaattattaaatcaagaacatcattatgatattcatacataagaaaaagaaaaaaaaatgaaaataaactttttctaaaatgtaaacaaactaataatcataacaataatataagtaactgtttaaaatatccgaccaagtactctttcctttctatataaaatatcttcgtaccataagtttgtcttttcctttatcaaatctaatttttctttgaatttagaaatatcaaaatcaataaaatcatcattatcatcactatcatcctcttcttcaacgcgtttataaatattttccaaatccaaagtaagagaacttaaatcataaataagataagtgaattgaagaagaggagtagtagtagtagtggtgataccataaacaatctttgactttgttttcatagtaataaaattcaaccatttcaaaatcttgtgaaccactctagtcttaccattcttcttctctagctttacaaattctttctcaagaatttgtttaatcaatcccaagacttctccaaatttctcatcattataacttaattctcttttaaacataaatgtcaaattaacatattgaagacacaatgcaatatctgcttttcgaatagctttacgttgtaattttgataccatggttattgatttgctaatgggtaatacaaaataattcaatgaatatattaataacaattttggtatatgaaagaaactatttttatagtagttttaataatcattatcctatttataaccatattatatattatttaaatttgatctttaaaattataataaatatctaatatatctatttatataagataagattattgtttcaattagtgtgataaatatatcatattcggttataatttaaatttgggaggatgacatattgtacaaaattactttttttatatatagaatttaaaaaaatagaaaatcgttatgtatatttttcagctatctttctacatttatactttattaaaataataaataaaaataatattttttttcttctttgaaatggaataatatccatatttaaaaacaactaattcttcagcgacaaaataaatttaatcttaaacatagaataagatcatatgatatttatttaaagatttttatttttttttaacaaaagaaaatttgatttttgattgatttatttatttatttaaatccgatttttgctttatagtatcacaaatattttaattttgtagtaacaaaaagttgattattattatttatttatttattaattttttgaaagaagtatttattttttttttttttgagatcaattgattattaatattattagtgaggttttagtaaaaaaaaaaatatatatatatatatttaattttgtacgcgccaaaacaaaagattattattggtcaataattcaagacacggatggcgatccgcattgaaacaccaaattaaatctacacccttgattgaaagaaatctaacgctccaaattgacactcactcctataaataccgaactcaaatctaaacatttccatcactcaattttcccgagaaacaaacaacttcatctctctttcaatccgatatatttgattctcaatggctcgtaccaagcagacagcaaggaaatccaccggaggaaaggctccaaggaagcaactggcgaccaaggcagcaaggaagtcagctccggcgaccggaggagtgaagaagccacatcgtttcaggccaggaactgtagccttgagggaaatcaggaagtaccagaaaagcactgagcttttgatccgtaagcttccattccagagattggttagggaaatcgctcaggatttcaagaccgatcttcgattccagtcgagtgcggtgtctgctcttcaagaggctgcagaggcttacttggtgggtctgttcgaagacaccaatctgtgcgccattcacgccaagagggttacgatcatgcctaaggatattcagttggctcgtaggattagaggcgagagagcttaggtttttgtaaaatggtaattggtaaccaatcttaatgtaatgttgttattagtaatgaaatcatatcattttatgaccttattc

SEQ ID NO: 36646 - DNA, 10209 bp, Cannabis sativa
  modified_base (4956)..(4958): a, c, t, g, unknown or other
acagtaataatatataaattatatttttagtataaaatttgacattggctcaaattattaaatttttattttttatttaaaagttaatttaaatataattaaaaatatatatatttttttttttgaaaattaatataattaaaaataattgataacatgtcatttacctacagaaatttataaatataatttaagcattattattgttaaaaattaaatttaaatttttagttgaactgagatttaaatttgattttaattttgcaggcaataaatttgcagtaatagtaatttttttttaatacgatcccataactcgccccccatacctccaagtggttgcatcaaactaatttaccaaaaaaatatatataaagtaacctttaaaaaatcattcccaaaaaaataatatataatagaaatcctactgtaatttttaataacggttttatcattatggttcaaatagtataaaatgcacttttatattacacgatacgatagaataaatttgtacgtaaagtaatgagacaattttagttttgagacaacacaaataagagtcaaaattaataacattttcaaaatgaatttcagagagaaacataaagaaaaaggcatagataccatgccaaaccaagcttaatttaacagaaaacaaatcacccccatatttccccttattttcttgtttgcctacaatctaagagggggccaaaataataatcctgacatgaaaactccaaatttcatattttgacctaaaactagagttttttttttctcagaaggatgagaaacaaaactaccttctgaaaaaaaagaaaaagagataaaatttaaaaaatagaaaaacaaaaaagtcgaaaaattggagagaacctcccatttcaaaagattactcccttgagaaccaccattcaagcagatcagcaggcttcagcaacccaccaccaccaaacccctcccccctatgtttatttttaattccttgaaacgatgttttcttatctcagttacatgaaacaataaaaaccactattatatgatttcgtcaccatttaatcatatttttaagcctttgcaagctcggttgcagctggggcagcaggagcgacaccaccggttgttggcctgttagatcattatacaccaaaataagagaattcaattagggaactcgatggaaacaaacaaagaaatgaggttgaaggaatacttacagtcccacggaaactttgaatgcgtcatagataccccattgggctccggtgagagttccgatcatgacaatacggagaggaagtccacgggtaaagagacccaacataccgatcttctttacagcctgtccaacaacaaaaagagttaaacctaatgaggaagagtaggatacaaggaagaaaaaatagaagctattggcgattaatggcactcacatcaccaacagttgctcccttggcgttgttaaggaaagagacgagattgtcagcgggatgagacacaatagcacagaaaacaccagcaacgtatccaccggcgaaactcacaccgagctgaagttctttgctgcattggtcctttggtctaggaataccatacttgtagatcatctcaacgatggtttcgaaggatgcaaacttcatcatagtgtctgcaagacacagaaaattactattgtagccaacaatcccaaaacataaagataagaacgaacaatgatgagcaatagaatacttaaagcaaaaatcaaaacagaaatatacacaaatatcaattacatggtatttgacgaccccagagtggaacaattcccttgtacaatctgcacaaaccggttgttcagatagacatcccgaagatgcaatgcaataaacaatatcgagttttctaactaaaattaaaaagaatcaaaacaacccaacataccccagtgcgccttcagatctcacgaacttgggaagtccatctgacaaaccacgagcaaatccaggttgagtttgaacccggaccttcacagcctcaaatgggcagagagcaatatccgctatcacctcagcagatgcagaaccagcaaggtagatcaaagtcttgtatttggcagcatactctggtccagcaatgtcagagtagtacttcttgaaaaactcatagaatccaaacttgcaagcaccctgagcactgtaaccaagtagagtaggcacccaacccctgaagaatcccctgacaccttgctccttgaggaggatcccgaaaccagatgtaatacttttgtacttggtagggtcaatctgcaaaaggaaagcaaacaagaattagtctacaacaataattgtcttaggaagatgaaaaaaatcaaacgaaataaatttcacacaagaaaaaggaaacaaatgtttaagcaggtgaagaaataacatagagcgagatacattcaaagctatgaataaaactagacattgaaaataataaattagtcattgtgtattgtgtatattcaaaaccaccatctataagtatataatcataatctagatatagaacctctgcacgttccaaatattgcattgaaacatagccatttgcaaagatactgttggacaattgaaaagaaaaataacactctgagcaagcagagctagaatttcatgtaaaacttgtaacaagaaccacgtgaacgattactaaacataagatgaaatcatttaacataaaaaaagagaaacaaatgtttgagccagcgaagaaatatcataaagagggataaattcaaagctcctagtaaatcgaaacattgaaaattatgcagtagtcattgttgtgtatataactacttgtaatgtacgcttataatttagatataaaacctagcaattctcgactgaaaatattgcattgaatcatagccatttggaaacacatatttttagacaattgggaaaagaaaaaatagcactgcgagcaaatgtagagatagaatttcatatacacgaaccacgtaaaagattactaacacagtatagatcatctttgctttagttttttgttataaaaagattgaggaagcaaaaccatagatctagcacttctggtacgtttactgtttaattagctagaatttaaacttttctgaaaaaaatgaaccaaagtttgtgttataaattcaacagtgaacacctagaatcagttcatattattcaaatattgagaatgacaaaacacaaacatgaagaaagactccgcgatcataatgctctgaaaatattaaattgcgatgaaaatattttcggaatagacaaagatcgacagaaatgcacaaaatattaatacattgaactagtatagcaagaaaacgacatcgcagatctcatcaaacgataaattgacacccaaaccaaacctcaccgatctacataattccacacattcaggatctcacacggaacaaaaaccaaaaaactaatcaccgcaaatctaatccagcaataattttaacatcaacaacatatcaaatgaaattaagacaacagatctgagagaaccatacctgcatattacacttgacaagatcaagaggagtaacagccatgtgagtaagtccacagctaaggattccaccggcagtacaggcggcgtagaaagcgggagagtacatctcgatcttcctaccagactcagctggagaaggaacaacgaaagctttccttggagcaacagcaacagcttcgacgtcggaaaccgatggtgaaacggtggtggtagggcgagcctggaggattctctcgacggccatggccttagtggaggtggaagagtataggtagctagggattagagattgacgcgatgatttatcggagaacgccattggagagaaagggagagagatcgaaggtttggagaagaagagattttggttttggttttggtttttggggagaagaaagcaaagttagagagagagagagggttgtgaggtttgattctctctcccaatctctcgctgccaaatgcttgttagtgaaatgtgtgagattccgtctttttctcctctctttttatttgccctaataataatataactcagcgttttttatacgaagacaagtgatgtcatccacctttctaaatcaccctctctttcctctcttaatttcgatttttgccatcctcttggtatggtgctatgaactcaatggtaatgtctccaatttttttaaaaaataagcatgcatttatagaaagaaattagattacctagtcattacaaaagagttcaagcgagatggaagaaacaggactaggcttagaaatccgttgacttagaaatttagactagacttctaagtcatactcgttcgctagattggcgagaataaaatacttgttaagacacagtaaatttataataatttactctctgtatcgcaacagcaatggagctacgtctacttcaagtttttatttctcacgagatggtattacagaaaaagactaagtgtcagaagctccaatttctagagagagtagctctaaccttgtgagtagttttctaaatatgaaaaatgagctgagggagctcttcttttataggtgaaggagacccacaaaatatgagaaaaataaaaattagatgtttttgaccatagatgatggtgatagtcatttttgggagcccagcagcaccctctacaggtaacatggagcttattttcttaactcctttgggtgaaatttgaggttaatagcttcagaattgtgatttaagtgtgatacatgacttgatagagcattgaattagctttgaaacgcaagttgaattgcgtaaatcatatcaatattgattgagttatgattattttactgaagacagttcataaccgttgacatatgacgtcaatctagacggtgggtaaatataaaaacaaacaagggatgtactttaagatgcctaannnatattttgacatcacttagtcaatttttgtgttctgttaaagatggtcactagttcttggagatgttgttttgcgaaaatgagagactcgaaacttttcatttccgagtgagttttccatgttagaaatgagaaatgtaaagttgtaaatttgacttctctaaattcatggatcttagttactgtgaaaaactagacaaacgggagaaacaaaattagaattggattagcaaaacctagcgcaccaagccatttgtcaacctgggcgttgggtactcattctcgagctctcgagatgtcgttttgatactttcaaggttctcaaacttgaggacgaggtctcctaccatgttaattatcaacttggcgctgggcctagcaccaagtcaacctgagcattggccatgtttctaggggcttaggtttgtggttttcttctcaaatttgcttgaattttatttacttttgatgacgaaaaaaaatgcccaaaatacttttttgataacttggttggaaatggcctaagttgacaatatgtcaatttgggctttgagcctagtgccaagtatcaacttgggtgttgggtcccaactttgacccttcgaaagttccgtttggtctccaaaaatagttgaatctgaatcttttctaaaaacagagaagatgctccgaagagttcttggaaaatattatcgaaatcagcacaggttgacaaaatatcaacctgggcgctgggctagccccaagtgtcaacctaagctttgtgccttgcttctggcacctagaaagtgcagtttcttccccgaaagtacctattttcctaattttgatgaagatgaaaaataatcaaaatttagatcaaaccaaatctccgatggctctagcaatagccctcacggatttatttttggacaccttctcaaaaagcttcattccaatgaagatagtgttcatctttatatactcaagatcattctcatttctaatcaatgtggtactttagatgtatacccaataaatataaatattaattaaatctaaatagtttttataagaaaatttacactgaaaaataccaaggcataggagcactcacattcatgagctaaaataactcaaaaaaaaaaactaacaaaataaaaaaataatgttcttaaaaatgggttccatcaagtaagttaaaatatatcaaaataacttcatcaaggggctccatagctaaaaagggctccatcgaggttctacaatatctccacgagtatatttgataggtcataataagaatgattaacatattattgcgtgattaattctttcaaaagatgtcactaactaaaaaaaataacaatgtgatgggaaagctcattcattatattttattaatattctagatagtaggcaagtaaagaaataaacattttcccacttatttccttcgagccaaatatgaccttaatgaaacttattttcaaatatgaccttagttctgaaggggtaggggggcaaaaattcaagaagtggacttttttttattcatttttcaagaattataatttgttattattggtatttggtacttggtagagaatttagagaataataatagtagtaaaatcaaagtcttaatgagaaaaagagaatgaaaaaaatagtgcttaaagtcaaaactaatattttcccaaacataatatggtcaaaattgatattctccctcttacaatttaaacatttattaggttatttctacatttgggtcccataaagtgccaaaccagaaaatcgttttaaggggtttacaattttttaatgtatttctagtaagattttaatgcattttttctatttgatatttgcacttttaatattaaaaatgaaaattgacaatttaactaaaaataaataaaaaattgattaattaggatgttcatctttaaactttaacattatcaaattatgtctcttaaactttttgaacagttaaaagattttttcaaactatttagattgttagatttaaagattttatctaattttattcaattttactaattcagtaattatctatgtattaaattataattttaagactttaatatataccaaatcatatttttcaaaccttaaaatgtaccaaattatgtcctatcaaaatttgatttatgttaaactttatttattaaaattagacaaaaattcttaaatctaatcatctcaataatttaagaaaaattttaataactttaaaagttgaaaaaatataatttagtacgtattaaaattaaaaaaaaaaaacaattattctaattaacccacaaaatttatcaaaagaaataaataaataattgagggccctcctcacctgtggtaagcattaaatattaaataataataatagtattagtaatgaaggggcgcgtggttaatggcgttattaatttattttgaggtatttaatggcctaaaatttgaataactagtcaaaagggattagttgtaagtagaagaaaagggatgggaaatggaatagaagaccagccacccaaacccaaaagccaaatcaaacagaggcatattccccattcccccattatatgcatcttgggaaatccaatttttttttttatttaaaataataataataataattaataacctagaagtcttgcagccagctgcaacttacatttttacccccttttttttttttctttttattatttttgctttcattctttggcaattttgtgaacttgtcactttgatattaaatatgaattaaatctgaatggtagttataagaaaatttacactgaaaaaaaaaatcaaggtataggagcagttaactaaaatagctccaaagataaaaatataagaaatattattaaaatggagcttgattgagaagcactattcattcatcaaatattattttaatcatttcactacttttttaattcttttttattcaatatttctattattttttgtttatataataaaatatatgaaaaaaaatataatatttaaattatatagaaaaaaaaattaaaaaaattaatttatgatataatataaaagtgtgaaataaaataaataaaataaaatttttgtgaagtattttgaaaaataaaatagaaaaattaatttgagtgctactctgaggtgaggcaagcaaagatatacgccttgtgctctcgaacattcaaaactttaaaattataaagaaaaaaattattagtatataaataaaatattaaacaacaagagaatatactaaatgttgtgtaacacttacaaatgttaaagaaattttgccttaaatatcccaatataccatgagctttagctcagctaaatcaaaactaaccaataatgactaactactctactagttttataacaaatttctaactgaatatagttagtcaattaactgttttcaccagttgcttcttctttagcttcagcaaacaacctgatattaactttgtgaatccatataaagatgtgtttggaaagccatattataattagatttatgtataatttgaggtaattatacattttgacatgtttgactgatcatataatgacactgtaattgtgtaattgaaagtaattaaggagtttcaattacaatctctaaatctcatgactttctataagaattgagtataattatactgtgtaattattataaattttctattttaaatattaacggttaaaaaaataatattttcgtgtgtaattactatttattttgctaaataatatattaaaaattaatatataattatcactttatatctaaacatatcttatattttaaaatacggtgtatatatatatatattgttacaaaatttaatatttttagtaggaacaaataagtttaagactaacatagtgaatttctcaagtacccaacattttttctaaataacctcataagtgcgcttgatgtgacttttactagcatagcattgtcttatataaattggtgtgatttggtactgtctaatacagtttatttaaattcaaatatacagagaatctgatatattaaattataatagtagtaatattccttttagcaatgtttttgagcttagcttacaatgtgatatttgagcaccacgagctatgtaaaatgaacatccaatatgacgactgagctaagggaccctttttcttttttaaaacatttaactatatttttatttttttaaataaaataaattatatctatgtatataaatctatatattagccttcccttatttttttaacttcatttttccagccaaaaaaaactctcaaacttcattactagaccttacacataagcacttgttaattatttacttcacaggcatttttagagagacaaacaaaacatgatctaacaaataatgccaaaatttattattattctatagcatagaacaattatagttcatttgtagcaagagaaatactaattacaatctcttagtcaatttctacgttcgaaatcacatgctgaaatatttttttttttaattttttttacaacagtattcgttatagttacagtatcatttcggtaaatttttgaaaaattttgaatagtttacagtaccgaaattagagtttttcatattccagtttaccacacacgttcaaaaaacttcaaacgtattttcgacatgtaaactatttaaaaattttcaaaaatttacaggaatgatgttgtaagcataacgaataccctcgtgaaaaaaaaaattaaaaaaaatattctgacatgtgtttttgagcgtgaaggttgactaagagattgtaacaggagattgacagtatcacttgtaacaaaatttgaaatataatataactaatcaccttagattccttcaaaatgacaaaaaacaattgttgttacataattgtatcgaatcaaacggtgatgaaacaaaagaaaaacaaaacaaaacaattacttctacagttctaattaagtctcaatatcatctgatctaaacacataaagctatataatatgctaaatctataactacaatataacaacataataaagtaactttcaatagaaaaataccacaaagaatcccataatgcaatgcaaagccaatgagaagccttttggattatttgattgagcaaaagagacccttcccacgaactctcccgagctaggcacaggtgcaaaggcctcagactcaggctcgggggcgggggcgggggcggct

SEQ ID NO: 36647 - DNA, 8443 bp, Cannabis sativa
ttacatgtagatatgtgtaatgtgtagtaatatactagtcaataaaaaaatagccaagctaggtttaagtagctaggtataggaagttcaagaaaaaaaaaaagttaaggggaatgtagctagggcttggaagagacaaagattggagcagaggagcatatatatatgtgtatgtatggagattattgtttggttgtaatgattaatggcacacatgtgaatagaggtgggtgggtactttgtttgtctctatggaatgaagacaatcttaattggatgcaaatgcatatacgcaccacccttcctccaaattaacttgcttatatatatatgtatgccacagtgtgtgtgtctgtctctgcactgcgatatgtatgtttctgtctactatatatataaacacatatataaagtctcgtgacacaattatcacttatatattccacatatataatatatgtggaaaataaattaatttatgtatatacttttactttctcaacattatgtcaaacagtgaactatttatttagtactattctatcattacattacattcaaaggggtatttttttttaattagatccaatatcaattaataatatagcataattatgtgccatttggattggtataagtatatagaagacatatctgcataatagtaattataatttgcacggtatgtacatacacaaacaaatacatgaataatgcaccgatttccaagatgaaaatatatatatatagtactaccatatttcatcaaatgcaatttgtctgtagagatgggtacgggtgatcaggaatagtgattgtgaaattaagtagcataaaatgtacatgtacaagcaaaggttagaaaggcacgtgtggagagagagagagagagagagagagagagagaggacaagagagtgacgggtggagagagagagagagaggatgaagaagaagctggggtgggggagatgagttgatgatgaaggagagaagagagagatatgagatatgtatatggcctaaaaaagcccccgtgaggagtgtttggaggcattcccaaatcacaactaaacatcattttgtttcttcccttcgctcttttcgatggcttatttcacttcacactcccatcacgagctcatgattcctttcttcttaattcatatatatgtataacttctttccaattataattcaatatttttcctcttttaccctttatatatatatatgcatatgtactactaatcaatattattaattagttataatttattgtttcgtaaatagtagtagcgcgctatctttttttgactagatatatataagcattatcaacttgtgttgtcatgaactgctaatccaaaaaacaagtatacatgcatcacaatgcatatttataattgatgacacgtacgcattccgttgaaggaatataacattttcgagagattttgatgcttaagcactacttttatatatatatatatatatcacatttatattaataatactgaattgatagtttctaatctttattaatcttttaaaattgaaaggagtgcgaaaatttatgatttatttattaccagatcacatatatagatctacataattgatattttaaaataggggtattaagaaaatattggattggccgatgttaaaattatattgtaattagattggattagttattgatgtcatcaatttcaaatttcaatccaaaatggatccaaaacaatatttatattatttatatataataaaatatgtaaatatatatatacagtttttttttttaatttttaatatatagttacattaaatttgtaagaatgatatattaatagtcttaaatttaaatgaagggtaatatttaattttaatgtaatttttcatgtgcttggatatctaattagaaaattgatccaaaattgcattggatttgattaaattacaaagactaattggattcgattagatgataattttttaaattcaattactaattaaattatattagattaggagaaaaatattggattagatcacatttacatggagctacttggttggagatatcattaatattaatcatatacacttaaataaattagtgtaaattaaattggattaataaccctagtattgaattataaattttatgatttagaattaaatatgtacacatgaactatatggacacagaagaccctataactaagaagcagtgccataccaatgtatcacacacttaattaatttaattataatactattaataataagcatattatttgcacgcgcatactttcattatttgttacattcaaaaagtatagtatatcaattcgaataaagaaatttgttcaacaaaattcaaaattgaataaaaaaattaatattaattgttagtttaccattttaaaatatatataatatatgagatatttgtagtataagtgattaaaattttgagtttgtaactagtataaatctaatttttcaaagctataagtacaaaatgttaataaattaagatgtaatttttgtttagttttgtaagtacaaactttgttagtgtcttaaataaaatacatgttataaattttaaattattggaccaaaatcaattacttctaaatcttcttcaaaaacattaatatttaagtcttagagtgtctatactaataaagttggataaaaattacaattttactatagctgctaaaatattatttataagtctatgccctttataaactcaaaatattttgagtacttataccactaatattaaataatacatttgatcaacaaattttgccatatagaagttctttttactttctataaagttatttttataaggaatactataattagatcacatttaaaacagacgtacagtatgtgtatagtactagctaggtacattcattaagtgaaatgaaattcatgtacacactttttttttcagggaattcatgcacaattaatcattgcatataatttacaatattgatgtaataaactattatcaaaatatcattgaaatatgatatcattaatattatttttatgaaaaagcaagaaacacattattacacaaccacaagattactatgtatagatatgaataataatatgtgtacacattaattaaaaaaaaaaacaagatacatatttatgtagcaagttacaattaataagtggaacgtcttatcttagataagaataattggttaaaattaattatcatatatgtgttaataagtttagaccgagatgcaaaaatagatctatatttggcataaaatataattttgtgacatttttatatcaacttttactattatgttctaatacataattgcgaatcttgatacaaaatttatatgtcatttaatacttatctaacactttattaataatataaaataataatataaatgtaaatatcgaatttattaataaataataataattaagaaagtcattttatgcaaattgacatgctaactaaattttaataataaatattgaaaatagtataatagtaaatataaaagtataacatttattatgatacaaattttgtatcatgctatattgtctaaatttagatttgagatatttacattacaatttggtacatcattagtaaaattttgacaaaataaattatattttgcattatatcacttatttgtagctgtataaattatgtgtacatatataaactttttagacactacaggcaaagacaaacttagttaataatttttaaatatatattaattattaaattaaaatacactcaaactaatattctattacactaacaaaatttttgaaaaaaaaaaacgaatacatcaataataatataacatttcattataatattaaagattacatacttatacctttgacaatcctctataaatatacatttctcaataatacccaaatattattatatatattaattaataaaaaatatggatttggcattcgaattatgatccttgtagaatttttcttcaagaactattttttgcaataatttccattgaattataaaaatcgacaaatatttttctttcttttttttttatttaatttattgatgtagcagtaatatgtatacaatttaaatttaaaactagcagtttataataaattatgataatatttgtatacatatttttttaaaataatatatatatttttttttgtttaatatcaataaattatatgttgatcgtagtttgaacttgttaaattatacatgtgtgactaatcacataagtaaactaaattatttcgaaaaaaaaaaaagaaaatatgagtaaatatgaagatatttgcaatcatctgtgtaatttagggagaattatttgtaacacaaaaagttgaaggtgcaaaactctaaattaatgctcacatttcaggctggaagtcctattgcctaaagaaatatagaaaaggattaatttatttgttttgtttcaaaaaaataaatgatttgttttggagtagaaaataaatgcaatagtaatcaatatattgttatcaccgcataataaagggcagttcggggagtgaattatatattattataattataaatgttgtgaagaaactgaggcactcatgtgggaagcaaacaggagatcatcgcatagatttgagagctcataagtatatctcttctctcatcactttttgtttttattttttttttacatatatatatatatatccatctatttctatatctatatatatgagcgcctaattcagatcaggtttagcagaggatcaaagagaggttgctgggcaatacatactgtccttatgtatatatagaaagcagagaaataagagaataaaaagcctctagagtctcaacacccacatatacataagtatatatatatatatatatatatcatcgtcattatcaatagtaaaaatggtttctagggagcacaagagatcagccgcaactctgcatgagaagctgcagcttcttcgttctattactaactctcatgctgtaattttccccatactggcctctgcattcttttaattcttatactccctttcttctattggctaaatttccttatatatatgtatatatatacacattatagtacccctcatctttattttcactatagtaataacaattttttaagattcatttttttctcaatttttttttcttttctagctacttgtgtatatgacaccttagatacttctataattaattataagcaataataatttcaactaattctgtgattatataaaattataaatatttcctgttctatttatatatatatatatatatatatgttccccaatttattcttggcttcatgcatgatgacaattaacaattaataatttcctaatatgactgttcattcctcttgctcgttagaatttttcaagggaaaatatagtgcggtcaaatatttagatatgtgatattaattattctactcggatgggttaattaataagaatatgtatataatatctggtttgatatatcatctcttcaaattctcaaaatggtttatgaagtctcatgacaactgcatatatccttaataatttgtcaaatttatagttatagctatttcagttgggtgtgtatatgtatatatcttacatgagttacttctaatgtgaatgagaggaattttattaacttatgtcaatgcaggggacaaaattgtttagaaagctttttcactgatatatattttagatgtgtgtgtatataaatatatatccgtaacttgaaaaatttatttattaattatatatatgtctttgcatgtgtactgtggcagctcaacaaaacctcaatcatagtggacgcgtcaaagtacattgaagacttaaaagaaaaggtccaaagattgaatcaagacatggaaaataatgcacaaattacatcttcaagtgatcatgacgattttaatgcattgcctgtggtatatataaatagcactttcaagtttcaataattatttcccctattttagttattacagatcaataatctacattgctatatgttattaattaaataaataatattaattagcaggtctcggtgaaaaccctagataaagggtttatgataaatgtgctttcggaaaagagttgcccaggtttgcttgtggccgttttggaagcttttgaagatatgggtcttaacgtgcttgaagctagggtttcctgtgctgacagtttccacttacaagcagtaggaggagaagtaagttctactatatatgtattattacttctactatactactactgcatgcattaatactataataataaacacaattaaattgctcttttattttaatctaattcaaattatatacttgatgatgtaactctctcattctctcttcatacatactaacactaatgtataaatgtgtacgtttatagaatgtagaaggtgaaagcagtatggatgctgaagctgtgaagcaagccgttatgatgtcgattaagaattggagtgaaaccactgaaaatgattaatgcaaaatgacatggacacggcatatatatatataatattgatcaacctaatcaacttgatcaatatctataatgaatcaatgtatacatatataaacatatgtctggtttatcatgttaatttctcttttgatcgatgatcaccatcacttaattaattttctttactctcggttgtagcctgtaggtttcatttttgttcctaaaaaaagtaattaattagtaggcaatctttttcatgtaacttaaagttttgggtaattaaggagatctagtatggtacgtagtgatcggaaattaattagtgttttattagttttctcaactataaatagtattattttttgttcaaaaactaaaatcttatttttattgtactatgcataatattacttataagaaaactagttatattatcgtacttgaaaaattagctatatatttcgtgtgattttatacataaataaagaaaaaatattcatcgatcgtaccgaaattgtgccagagacatagcttgatctcattttaaaattatgacagtcgtcggaccatatatatgaacataataaattgagttattgaaacttactgagtgtatgcatacacatatatatatatgtacagatataaaaataattgatagagaatctgcatctctaataatgaatgttgttatatgagaatgtggttatagttcaatatttggtttcggtcagatatatatgtacttagtcgaactctcaattggatcgatattgttgtcccccttctagggcttagaataatatcattttttttaatttactttttacattattggtttagggtgacatgctttttttttttttttaagaaactcttcatttgaacattaaaatgtttccaattaataataattaagatagcgtttgacttcaggtaataaaatgaaatgaaacaaaaagaaaataatttttattttatttctcttttggttgcatttagtgtttgtttactacatcatagttcaccgcattatattgtattgtattaaactgtattttatgtagtattttttggtatgttttgtaatatttttttaattaattttttgttttcttaattaaagtaaaaatattttttagaaatatgttaactgttttttattacacttcaattatttaattaagaatcaaaatttgattttttttttttaaaaaaaagtaactttcaaaatattttaaacaattttttttttcttaatcaatattttggactccgacgccaacctagatcttgggacacggacctggaccctgacctggaactaaactcagattcgaccaaggaccatggacccaaacaccaaccggacccagaccccaaagccaaaattcaaactccaaccacagcctagaacttgggaccgagactcagatcccgaccccaacctagaaccgaacctggaattggaccacggacccaaaccccaacgcgaaccccgaaacagaacctgaaccccgatcctgacccaaacccaggacctgaagtccaaaccttgacccagaccctaacctagcgctagatccggactgggacacgaacccaaacctagactcggacccagaactcataccatgccccaaacacaaaacccgacctcaacccagatcccaacctcgaccccgactctagccccagaccacgaccctggactcagacccctgatcttggacccgacctgtaaagaccgcttaggttaatttggaaattagcagttaattaagatttaattatgataattatttatagatatttaaataattatttatgttgatatatttgaattctgaatgcattt

SEQ ID NO: 36648 - DNA, 4836 bp, Cannabis sativa
caaaaatcgttaaatctaataatatcaatagttaaaaaaatcctattagcctttttattattaaatcagaatctaatactgtcacgtgttcaggcatgaaaacgataacacgtgtcctaacagcaacggtacaaatggtgacacatatgtgaaaatagggtgaattgtaaagcctaaagggcatatgagaccacagcttacctcgcagcctccattctcgtcttttctcttctcttcttctcccaacttgcttggaaagaaaagctgaagaggggagccgcctcttctcctctcctcttcttctaaaaccccacccagaagctctttctccattctggtacctctctttctctatccatctttatgtttgtttatattttgagcatttcgttatctttgtttggtaggtacgagtttctttttttgggtttatgagcatcattggttcctgtaataactggtttctgatttaatgttttctccatgtataaattgtgattgagaagatgggttttgctggaaaaggatggagttcgtagaaacatattagcgttatgtctggtgttgtagcaaatatgaaagaaacgggatttaattttgtgagtgttatttgtgaaatctgaaaagaaagactttattattgtaatgtaaaaagagagaattttattttgtgggcatttggaatcagccaagtaacattttagagagtgatttgtttgctagctggagcttccaagttgctccttgggtaattgatttgagcttcacatgttgtttgttttgtgttttcagttagtgaaagacaacttgaaaatcagcttcacatctagtttgtagcttttatccgcatattctgtccctttttaaaatttaattacaattatataggactgcatctttactaacttttttgataaggataataaccacgatctattcattctcttagctttgttaaatcacttgttatagtggtagtttggttgaatcattatagtaatatgcgagcaaataattgcttgattgtgttaatgttttaccttgatttgatatcattaatttcaaaactaattgattaatttttgcttcttcttgtaaaggtgatactgtatcagcaatagcaaatgatgttgcgagcgaagcatattggaaatctttctaacagtgcaaggtctttcttcttaagtgggtcacgatgtaatgcagcggatggtagttcttgcacttgctctgaggatgaagcttgtgtttcacgaaggcagcatcaccggcatggaggtgcacttgctcaaaatcaacccaccttggcatccagaacgacagcaagagtaggaaattttattgcaggagatgtagtgaaagtggtcgctcctcaaaaagctaatatcgttcactcagcttctttgaagcaagccaagatcgccccccaaaaattggtgatatcagattgtgtaagttatgccaatgttgttgaaaatgttgagaaggatgttgaaaattctttgcctcctatttcagaccagtttgttaaggctggtgttgcagctgtaacttttctttctgatattgtgaattctaagtttcctttatctgatggaattggagtgcttagcttgcccaaaaactgtatggttgaccccaccaggatttctagtatcaaaccatcacatgtgaaacacatcaaaagagagaacttttctagtgtccatcctagatcatctgctgaggcagcagttccattgaattctacgagtaattctcatggggcaaagagtaaaggtggtaaatcttatgtaagtaagggtgtaaataatgttcctcatacaaagactggaaactcatggggcagtcaaagtgtacctactgatgctcgtgataaaaaagctatgccaaatagaactaggtcttttataaacagcttcaaagccgatttcagttctaactatcatcaggcttctgatgcagggtctgaggggtatgttaataaaggctttaacaggcccccaagagatgtgaaatacccaaacgcttatgcttcaagcaggaggccatctgcatatacttttaatcctgttgaaagtgtttcccagatactgcaaggaattaagtgggggcgggctgctgaagagaagcttgaaaatctcaattttgtgttggatgcatatcaggcaaaccaaattctaaagcaacttcaagaccatactgttgctcttggttttttctattggttaaaacggaaagcgggattcaagcatgatggacacacttataccacaatggttggcaaccttggtcgtgctaggcaatttggtaccataaacaaattgcttaatgagatggtgagggaaggatgccaaccaaatgttgtaacatataatcgattgattcacagctatggtcgagcaaactacttacaagatgcagttaatgtgttcaatcaaatgcagaaaacagggtgtgagcctgaccgggtgacatattgcacgctgattgacattcatgccaaggctggttttcttgacattgctctacatctatatgataggatgcaaggggcaggtctttctcccgatacattcacttacagtgtcataattaactgtctcgggaaggcgggtcacttaactgcagcccacaatcttttttctaagatggttagtgatggttgcactcccaacttagtcacctacaatatcatgctagctttgcaagctaaatcaaggaactatgaggctgcattggagctttaccgtgggatgcagaatgcaggttttgaaccagataaggtgacttacagtatagtaatggaggtgcttggtcattgtgggtttcttgaggaagctgaagacatgtttaatgagatgagacagagaaactgggttcctgatgaaccagtttatggtcttttagtagatctgtggggtaaggctggtaatattgagaaggcttgggcttggtatggagcaatgcttgaggcagggttgcagccaaatgtacctacttgtaattcaatgctcagtgctttgctcagggtgcatcgactatcagatgcttataacctgctgcagggcatggtggatttgggtctcaacccttctttacaaacttttactttactcctcagttgctgtacagaagcgcggtctcctcatgacatgggattttgtagcaagctcatggaaattacaggccatcctgcgcatacatttatactgtcgatgccatcagcaggcccagatggtcaaaatgtgcgagaacatgtgaataaattcttggatctgatgcatagtgaggatagagaaggcaagaggggactagttgatgcagtggtagattttcttcacaagtcagggctcaaagaggaggctggctctgtttgggaggtggctgcacaaaagaatgtttacccagacgcagtcaagaagaaaagcagtagtcattggcttatcaatcttcatgttatgtcggatggtactgctgttactgcgctttctagaacacttgcctggtttcgccgagagatgctaatgtcaggagcttgcccaaaccgaattgaaattgtgacgggatggggccgtaggagcaaggttacaggaacttctctagtgaggcagtcagtgcaggagctattgagaatgtttagttttccatttttcaccgaaaatgggaacacgggttgctttgttgggtgtggtgagtctcttaacaagtggctgctccattcttatgtggaaaggatgcatttgttgtagtcaattattgtggaaacacaattttgtcactggagaaatagaagagctcggccatatattttagtgtacagttatatatatatattatataagaactggatcttttagttattattaaatgggaaatttttctgctcttaatttgtctgtactttgataatttgctgaaccatctgaaaagaggcatagtaggactgacaattcatgccacattcatccttgtattcaagctataatgcagaatgaattaactaattcttaatcaggtaactaattcttaatcaggaggaaagaatcataaactattgttttttgataccctttcaagatactgatcagtagttaaaaagtgattggtgcaatacattgtttgttttgcattcaagaccaactactctactgaggctacaattacaaagagaaagttagttttgacttgagttttcaagtctttctttgtaggctgattgtctatttcttttatattattgaaacttttcctttagtaaatataaatatatatacatatatgtatgtgtatgtgtatctatgcatcaggtaggaaaataagaaagagtgaaaaataaaacatgttaggccattaaaatgaattgagaggaacattaattatgtatgaatcctttcaatatttatgtttggtgaataagtgtgaataatattgatcataagaatctaagagcctgtacaaaaccagtttcaacactcattacaatcatctattatagtttttgacaaatatttttgagtcatagttggtcatttttactaactcctttgtataagaattttacaatgtaattttttgtttacttattgttgttttcttttaacactattatttattggttgtaagttgttgtgatgtatcatgtcatttcgtgtgtgctatatattgtatatatagtggaaaatttatggtcaattaatcttacatttcttagatgatgattatgcttaattggtttgacttctccttgttgtcacttctgtattttcaaggggtcaaaatacatattaattatgttttaagcaattatgatttgacatcctctttgttattact

SEQ ID NO: 36649 - DNA, 4430 bp, Cannabis sativa
aacattgactaactaagtagcaacatattgttttgcaaagacattttgtctttcttcattagactactacggaaagaagttttgaagacacacaagtagcaatataatgtgtcgaattggtatcttctgttgatgcatgatttagacagaaaccctgatgtgtattgattaatgttattttcatctgtattgataaaattttattcactaattttttattctgattggttgattcaatttatagacggatgatttgcaagatcatataattatttgtggatttggacgagttggccaggtattattttttcagagttatgctttacaaattaattgcgaaattgttcgaattcagacttgtgaaggtacaaatatttgtcatattaagtgattgctgttattatttttttgctttttgttccagataattgctcagcttctttcagagcgattaattccatttgtagctcttgatgtgaggaggtaagactcctgattaatggctagaaaaataaaaaagctaggcagttattgaagctatgtgcattatttattaatataaaatgagtcatttcttgactttattaatataaattagttatttggatggtcatactgtccattttcacctgtatttttggaaaacatcctattgttatacagtataaaaggagtgtcttttacgatcttttgctttaccctattcagctagtttagataataaatttgtaaatcccctggtctgacaactaatagtattgtttttcctccctctctcatacagtgcttagagaaattactaattgtcacattattttctttcccttgtccagtgatcgagtggctgttggccgtgccctagaccttcctgtttattttggagatgcaggcagtagagaggtaatgaaacaaataagaatactgtattacccaagaggggtagctcaaatggtcaggcatgtggtttgctcccacaaggtctgaggttcgagtccctcctgggtactacatagtaattgttgtagtttcctggcctccaaatattgtagggttaggcgaggagcctagtttaaacaaaaaaaaaaaaaaacaaaatcagaaagttgtagtgtgtatgatctgatatattttttgattcattttctactggatgattaggtgctccacaaggttggtgctgaaagagcatgtgcagcagcaataacattagatacacctggtgcaaattatagaactgtttgggctctaagcaagtattttcccaatgtgaaaacttttgttcgcgctcacgatgttgatcacggccttaatttggagaaggctggtgccacagcggtaacactcctagtattcagatactgattatgcatttacttttcaattattcccatctaggtggacttcgaatatttgttgttatgttgttttgtcatcttttgatctcttggctattgactcattcatgtagtagttcttagtatcttaaatcagagcagtaattagccatgtgcctttcctgtacaaattataatgcttatttgagtacactcacccttaaaaatcctaccaggttgtcccggagaccttggaacctagtctacagttggcagctgctgttctggcccaggtaaataatttatgtcactagtatcatatgtgactaattgcttggagcatgtaacttgaagcaatgcatatattgatttaaattttattcttgtggtataaaatgtacttttataattgctttacattggtgtaatatttttttattattatttttatgtagatctttttgttttgctatatgtttgcatatatttttaattttgggggcaaaaccatgcactcacagcgagacacgatttctccttttctagtttatctagaagctcgtggtattttaaaaacatatatttggtgtggtattacaaaaatatttatttggtcaagtggtactaaagtagtatttttttttttttgaaagatagtaattaaaattcttgaatgtattctcgtccgtactttacaagaagtttagaggttgcttaaatatgcgccaaaacccatctggccatctctatgatatggtcactgaatttcctaacatgtttccattaaaattcggaaaaaaaatgtttaaatgttaaaagtgttacattttgtttaactttaagattcctttacctgaatcctgatttatgaagggttgtttggtcatttttttaaggctttttacttgactttagtgcccatcatgcgaattagttggtcttcttctgatttaccacttgtactattatttgcatttagttttattatctcacttctaatattttttattatgaccattatgagctcggttttgatggataactttgatgattattcataatattgctctgtaaactcactatatatctgttcgttattgttctcttgagattgcatcaccttctcagtaagtgatttacttttgccattgtcttcatttatccggtttgttatggacagaatcatgatgttcattggtgtgggtatcagtctgaaatttgacagattattagctctgttattttttaggaagttttttgttgtctgctccaacatatttctctttttctaaattttttaacatcttttttgtgtttaggctaaactaccaatgtctgagattgctgcaaccataaatgaatttcgttctcgccacctgtccgagctagctgaggtactcaacatgggaagctttggctctgtgtccataaattttatatggaaacaatcaatcttcgtattgttttttcatctgaactaataatctgttaacatttgtttctgtctacagctgtgtcaaaccagtggaagttcccttggctatggtttttcccgggtcataagtaaaacccccaaagttccacctacagaatccccagatgaaaaccacattgctgatggaacactggcaatataacaataacacatgcccaacaaaaaccatagtaataaaaattggctgaggcaaagcaaactcaagaactgtatagaagcagattgccatattccattggacaaaatgtacaggaacatagtgaagaagaaacaaaatagttcagctgacatttgactgaaaacatttttgattatttatttttattatttaaatagattaatagattttgatcttcataaacatgtaattttcgtgtaaacagaggccccgtctgttttattgggggctctgatttcagaattttagatgaccttgtccttctccgttttttaattttgaagtaaaataaaaatatcgcagtatcatcgttttgtttgctagctaagcatgtgaaatggtcaaagggagaaatgcattcaaagtttagaaataaattgacttttagttgaaaatatatagttcacattatattagatgaatttagttttttacttttctcagaaaaagaaaacaaaaatctagagcggaacaatcagaaaaagggttgaaaatggtcgagtgaaacaataaagcttattcatttattaattaaaaaaaatttactaaaccaaattagtatttaggcaaattatttagggacatttgtgaataatgaatttctctatatgtatatagtgtttgtttcattgtttaagcttgaaggagcatagtgaatttctgttaaatgaagatattggagaagtgttttcttcaaattattcttctaaaataaagaaaagatgttttggaagagatcattagagatgcccttatgtgtgttttttttttgtttttttcaattgtcaaataaaaaagagctttgtgttagaagtttggagactaatttaacaaaaataaaatttgagaataaacttatctaaatatatataattttgggaccaatttatcaaaagataaaatttagggaccaacttcctaaaatctatataatttagagacttgcttttcaaataaaccttttatatattaataataatataaaaaaattagtatttagttaaaaacccttgtgtcctagaacttgaaattgattaattgagtgtaaaaccctttgagcttcgcaactggtacatcaatggcttctatgatattcaccgactgttcatcgtccaccacagctcgtcttctccctttcacccgaaacccactcttccgcctcagagacggcacggtgctcctccggcgtcttgtgacactgacaacctcacacttgcccagtccccgcagggcactcgcctttggttcgtcttcgccttcaccgtccacccgtgtcaccggtagaactctcctctccctcacttacactgctttctacatctaaacaaacttacgtgtgcttttctttttctaacgtattgagacatttcttaagatattatgtgtgctaaatatttggactgagaaatgactctcgatcttt

SEQ ID NO: 36650 - DNA, 9632 bp, Cannabis sativa
ttggcttgtagaagatataaattgtactttggtactatattcctttgaattaatgtcatgagatgttgaaaagtctgcttctgtaatttctagtaaattcgtttcttcttttaagttcttatattgtatattctcattaacagtatgtaaatttttaatagcattgttttgcagtaaagagcttgcagattttggctacctttcctgaaggtcacttaccaatatcaaaaagtatattcgagagtattttgacaacacttgtgtcagttatactcgtggatttcaaacagatgttgttatggaagcttgctatgaaggcattagttctcatcggctctttcatcagtaaatctaatgagtcggagaaggcactgagctatacaaatattgttgttgaaaaaattgtttcatcattgtctaatgataaatttaccctgccttttccactcaaactggaagtgttatctgaacttggtgcaactggacagaatcatatgctgatgattgttgaagggttggaaggggctatatttgccaaccttgatgattattttgtacgtaactttccatctaacatagtattttcatttgaaatttttggaagggtctgaagtttatggttttggttttgttctgttctcattcattttagtggttattttaattgttcactgaactcacaatctgtgtttaggtccttgggaataaaagttctgctgaattagcaattcaacttctgcaatgctattctaaaaaggtcattccgtggtaggtactcagtctaatgttccaatgatattgccaactaagaatacataatctccacaaccaaaatcttacctcacttcattgtgatattttgtgtcttctcacacacatgatgtatagtagattgcagttataatttatcctctattattatgaagacttatgtttgaatggtctcaggatccaggaagttgacggtctcgaggaagtcctgttgcgtttcatcgtaaacatttgggaacgtgttgagagctggatgtcccatagtattcaactccaggaaaaagtgtgtagatctactattgtcttttcttttttctctagttatttatagttcttaaaagctaattaggctaaagagtgtctttcatttctattctgcctctgtctggtttttatggttgaattgaaaacaaaacttcaatcaatatgctccaagaagtggtgaagttagatttctttctttctttctttctttttttgctttaggggcttcttaatgcaacaactatggcgatgaaggttactgttgcaagttgttcatgggaactccagaacaccataattcagaaggcctatactgtacttgcatcgaatacatctcttctaccgaagaaatctcctttgactttcattccagtcgaacttgaagggctacaacttactctgcatgcagacaatgtttctggaaaagatgaattattattatcattatttgcatcagtaattattgcaattcagcctagtgttgagattccaaatataaaagagatactgcatttgtttctgacgacactcctcaagggacatgtttcttcagctcaagcattaggttctataatcaataaacttggtacgaagtcatacagagctgagatgtcgaatggtttcatgttagaagaagccattgatatacttttgaaaacaagatcatggaatccccaagacagtggtgccttgagtagtgggaacgaaatgagtcttgctgaattatgtcttggttttgtgaaccatagacaacttcaaatcaatgccatagttggacttgcgtgggttgggaaaggtttactgttgcgtggtcatgaaaaagtaaaagatgttgtcatgattcttttggagtgcatattgccagaggggaatatttgggcatcaaatttgacacaggatttgcatccctctgtacagaaaagtgccgcagatgcttttcatcttcttatgagcgattctaagatttgtttaaatagaaaatttcatacaataataagaccgctctataagcagcgtcttttttccatagtgatgcctattctgcagtcatcaataaggaaagccgattcatcaatttcaaggtatgcattcatcgttactcactttagtattacagtcttgtcagttgatccttggtgagagtcttataatgagtaaattaaatgtgtaagaactgaggcagagtagaaagttgaagagttggtgttcaaagaatttaaaccaaattcttaaaaaggaactttttattgattacatattcaactgctccttcaaaacagatctatgctgtttagggcatctgcccacatcatctcagatactcctctaatagctgtcttgagtgaagccaataaggttagtgaatagtggcagattgaggacttcagagtatctaaatctctgtttataattgatgaatttgcaataaaataccatctcgttattgcagctgataccgatactgctagagggactatctattttcagtgaggatactctggataaagaagaactgtacaatcttttgctagtcttatctggaatattaactgataaaaagggtaaggttaaaatagatttaattagtgccaaagctaatcacagtaagctcacttttgtacgtgttcttgcaggccaagaagccgttattgagaatgctacttctattataaattgtttgactggactgatggtgtaccctcatatgatggtatttgattttcttcatggttgtttattttttaaaaaatggtgtggatgtaatgctttacaatttacatgtcattgctgaacttggtttactcattacccagttttcttttaaccagtatattaaaatagcatacactgtttgatcagcagcatgaaaagttgttgcatgcttgtagtgcttgcttttctgctatgaatatagatctggattacatcattttatattttatatggtttgtttccaaactacggtattttttgtattcttcagcttgtacgagaaacagcaattcaatgtctcactgccatgtctgagttgccccatgcaagaatctatccgatgagaccacaggttcgtaggtttctgcctttcaccttatgataaactttttgttggaattgttcaacataaaccatttcttctctttttgaatcataccttttatgtctatggtgcatgatttttcttataaatgctaccttattcaggtattgagggctttattgaaggccgctgatgatccaaagagatttgttcgtcaggaagctgtcagatgtcgacaagcgtggtcagttttcgggatccatcctgtgtatttttaatgtagatatttgtactgacattttggtctttaccatttttgcttcatttaattatgttgagccaattaacagggcatcaatcgcatagagaactttccattttttcaaacggaaaacaaagagcttcacaaggccagttcaaagctccaagttcctcagtcgtgattatgcagctgccagctttgtagtttgtatataaagttaaattttattttaaattatttattttttaattcatcttgagctttgttgcttggaagtgaagagaaaaataaaacagctaaaattatattccattgtatttaatttaattgatgtttgaaattttgttcccagctaggttatttttatcctacaatatttcgccattttttttcctttccccatttggaagttcttttctaatgtgtaagatcattaaaaatgttaaaaacttaaagaaattgcttcaagggtcgatgattctagaatatgtaacattattaacataacaccaaaatctaactgctgattttcaatgataacacgagagaaacaaggaacaaatagcatttgctgaaaactcactactttctctcaacactagaagaagtcgctttgtacaatatatcactatatcctttcttccccttttttttgtatggcatggtaatgtgtaaacctacaaataacaaattgcctgcctacagctagaaagaaacaacatatttggtatataggaagatgggagtaaagtacaaatatggcatttatgactcgctttcaaagattttggcgttggagaatcgcccagaacacagtaactatgctacaaaaattgagaaacttggtccaagagaagacagcttaatttgtatcaaaaatatttattcagacaaataatcttcagcaccactataatcgtcaacgtcttcatgtcgacccattttatgtggtctttcaagaccgtcttcaacatcagacccgcctcctcttttcaaattcgaaagacttccccttgaatttgaataaacctaaaacaagaaaaaaaaaaccatatcaagtcaactgaatcccactctaccagttaaagctaaaacatcaagtagggccgtacctctggttctttcaattctataacagaagtagttggtctcttccttacagttactcttgaaggtgcagggaaatgttcgatctcatcattagatcttccttctttagccctctttttccttagaacaatctttgtgggaagaggctgcaaaaaatggactgtgtaaagacacaatacagttgcatgtgtaaaccactaaattaaggtaagaaaaaatcctggttcaaactgaataccaaatagcgtgcttctgtttcatcaaacgaaacaacatatgttgtggggtcatctgcatcatcaccacgtacatcccagtggtattcacgaacccaagaaaatgtaacatcttcagtttcatcatgaatatccttcgacaactgccagcacataaagtagatgaataaatatgaatgaaaagataaaacaagagttatggaagttgcttcaaagcatgaaaggtcggtttgttaaaactaaaatactactgctccgcaaaatgattatctttacctcatctggagcagggaccatgtaagccaaaaacttctccgggttccctggatctgagcctgtcaccttgtaactttttaagatggcctgaataataaatcatgatcaataatgaataagaatcagcatttttcagattgttaatagaacttcagaaaaacttactgaagaaaaattggtttaccatacaaaatcacaaatgagctgtaatttccttggatgtcgttataactagccaaattacctgtgattcgtgagcatcacgtgtagaatgatcaaacttgctgaagatctctgaatcgcctgtaggagcattatcgaatgccacaaagacgaattgatcgtcgtatctacaatagtaacaataaaaagaatcaaaccaaatgaaatcatcaacacttaatactagccatcaaatccaattctgtttaaatagttatcaattaaatgtcttcataactagcagcatcaattactgtaactggttctgttgccgtgctgggccagacaattacttgcatgagaacctatccaatgaagttcattaactaactaattattgtaagtgccagaaaagttcagtacctttcaaaatcaggcaacagaggcaaaacctcaacaggatacaagttcttattggtagcatgaacagggcgtgacttgcatgcctcaaaagaggcctcaatttccttaatttgtcgatccctgaaaagtgactcacaacgttaataaaacgagtgcaagatttttggctggtgttaattttatcttaagaaattaactattgacattagcaatataagagcaagcaaacctgtcattgagattctccaaaaggttgcggcctttcatttctcgcagttcttttgcttgtttttcagttagagactgcatgtgtgagcaatatgagtcatgacatgtgtaataaaattctttcagaaagttaaaagacaaaagttttaagaaatagtgcacctgttttgccgattccatgctcagaggagatatatattgagtcttgaccagccaggcaactcctttatcagtaggcctatctttccttttaattccatcttttttcacaggggttgctgcttcatcatcacgcaacaattcctcatcttctggatcaaggggtggtctaacactgggaggactaatcaatccaataaaatacaaaatcagatttgtcacccctaactcctgaaggcttattaattcaaagttgttaagaattatacttgtatacactgaggtcaagtaggtcaagagggatcccaagatctggctcgacaaaaagcttaggcttgtatgttttttccaacgacgttatggtgtaccttgaatatctgcaaaacaaaatgaatatataagttcacgcgaacataaatattgtcacattgcaccaactaggttgagatcttcaagtgagaaaaagcatttatagatgttgagatagatttcacttcacatgctgacatctatattctacaccacgaaagaaacttctatcacgaattccttcacttgccttttggcaagtgatgcattaagaactcaagctactcaatttatcaactgcaggcatgcccaaattatgttataagatagaaccacatactgatctttttctgtcctcatagacatgagcttcggttgtgcacttggatctggaagttcattccggaaccttcaaggaccaaaaatgttacgtttaataaaatacatgttagactagaagataaaaaagaacataaacaacgaataaggaagggaaaaaatcgatggtgttagtccttgtgagcatactcacttcagcttgcataaaaatgtcgttggcttctttagcctattctcaatcctttcattgcttaagaatgaagtaccccttctgtctcccattcgtgatcctgcaattgaaccatgacccttggcggaagacaaaatttgagttttttgcaaaactgagtgttgtgactccttcaattgctgtctgtgcttctcttcttgtttaatcttttcatattctttccttttcctcaacctcctctcttcttctgtttccactctccctgaaggcccatttgctttctttactggcactgaaggaacaggaaatttctgttgtttatgaggaacaccgtgattcgattgcccatgttctcgcctcccggacgctgatacctccttgtgaacccctctatctggaccattctctttgctctgagttggtggaggaggaggtggtggtgagcttggaggcggaggtggagatgatggtggtggaggagggggcggtggctgttgattgttgaactgagaaaactgtgaagaagggtagtacgcaggaggttgcggaggctgtaagttcatcgaattttgagaagctggtggcggtggtggtggaggatacgaggaatccggcggaggaggaggaggtggataggcgtactgctggtgagggggtggtggaggagcagggtgttggcttcttggagcaccataatgttgtgacgaagttgaaggtccgaacccactgttctgaaaataagacggggctgatggaacagacccatcaccaccattgccaccggcagcagtaccactgtaattccaagctgggttatactgatttacgcgctgttgagatgatgaaggaggaggtagtggcgctgctgctggtggagggttctggttcgacggcggaccgaaagacgattgcgtagggaaaggcctgtaagaggccatattggatcctctaaccacactcaaataaaaaaagaaaaaaagaaaattagacaattttccaattcgccaaatcgtaaacaaaccctagcagggataaaatccggtaatttatacacctcagtcaaaagaattccagaaagttgcaaacccaaaacagctttatttgaattaatgtgaagaacagatcaaccagttatatcgaaaacaaatctaatacactgcgaaaaccttaggaggaacagtagtaccaaaatcaaataggaattaggaaattcagctgggaaaaaaaatataataagaaatgaacaaacaatatcccaaagagggaaatgattttgattgaggagggaagcgaaatttagaacccgtaaagttgcagaaaccctagctggttagagagagagggaagggagtactagcaatgatgagcggaagaagggagatgatcggagacaactcaactcaacaagctaagcaaagcaaagaggaacaataatattttttattgttaaggtttatgtcatacgacatcgaactctgtgtcgttttcttgttatttatttaaaaaaaattaatttaacctctattgactttgaccaatgtgacgtattttaatgatatttttcccatgtcacctcttcaatttaccgtatacgtatacttttttacaaaaaaaaaattaaatatagaatttgggaaaaaaatgattactttttttttttttaagttttttttttctttttttgaaattaaacttttattaactacaattagaacttaatacattaattaaaaaaaaaaaagaaaaaaaatcactaattcatcattcactctgaatatatacatgaataactttaagctttaattaatggctataccacaaacataaaatgcttaaggaaaactagaaagtaaattcgcaaaatcatctaataaaaaacgtagttcattacaaattttctttttataattgcaagttcttccatttgtgcacagccagcccataggttttgcaaaatgggctgctgcacaggccccaaaaaataaaaggtccattttttttttacatttaagtccaatttattatttttaatgtggaaattacacatgttatagttttttatagtgcaaaaatgtatatttttcagaaaacttacattaaaagaaaaaaaaaatatggagaacacaattagagtaacaagttacctatcccatatttctgaacttttttgaattttttccatagagtaactttttttttaagtggctatatttttgtaacatttggccataaaacccataaaaatgaaaattccatttcatttatacgtacaccgaaattttcaaaatcttccaaattttaaaaattctccaccatttataatttgcactttttggggtggccaattttaaaattaaaacaagtctccaaaatatgtaagagggccctgatttgtagtgttttgaggtagtatcttttaaaccatttctagactttttttaggggacattccaaacagttcattagcaatcatttcaaagtgaaattagtgaagtcaagaaagaaaaagaaaaagtgtcagacttgtttatgtttagtgaatatattctcacttggcaaaagaaaaacacaagaagaaaaatccttaaaaaaaaaaagttgaaaatgttgaacaaggaacatccatgattgccccttattcaagaattaattgatgaaaatatactaatcatttaagttgctaagcctgagagtgacagtatgtccataaaaaatttcatccataattaattcacagataatatctaaattaagatgtgcttccatcagaattataaactttagactcgaatacaaggtttttgcccaaatgaatgacgggcttcaaataatatcttcggcccattttataatatacggattttt

SEQ ID NO: 36651 - DNA, 2987 bp, Cannabis sativa
cccattgccaccggtctgattgcggctgtgacgccgccatactaaatttagtttgacactcacaacattttaggcgcggattctaacgagtcaagggagacaatgggaaacgacgtcgtttcatatgtttcgaagttcgaactggattagttaaacttcctaaaaaaaagactgtggagacgacgtcgtttcatatgatttgaactagcagtttgaattgtgttctttattttaaactaaattgcatatccggtttttgtaaagaaatcacaaccacactgcgagatcttcaaactacaaaaattataccgcgataatttgatacagtgttgaataatttacaccatcattattatcaaacattataataaaattttaaaaattaatcaaatgaaattttaaattgtctctacaaatatgaaataattgtctgccaacctaaacactccaaatccaaacatccatctcaagaggattcatgcatctactgccttgttggggcttggttttgtgtagtatcatatcaactttttaagtagatgtattgactcctttgatcaaatttaattaggttcatattgttagtcaacatgataaaattgcatggtttaactttaaatcactataacgtatacaagtccttttttctgatataaagattttattgtctaataatctttccatgacatttttttttgtcagtcataattttaatattgtgactcatttttcattatgaaaaaatatctttaaggtgaaaatttaatcatagctttggtcaatttgattatatgaaaatctatagaactatttttaccgattcgtacatatagaataccacgataatcattgaactttaagtccaaattaagaattcaaattccatttaaaaaagaatcgaatgaggttgaggaaacaataaacaacaacacaaattgcaataaattttgctatcttcatggtttttttttttgaaacatgcctactgaaaatagaacaaattacttggcatgaatcccaagttattaattcatggaaaaggaaaaaccagcttataattgaggccaggaaacttagattcaaagattgaattcaaaaactgtgaactacccttaaatctgctttctaaagttacaatgaaacaaaaaaaataaaagcaaagcgttgtatcaaagattgctttgcattatgaatatgaagaaaccaaagtgagaattctgattccttggcgatgaaatggctattagagcataacatcacctctctaaatcctactactcacagcttcatctttaatagtacaagcctcagaagttcagaacttcttgttctctatccttttgcccttgctgtaaatctacaccaaaaatttaaactacaaatcaggtaataaactattataatctatacaaatttaacatcttttgttctttaaacattcactactaagctcatacaaggtaacagaagatggataacaatcgtttccctctagcaatgctagtaccgttcattagatatgatatgttgaataaaagaaaataacagagtcaccataatcagatgttttttaaccaagaaccgactagaccagcagataacagaatgactttcaatagtgccaatttcatatgtagcagcattcattaacatgccccagaagagaccaagcaacactagcacaagtgcataagattttcaatatcccaaaaatctagaagatgctggttaattcagtgtttaatgtttatttcttatacattgtacctaggcaccaaagtaaatgtttttcaagctcacatgctagttatggagacaagatcattagctaagctacagaattaaacaaacaactcaaaatctaatccacaattaaaaaactagatgagatgaacaatgatcaaattagatactaatcacattgtatgacaaaactaacaactacccagaatcaaatttcaaagatttgatcaaaatatcacactacctcactccattgagactttggcaccaacttccttcatcttcgctataatggtctccgcttcttccttagtaacccctttcttcaaaagcgtaggcgctttctccaccaattccttagcttccttcaatcccaaagccgtaaaagttctaacttctttgatcaccttaatcttcgtagcggcatcaaacccatcgagcttaacatcaaatgccgttttctccaccttcttctcctctcccttcgccgcaccggcaccgcctttcccagcgccccttaggtcaccgaatcccattccaggcatcatcatcaccatcgtcggcatctccttcacgcccaatttctcacggaggacctccgtcaggtccgttacctcgagcaacgtcaaacctgagatctcctccgcgatcgcagaaactcgctccggcgtaggttggcttagctccggcgaggccgtggtgtagggtaaggttctgaagcattggaagttggggttttgggggtttagggttttactaaatcgggaaaattgtggggcaatgaatcggaaatacctcattttttatgtggattatgattaagcagtgatagtagcagtgggattgttgaaggtgagtgaaggtgatgcattcatggctttgaatgttagaacaggtggtctgtaaaccgatctctgacataaaccctaaacggtgagttgagtgagttgaggaaggtaacgaggaccggtcatggacttgggccttgggctcgttctaggctcctagcccaacccattagataatttctctaaactatcgtctatgcttttttatttatgtcgtttttacatatttatgtcgtttacatatttttgtctattgttgtcgttttcaaaaattattctcgttttcactaaattattgtcgttcctttaaattcttgttgtttccctttatatgttgtctttcttttccttgttaaaaaaagagtccaaactattgtcctttatccttcttaatgt

SEQ ID NO: 36652 - DNA, 5205 bp, Cannabis sativa
atcccacttattacctgattaactcataataaaaatataaaccctaattatttactattaggcttatcgggatattacaaggtgggtcagtggaggtaggcttgggagttaagcgcccaagtggatgatgggacacaggtgaccgggataggtgtagagcagactgcaacggtactatgtgaaattggtgggggataaggctagtcattggtgtttttgtagttgcttttgttgttgttgtggttgttgtggttgctgttgttgttgtggttgctatggttgttgaagttgttgttgttgttgtagaggaggtggtgtaatggaggatatattactcgcaaccgggtttggagagaaaggcttagcctttttagcactttggcttagggaggttcttcgatcccttgcacttagactttacgggggtctctcttggggtaaaccaagcccatccaagttgtcatcaaaaccccctacatttggtacaacgccagggattgctccactagcaggcagaacttcctttaaggcttgttctcctgaagcaacaggcacttcagaaacctcccagggggtggtggaatctttctttcccctgcccaagttgaagagcctgggattgtagatctagtcttaatgggaggagcaatctcctagacgttagacaacaaagaggatgagggacgatgtttttttcaggtcctaaaatgacgtttcccttgcctcctttataggtgctcttggctttgcccaaagcggctgagatcttgctgatcaaagattttaacatcttgcattttggagaatctacacatgtaacgacgatatgagtgagtaaaaaattgcagatattatcaatgtcactaaaaaaatggcagtaacaaaaagtgaagtctactaaataatattatgcgtggatgaaaccagttagtgagatgctataaggttgcccacgagcaaaagcagttgtgcccccatgactaagcaagctatcatactccttaaagttgggcagagagataatcatcaaagggtccactttaatagtgtctgaaggtgctcctggattccttgggctcttaatgatttggtctactttatctatgtaatccttcacggggtacctacgaaagtttatgcctaacaagtattcgtcgaatcctccctgattcccccaacacatgcgatatagactgggggtacagaggatgcggaagggtctatcacctcttcccgaagtactagctctcggaggccccacatcaggatacacagcggcaaatctcttcaaaattatctcttcctcatatagaggatcgggatgacatgagaaccagtcatggtttaggatattttttgtttttggctgcttcagtgattataatagccaaatcagttgcaatagcctccttcatctccttagagtgttgaggttgtcatcggaggttgactgtgtcaatgctttgaaacttcgtaatcaagcaagatctacggagaagttcggtcttcagtaagtcctcaacctttagctgttctttggagaaggccctgtattgagcttccttcttgactatctcctcgatcctagcgctttggcaagaaagttctgctgaaaaatcgtgcacgctaatgggtttacacaaacacaaaagattcagaaataaacgagattcaagttaaataataagagtacctgaaagatgaaaacttaggcgaagagacaacacccttttggtaggaaatatggaggagaagaacaagtactcgtggaggtcgtgagtacgattagtgtggcagatagggcagtaagaatttggatgcttatccaatctgaagaaacccaaatttttcttatttgtactcataggattagcctttacgctgtagaagtaaaggatttcctccgaagaaggagcttctaagttgttcatcttgaagaatacaatccaccaagccaaaagcctatatcatgaggggatcagatggaaaggggaaatcccaattctcgcaactaggtttacgaagtaagttctcagagggagatgagcgccattggaaatgtgagaccagctcactgcactgacgaaagcagattcttgcatgaaagaaattctgtgccacattaatccagggatgttgcaaaggccgacaacgtcagcataagcttgccacatcccgtaagatttaaagtagttggctttttgatccatttcccaaatggatttattgtaggcctgagaagttaggggtgccttgcccccttctctcaattgacttccacaagggagtcctcctcaatagtgggctcattctcaagaatggtttctaagaccccctctgttccaggtgccaccatgggggccgtggtttgatttttaccagcagcggtcctcttagcaaaagaagtgggaacacctttagtagaggcaaccatgcttgcgggaagatactggatcacatgaattgctaccaacacaaacacgaagataaaagcaaaactcttgaaataattgacaggtggaaggaaaataatcaccagaccaacaccctaatcgacctaatcccacagtttacaaatgtatgggcaagagtttctctcacgcactctaacttgcaatttggcacgtaaacagtcctaaccctaatctgaacaaaaatttctaccctagacgcgaaatgccaaacgttcaaacagggggttagtgcccttacttgtcgtctaaggaggaaagagttgtgtgttgaggaagcctgtctgaaagccctgaagctagttgacgcagcaattgcagctaccctaaaaatcgtacactttgcctaatgaggaatttagtcggtcaagtcggaggggttcaatgtctaggaaaagctcaaaacggatgatgagtaatcgttggaccaaagcctctaactcctcctgcatgcaaacgttggttgaaaaggagaaaggttacagggagaaaatatgaagctttgtgtggtaaaagtgaaaagaacgccattgaggatggtttatattttaaaaacaaaaatggcctttgcgggatcaatatttctaattctatagaagatccaatggctagggagataagaggtccaacataattagcccaaggcccaccgagccatcaaggtgggtctcttcacatcattcagtcgtcggttacattccacctttcttgtcgaagacacctcatcataggccaaaggggatagatgaaattttcaaagtgccgtgtggttgccacgcaagtggatgtaaatgtcgtatttgcccttagcagagtacagctcatgcagaagatgtgtacacgatttaaatcgttagcacgtgtcaacgatgactcctggggaaggatgacaagctcccgtaactcaaagagtgtcgaaagcctaggggtaaatcttatccatattttcatacatgagacatgtggcatgattaaggaacaaagtgtattagcgaaaaggattaaccgagataactcataagctatcccactggggacatctcagccatcctagaaatatgcactagacacctgatggaacaaaccatttgcggacaagcaacatctctcggactcagaaaatagttgtgacacataactcccagatggaacttccttaagtgatgaacctggggtgcaatagcggtcccgcaagcaataacaatatcagctttgtataaaagtttctctatagacggttacacctttttctgacaccaaatcagatcttgtccccatgccaggccatggtagtgcgcgtacggacctctggacattccttttgctcaatagtcttattttaatgagtatattgcaaaggagagatctttgcgtgacacgtgtcttagtttgtacgaaatccctcattgtagctacacgctacacgatgaagaaggttcttaccaaccaatggtcagatggtcctttagcagtatcagtcttagtagcgtgtggagtacgaaaccctaagtgggtaaagggtatgccctttaccccatgtgtgcctataaaaacttccacattctctttgagtgaggggtgaacaatttttcatttatagacactttgctaaaatttctagagatctttctcctaagtagagaaacaagaggaatacatagatcattattgtaaacacctgtaatacataaacactttcccaaagagactaatactattaactcatggactaagcatcattaacgcctgaacctcgtaaaaaatttgtttgtctactgtttaatatcttttattttcttaagctctacataatttcggtaaacaatactattacataataaaatattttttattaattttacaatattattatatatatttataaataaaattatgtagatattgtatataaggaaattttaatataaatttataatacttaaaatattatagatatttttaattttataataaaaactgtatagatattttatatacggaatattaaatttaaatttaaaatacttaaaatattataaatattttaaattctattttttatattattagttttaaaaaataaatatatagtaaaataaaaagtcaatcaataatttacatgaatacaaaataaatatacagtctatatatacatgataaatataatgttatactgtagcatggctgtataatattgtgtgttttgccgtccattaatgataaaatatatatgaatattactcataaatgttttttttattaataagtaacatatatttgtaatgactactcaatggttatatttttttatgtaaccataatggttacatttttgttgatctgtaattgtaggttatcaacatttaaatttttttttttgaattaaattatataattaactatttcttaaagtaattaattttaaatttaaatatttaataagacatttttttagcaattttatttttatatttaagtctctattattaataattaagccatttaattataatatctataataaaactttattatttaataaaatttaaactttcaccctttctaaaatatatttttgaataattaatcacaaaatctaagaatagtgcaaaatactaaaatataaaaattcataatttatacatcatatctaaaccccctatccgtatatcgttttagacacaacctgaaaataaactaacaatttcatatatgtatatttttatcagtaaca

SEQ ID NO: 36653 - DNA, 6275 bp, Cannabis sativa
gaaaatatcatccccaatttcttctttggctattgaattattcctattgatccacactggtattgtgaaacaattccaaacagaggaatcttcaacaaatataagcaggaacatgtattcgtagaaacaaatattaatgaacaacaattcaagcgctacacttcttctctttctcccctaaatgtcaaagcaaacaagtttcagtccctatccttgatgccgctgctactggcaccggactgcttcccagtgtacttctgccgacaaccaagatgagaacgtgtaaaaatatgatactaagatggtgaacaacatgacctcagtaagcaatatcaataaactccacaaataaaaacaatactaaactaaaccccaaaaaagtcgttgttatgcattagatatgaaattgacggtgaatggataccatatcacccagaaagagaagcactaacctgctttccaaagctgaatgggatatatttatacttaatcatgtgcatgatttggcgcttcatcgtgaggacaaacagaacaatccagtaacaaagaagtataggccagaaaacagggacatcaaacacagaaaagaaagtcatcagaaaggctacacagaaagcctttgtaatagcatacctgaaaacacaaaaataagagatctcatagtaacacaaacatgtaaattctacgttggaggatgagccaagaagcgacaaagggcaacatcctcattctcaagaagaatttctcgaaattgctaatgaaaggtttaacacgtaatgatcaaagattatggcaaatcgagctagtccctcaatatatttaatccaataaagaatgcaaaatgattagtgtaacaaattataataagaagtttcagattaccaaaacttgaactcaggcagacggcgaatgaatggcttaaactcgtctgaacctttggttggcaatgaagcgccatccaaaacctctagctcaggatcaacctttggtgacaagaaaccaatcaatagattcagtatatagattcctaggccgtaggatactatgtaaaatccttgaaggtagtagactcgaagcatataaatcgctgctacagcaagagtccccagccacctatgtacaggatgaggtgtagatcgatccaaatagtattgaaatgccctcgaaaaatcgtttctccacttggcaagaggcaccgaatcagaggcagcattgccctccactccttccatgaaatgtcctctaaactatatgtactgcactaaaattatataagattaatagtgtagctgaattattttaaaacaccggtttaatagatattacgcgctgtttgtttcccgagaaaatagtaacgcaaaaattagaaaaacattctcgataaaactaccagttttgcaaccgacacatcagagcaggccacggagtttttttagggcttaattgactaaaattaaacattaaaaaccttacaatttatttcaagattaaacacatacaagtttgatcaaactatgtttaagtatgcctctagaaaatttcacaccacaccatgattataaaataaataaataaaaaaggagtagaaacctagggtttcgtcaatagatctgaatcattacatgctcaggtaaagaatacacagtcaaacaaatttaaagaaattgagaactcaccttgagaatatacagaaaattagggtcagcgaacaaagttttcgaagtcgaaattgattctaggtcgaagaacgaggtttttattgtaacgattatttaatttgtgactattttgaaaatttcccagttcccaatcaactttccgagaaaatatcaaaacttcgctggtaaggtagtcattttcatttggaatagcaaaacgcaccgtttattacccaatttgtcaaagtgatgttgtttctattaaagactgaaaacccgaaattgccctctccaggggtttggtttgggatttccaaacaaaacactgaactgtgagttggtgaaaaaagaaatgccactgaacttgaactgtgagatcttaattgaatttccaaaaaccccaatagatcctacttctttctgggtatgtgaaggagcaagaaattttgtggtgaaggaagaagaagaagaagatgggaaccctagggagagcaatatacactattggattttggataacagagactggccagccaattgatcgccttggttcactctatctctttaacccaagatccccttccaatttgtggtgttttatgttttatttattgaatcaacgtatgaaacaaaatgttaattgtatttgtggactcatttcctttagtgataatgtccataaattttcattagttcgagtttcaattgaaggattaaatttgagtcggaagccaaattttcattgatgaagtgattgtttaatttttcttcgagttaagcattttttttctctcttttcttggggggaggttgtattgttttatagttagatatagcttattctttcaatgttttctgttagcaacagtgggttcttttcgagcaaaaacccacgcttgaactttatgatttaccggcgcatttttagtttcttgtcaactgtaatgtgactccagcatttctttcatactcgtctttgtttaacttttgtgcagtgaggccgaaattttgttctttactatcttcactctcagagtctgggcactgttctttgtgatttactggcatttgcttgttttttccttgccgcactactaatttttactatcttcactcgcagtgtttaggtgccggactttgatgaatgtgtttgataaagctcaggggtcgatagaggcatttgttgcaccaagtgccccaatcattgggtgggaagagagtagtctatttggtatggatgtgtctgagagttaataacatctattagaatttaggataagatatatgaatttcatcttaaaactaattgactatgagaggagtaagctctacttctacacattaacaatatgtgactgactctaatacactttcctcacgcttgaacctaaaaatgtgggtataacaaacgacctttaagagttcacataaccaaacatgatatttgaaagaatcccacaataccaaatcgggaagtatgtaggtgtacactgtcaagaaatttgtggatttttgaaataggtcaaagatcctactattgacaattgacacacattggccgaaaagtctcaaataaagattaaaggggagataatgaaagttttttatttgactctaataccgtattaaaattataaaatacatgatgctcaatctcaaaattaattaactttgagaaagtagttcattcatcttatatgatattttatttgtgtactaactctaatatctaatatgacattacattctttagaattaatttctcgacctttatgttttcttaaggatgtccagatcatcccgcctttaatgttcttcccctctcttttgtaattgtttcaaaatcagcaatcttttgagttttcttcctcaaactccgtccaggaactatttcatttctttttttggtttttaactttgatctagatggataggctagatgagccttaatttttttttttttttgacggttagatgagccttaattttatttgtgcaattcttcaaagaatatgcttttaatgttactagtcttaaacacctaattgctattggttctgcttaggtatatgtgagctgggtaggtcatagtgttgtcttacacaactgcactattgaggatgaggcttaatggagttgttgtggagaagaatggcatggtcggttcctccagaagctctagtcagacaaaatacaaggatccctgcaagagaggtatgtttgtctatctaattttacaacgttgatgcctaacctaatatgaataactaaactaatactcgtgatagttctaaagggttaattttcatttgatgaaaacactaatccatgtcatgtcatgtcaggtatggggaggtaatccagcaaagttcattttcccagtcagccaccaattatactaaccttgtacaagtccatgcagctgagaatgccaaaccttttaagaagattgagtttgagaaggttctctgcaagaagtttgctggtcgagtcgagatgaggaccgtgatgtgattcaattctaggtgaaacatccctagaattggttctcccagataatatcctactagaaaaagcaccaaaaattttttaacatgagtttcatgtctcttttttatttgatttttctttagtttaaattttgacatgaagggatatttcatctcatgttcaaatacatggaaaggggattactttcttttccaataatcctgacaaattttcagggaggatcggattctacaatccaaccatattttcttactgctatgttacaaagaattggattgtgcctaaaattttatttccatttttatgttaaaaatttgaaataaaatttaattttacaaaaatctaatttcaaattttttaatcatttataaaatttaaaaaaaaaatggtttataaaatagctgcataaattatattaatgttaaggtatcttatgttgtagtaaaacttttcctttcttttttagggtttcatccctatctctacccgtgagttctttctttgactttctaaccagagctccgtcagcctttcttgggctttggtgtggctctagtcgggtgtgggtgtttgtatttgtgtttgtacgcacaaggacctcttggtcctttctcgagatgccatggccttttttttttcttttcaaccgtttgttgcctttctttgacaggttgtgtgactatcaaagattcgatgacctttcagaagttttgtatttccaattgagggtggcgttgtcagaattgcagtggtgttgtaaagatcgcttaattttgttatggaaattagcagataattagggcttaattatgaaactagaatattaattttgatttattattttatgtatatttatttgaattcagggtgtattattcatggcatatatggaattttatatttttacatattttgtgatcgacaacattagaacgcgacgtttagccaatagaatcgcattttagtattttagtagtagcggggcaatttagttagacattgggaatgtcaggaattatttgaggtttagaaatgatcaaaatacccctaagtgataagtgtgcttgttggtgcgtgtaaaggcaaaatgatctttttagccttttaatacttttgtcctttagtgagttagataaaaccttaatctgattcattttgatgttattattagttagataatacaatttattaattcatttattcaaatgagaaaaaaaaaaataccaaaaaatccaacaccttctctctctttctctcgagctctctttgaaaccagcaggacctaggattttaacagtttgattcagaggatcttagctagttcttggtgtatccattgaaggtaagagccttagcacttttccctttggttttcttatgttcgtaattgagtattttgcatgattttgtgagttggggttctgtagctttcaatagtgttggtttttgtttttttggggttaaattatggataattagaatgatttgagctagatatatgggttgtggtgttgtttaagcaaggtttaagttcatgaactcaagctttgctctctaatggtggtttgtgattctagatgtcttggggtgttttattgcatggattaggttcattatcgtgtatttagcaggtttggaaagtttggtgtgatttggggttgatatgaggttgtggggtgattttgtgtgtttcctgcactaaactaaaatttcggttcaggaggacctgtaagaaccggtcgaccggttggtccccaagaaaccccacaaaaccgaaattctggttggggcattttagggaaccctaatttttcctatttttacgatgtctagggtattaccatattatccatagataggaaaacttttagtttcaagtttaagtccctgaaaagtgatttagcgtatcactcatccgttttgcgaataatgtgatttaggggcctgtaaatcgtcaagcaattattccattcaggttggctggcacacctgaactcggaaacgaggtaagattagtataatgatatgcatatgtgcttactgttgggattttataccctaaataaaatccatttcaatataatctgatttgttatcaataaaaga

SEQ ID NO: 36654 - DNA, 5060 bp, Cannabis sativa
gtagtttgctcccacttggtttgtggtttgagtccttactaggtacctacatagcaattgctatagtttcttgatcttcaaatattgtggggttaggcgaggatcctagtttcaataataatagaaaaactgaattatttgtttcttattgaccatcatgtgttgttattcctttcagcttggaacctccagctttgggcatacttttcaagtctgataatcctgaaatttctgcaaagcctgtgcagtttactaaagttgcccatattgttgggaagggttttgatgaagcttttttctggtatccgatttctccacctggttatgcttctcttggatgcctggtcactaagatagatgaagcccctagcatcaatgctctttgttgcccaaggatggatcttgttaaccaatctaatattgttgagggtcccatttcaagatcttccagttcaaaggcttctcagtgttggagcatatggaaagtcgaaaatcaggttcatgaatgtttactagctgttggtaaaatgtataattttgtttgtggctaccataatggcttattattatgaaactctaatctttcttccatctttcctgtacttaaaagtgttttgacatgtcgttagcttgtaattttgtttgtttagtttatatatcatcacttctttttgctcagatatttttctgtatagcttaaatctcataattttttgtttagatttttgtttgtttttttttaaaatgcataagctttcttttgcttgaaaaaggaacttcaatagcatgtttgtggatctgcaggcatgcactttccttgcacgtggcgatcttaaaaaaccatcaagccggttagcttatacaattggtgattctgtaaagccgaagacccgggagaacataactgcggagatgaagctgagttgcttttctctgactgttctagacagcttatgcggaatggtttgttctctctaaggcaaaactcttttaggctagaatttaatgtgaatgtatttgttccactttgtacttattaaattatggtttggaactatttcagatgactccactatttgatgcgacaatcacaaatattaagcttgctacacatggtcaactcgatgctttgaatgcagtattgatttcctctattgctgcatcaaccttcaacactcagttagaagcatgggaaccttttgtggaaccttttgatggaattttcaagtatcatatcgttcctactattgtttcaacatttttattttttctttaaatgtctttatttaacaaaatttagtagaggttgtatccttcatgaagcattctgatctttgatttcaggtttgaaacttatgatactaacggagacccgccatcaaaacttgggaagagagtgcgtattgcttctaccactgttttaaatgtaaatgtcagtgctgcaagcttggaaaattttgttgcgagcactctttcatggagacggcaattagaacttgaaaaaaaagcagccaagctaaatgaggttggttcttgaatatttgttgctgtatagtaaacctttcaaatgccttacaatgtctttccttgacaggaaattgggagtctacatagggacaaagaagatccatctttctctgctctggatgaggatgacttccagactgtgataatagaaaataaacttgggtgtgatatttatctgaaaagacttgaacagaatacagatactgttgaccacttgtgtcatggggcttgtgcttctgtgtggattccaccacctaggttttcagacagattgaacgtgtcagatgagtctagagaagcacgctattacattgcgatacagatccttgaagccaaggttgtaaaagtggttaatgcctatcaaatacttctgagtttttattgtcatttctattgctatttttgacctacagtggcttacccttctttattattattattattattattattttaatcagggtttacctatgaatgatgatgggaatggccaaaacttcttctgtgctttgcgtcttgtcgtggaaaatcaggctacagatcaccaaaagcttttccctcagagtgcaagaacaaaatgtgtcaaaccttctatttctcgaaacaacaatctggatgaggggaccgcaaaatggaacgagcttttcatttttgaaattcctcggaaggtacctaacgaatttaatatcttctcatcattgtttgcttttatattccttttgttcattctccttagaagagacatttatagttggggaacaaatttattcttcattttctgttttcttattctacttttattttttttcttcaatattaatacaagttgaccttttgcgtaaaaacaaaaatagttagggaactgccaattgattggaatgtatattgaagcaattggtaaaatgctaaactttactttgtaatttcgatgcaccattttcctactgctcttataatggaatcatcatgtagggttgctttcatataatattctttcttacgaagttacttttctagctaagctttgccatcaaaatctcgtttaagttgaagtttcttttagcactttattccaataaacaatcaaagattgttatcacatgcataatttgttttcctaaatatttcttttctctcaaattttaattgatggtgtcctgcatgcatgaattattttattgatttttcgaatatgattgttgcaggctgcagctaaattggaagtggaggtgacaaacctggctgcgaaagctggaaaaggtatgtgtttttactgtttgcatttactttttatgagatagttttcatgaagctctgcatatatatatggatttaaatattttgatttaattatcttgcacattcaatttcattcttttgcttctttaatctttttttatttttcttctgagtatataatgtgttttatacagaaaattatatatgattgatattacttgtatgtgctaccttgtgtacatccacatactgttggagccagattacaactccaatttgcttcatgctctctgatctgctataatatttgccatgttgtacctacaaaatttatttttcatttgaagttgttttcctctagttgtaaacttggcacggcatacttccctttcttttctttacttttgattgagtcattctctttctttggttctacgcatacaggggaagttgttggtgcactctcatttcctgtggggcatggtgcactcatgttgaggaaggtagcttctgtaaggatgttccatcaagctcatgaagctcaaaacctcgtatcacatccactgaaaagaaaggtgatttttctttctttttttttaagaaaaataaaataaattctgcttgctcattgtaaatcaatattacaaatgttctttttgtccgtgactggcatgcatttgctgataataaaatttagctcacgcaatttaatgttgtgttttgcaggttcagcaaaacagcctggatgaaattcttgactgtggatgcttgatggtttctactacatgttttgagaggaaaacaactccaaaaattcaaaaagatatggaaactgatactgttttggagagagatgttggtttctgggttggtctgggtcctcagggtaactgggagagtattcgctcattgcttccattgtccgttgtcccgaaatcattacagaaggattttattgccatggaagtcgtcaagaaaaatggcaagaaacacgctatatttagaagtcttgcaacattagtcaatgagtcggatgttaaattggatttttcaataagttcatctcccaactcaggaacaagtaacaatttagtggcagaagaaatttttcaaaatcaacgctatcaatcaagtactggttggggtaacaactggtctggccttggcagtgttgagccagggccttggagcagtcgagacttctcgaattcctcgaaggtattgatagagtggttatttcttagttgagttttcttttgcttcggtttgttgcttccttcacatttcttgggctttacttttttgttaggatttctctgaacctccgcttccccctggatggcgatggagttcgacatggagtattgagaagtctcaatttgttgacaaagatggttgggcgtatgctccagattttcacactttgaggtggcctccaacttcttcgaagtcatgcacaagatcatcttctgatcttgtgcgccgaaggcgttggattcgtacacggcagcaagttattaacgactttcctgttgtacatcctggagcttctgtagttttaccttggagaagcactttccgggattccaaccaatgtctacaaattcgtccttctattgatcatccccagactccgtacacttggggtgatgcagttactgttggttctggttatgcatgtggaaaggatcaggctcttgtggagcaagtttcactttcaagacaatatgcatcaaagcaagaaaataagatgtctaattttaatttcacgttaaataaacttgagaagaaggatgtacttttgtgttctagtgctgagagaaaacatttttggctgagtgttggaacagatgcatcagttcttcgtactgaactgaatgcacctgtttatgattggcgaatttctgtcaatgctcctttgaagtttgaaaatcgatttccatgtccagttgaatacacaatttgggagaaaattaaagaaggaaattgcattgagagacaacgtggagttatctcttcacggggaactgtacctgtatattctgctgacatccagaaacccatctatctaacattattcattcagggtggttggtctatggagaaggtaagaacatgcaagtaattctattccctcttcgaggaaaaaatttccagtgtgtaaataatgctttctgtgtatttaggacccagttctcgttttgaacatttcttccaatgatcacgcttcatcgttctggatggttcagagacagagtaaacggtttgtgattcccaaaggctctttgtttttt

SEQ ID NO: 36655 - DNA, 4956 bp, Cannabis sativa
ctcttttgcattcgattggaagtcaactttctccacctccgccgcccagctcatcaatttggggtggacttagaattcccaatttcctctgttagctgctgcactagttctagcacatcacagggatcgtgaaagactttcgactgagcaatctcttcactctcatcttggatcaaagggagttctcgatcaatcaattcaccattggtgctgattttgctggctttgaggcaatccgcttcttcttagctatgacgaggaggagagagcatcacacactagatcagataagttctctattttgactgagcaagtattattttattttatttttgttgaaactaattatgagtaattagttttgtaaattattttctaattttcaatccctgtggagacgatactcgatttattactttattacttgttgacgattgtgtgcacttgcgtagagtaattttcacaacaatagcatttttgtaattatcattgtttgtaatttccctcacatatttatgcaaagataaaatcatatatgtttctagaaatattttgaaaccccattaagctctttaaggtggggtgacttggtgacttatgaagtacctttactaacagataaggattcaattgtgtattttgttgccctaccaaggccacgtatcaataaaatgttatttatccatagttctttatgtatgattatataagttctatgtgttgcctgtttgttgccttcattgggttattgtgtgctaattgtctgtgttgtttacttgtgagttgtgtgaaattgaaccttggaatgacttatgatgtgcttgctcatattttgttgttgcactcaacatgtgagagacatgcatcgtatctaacaattggatttgtttgcctgcaaacgcgtttaggttgacttgttagttcagtatgccaacaagtatcgcacgtcccgcctacttgggatgtccaaatagctagtccatgacacagcaatgccaccacaatcggagacaagatttagtagtttatgaagcccaaaaccacaagaaatattatgaatgtggtggtatgactcaaaacaatttgaatggtcggtttgatgcaaagatgcttcagactcccatgaatgccaactagggatgcatagaggcatggagtgcttctcctatcctcgctcccatcccccatctccgcgcattttttatcaagacagagcaaaaatttttcatgttaccactttattttgaaccaaagtttatatataaaattaaatatataaaaaataaattacgtaaaatttaaaataatacacattatttattattcaaaacaaatataacttaaaattctatagatatatttgaaaaagaaaattactatcataccaagaaaatacataagaaataaagatactactaaaaagtaaataaaatattaaacaattattgtctaagcaggagtatcatccccagccccatctaaccccatctagtttatcattcgactataaaaaaataatccccgtcacattctccatgtaaatcagtctcgttcctcatgtaaacgaagaatctaaatgagatttgcaagaccccattctcataggaaatatatgactttagtctatcacctttggtggcctatgaaggttgtttgccaatgcatctgcttctcctcgatctatctagggaacgcaatgaagtcaatggtagcttctcgtgaatcatcaattaatgtcggcaatgaagaagagaagacttactcgtgattgaagtgctccacgcacgagccaaagaaaaagctgaggcaccatactctcaggctaggcttgcaagtatgtttgggaagtcatttgtcgccatatgaggtccatagcaaaatatatagagagatgtgtgatgaatactaatattattaagagagagttttgagatcaattctaataaaatgataatagaatgagagttctgtgaattatgtgattacttcttttcatcaaataatgaattataatagtgcatttatcaaaaatttacccataaaatgggattaaaggtcaaagaaatacatgattttgaaatcatatatatgaagttctgagaggcctactgtattataggactttagtttggtagttaattaagttgagggtataaatagactttcctatatagtacaaagggaaacctgatgagatctggccaagtgaggaaatgaatcataaggattaaattaataaactgaaatgctttagcgacactgtactgtacataacttccccaatgctcagactaaactagagacccagaagatgaatattcagaccaatacaagatccccttcttcttgttgctcttcctgttgtggttcgggcaactgtccttctcgataggggagaaggatgcgcttaatgtcctctgcactaagagtctcgtactctagcagtgcaattgccagtgcatgtaatgccttctcatgctaagaacatatcacaagaaattaacattttgtagtataaaaaaaaagacacgatattgtaaagggaagttttactactagtatagctagtatcagaacctagccatatgatctctaagagggaaaagtaatcagtatgcctattaaaagggctttcgaaaatatgagcagtggaagaacaaaccttctttaaaagggcttttacacgatcatatgcttctcttaacaacttcaccacctgcatccataaaaaatttaagtggccaaaacattttttacacacatcaaaagctaaaaagctcacaaataccaaaagcatacttcagcatcaacacgcgattgcatatctgaactcggtcgttcttttatatgaattggtccaataatatcgctcatcccgcaatttgataccttttaaaggaagatggaattgtcattagtgatcactggtcggcattcccagaaaggaattttcttgaattagagaaacaataaactcattaaacagaattttccaactattatgaaaatagaaatggcacagcctctgcccgttccacaatgccataagatagaagaaataccatataatgagcaagctctgtggcagtttgtagatcactgcttgcaccagttgttacatggtctcgaccaaaaataagttcctccgcaactcttcctcccatgcagacatctagacgggccagtaactgcttcttgctaattgatgtctcatcaccagatgggagctgagtaaccattcctagagcagacccacgtggcattattgtagccttgtgaattggatgagcaccctcagtgttgaatgcaacaattgcatgtccactttcatgatatgctgtaagctgaaagaagtatggttatgttagcaaattgtgatacaatttcaggtcccaagtattttttaagcaaaaattttattgcatttgtagagcagccacacaaataaaatgctaagtttctagcttcactaaggaattaaggattttcagtgatccttaaatactcatggctggaaaaagacagttaagtattgctctagttcatttatgctcaggtttgctttaatttgtattttttttttttttttttgcttcgataaaatgatcctctttcaagtaattttcctttatacatttaaaaatgttttgtttcttgtaaaatagtagatagcaaatttaaattaactgatccaattgttcatactccattctagattgcttcataaagaatacccataccttctttccctcttcagataaaaacattgttttccgctctgtacccattattatcctgtcctttgcaaactccaactgtgaagcagtcagcttgtcagcaccttcaacagccgctttaatggcagcaatgtttactaagtttgcaagatcttgtagtgaataaaaggaggtagaaaaacatgtcagcaaatccaatcaattctttaaaaagaataatagaggaatattcgttgcatgaaaggagcattattcgtatagtaaaatcaaactgaccagccccattaaatcctggtgtaccacgagcaattgctttaacatctatgtcttcagccaatggtttatcctgtagataaagctccaatatctcttggcggcctcgaacatcaggatttggaacaacaatctacaaaattgttatcagatcacaatatttagcattaaaaggaaaacaatagaacagtttgatgaaaaaacagatgcagtaaaaaggaagcagaaactgtgaaaattttcattataacagcagtagatatagcctgcaaagagaataagtggtggcataaattaatgaaagctaattacgtactttaacctaacttacaaaccgaagaataatagaatatctactttaacctaacttacaaaccggagaataatagaatatgtactttaagcaaagtcctgagctaaaaatttattggaataacaatcggaaaagacatgaaattgtaagttcccagcaaagtaaattttcttaggtaaagaccagatgcacctttcagtcttgcaagtgcttcataatgataacaaatttgaacattggaacttaagaaaaaaaaattactgcaagcaaaggttatagtgaaaccagcttttacagtttttcaaccaaaaaaagctttactttaaatcataaagtatttgtagcatgaagttaacatacacctcaaccagagtctaacaatctcttatttgtacattataatagtcaaaaaagaaagttaaacaatgacattagttacacaggagaaaacaacttacatgcctgtcaaatctaccaggccttgttaaagctggatcaagaatatcaggcaagtttgttgcagccattaaaattattccctgtagaaggatttaaagagttagaaagaaactaagcttcaatataacccattaaaatagcacaatttttcccttaacaaaaaacataaatacc

SEQ ID NO: 36656 - DNA, 8173 bp, Cannabis sativa
acaaataaatgcttttagttgggggattattttatttttactaaaaaatggaaaaaaaaaaaaaatatacttatgtattttctttttttttttttttttttacaaagtgttgtttttcactattacaacaagaaatcaatataaaacaatatttttctaaagaaaaaaaaaagtgaaacacttgaaaaaaaaaaaaaaaaaaaaatagtccttaagaaaatgtaattgcctcgtgtaaatttactttcacttatttcattaccatcagcattaatttataccaaacatgtaataagttaaaagtccacaatttggacaatattttaacaattttttccccaattagtctaaccaaaaatttgggtgtatagacataacttgcattctttgcctaattttaaagttgaatagagataattaattagctttatattatataacatgagtacactattaatataaattatttaaattattttaagtttgaatgtaacatttactcaaatcaacaagcatgttactcaaataaattttgtatattgtcatttttcttttcaaaacatatcctaatataattttatatttttatttaaaatactcaaaaattttagctactatcatcaacaaaagtttttatcatattgatcatctctaattaacaaggttgacttggagttttattgtactttgggaatttttttaaatctaggtgatatttttaaaaatcacaagagaaaatataaatattttaaaaaagacttttttttttgagatttttacactacatactaaaattttcaattttttttttcttttttactatggagcgaattttttttaaaaaatattgtataagtttcatactgtatattgtggtaagttttcactcttgctctaggttattttttagttgttctactgttgtttttaattattctgttttgttgttttcggttgtttgaagttattttataaaaagacagtatttttgtgaaagattctgtgactataaaaattgaaaatttttattcaaaattcagtatttttgtaaaaattcttttttttttttccacttttaggcccttgagatggatgagccttaacccaccttattctgggttcaaccttactaattagttataactaataagaggtttccctcatatatatccaaaataccaaataaaatacacttgtgcattgacttatattatttcgttagtttgataactattttgaaatatcaaatactcaatctcagtctctgataccacattaaagtagaaaataaaaaaaaaattaaacatgataagaattacgagtcattacatatcaaaacaaaaaattgttaacgagtagagtaatttataatattataattattgtaattatttattattttttaagttaatgaatttctgtttttataagatatgtttagtaataaaaatatgcgttacaattaaaaacggatatttatttaaagtgtttggatttttttcctttttttttttttttttgtaagaatagatttacaattgaaacaccaacaaatagtaatgctttctaagcaattgatatttattattttgattttttttttttttttacttcattgctgttctgattttatcactcatatgttctcttgagaagaaaatgagaatttttttttggacggttcctttgcaaaaatgaatacatagtaaagggtattttgaaagaacaaatacactccatttgtttggaattaatcaaacttaaacccattagatttgagaacaattttttttgccattacaatcttcaaattcaaagaaatcaaaagctcagttacttttgcaattagagaaaaaaaccacttgttttgaactcacattttcaccagaagtccaaatgccaaggtaagtaactgacacccaaattaaaaactaagattttttttattactattaaaattatttattactatcttctgggtaaaaaaaaaccataaacaatttttttttttttttttcaaaattgaaaaataaagagagattcctcactctcagcacataaaaaggccagcgaatagagaaaatcccattggtagcatggctgcgcctcaaagccaagtgtagggcacataattaacccgtggttaaagatttaacccgacctaaaccttaagttttaacccaaggttaagacttacaagcaaaaccttataacccctccattttgttctctgttcgcgcacacacacacaaacacaatattcagaatacttgggttttagcaaaatagataggtgacatttatatatatatataaatatattctctatgatctgattactctctctggtttgggtaattccttcactgattttcttctaacaactactgtgactctctcattgtacaatctaacaacgaaaaaaaagttaggcagtattgaaagatccacttacccaacatgtctaatttcctcaactagttttttttatttttgtttgataaattttctgggtaagtgagagaaaggaaaagtgagaaagagagagaaaggcatgaagaggtctccttcttcttcttgttcttcatcctcttcatcctcatgcgtggagcctgaaattgttcaggtccaatttgagaaaccaaagaaggttaaacgtgccaggaaagagaatatcggtcgagaaaatgtcaaagctcaaacatctgcctctggaaggagaagctctatatacagaggagtcaccaggtaattaattagttttttctctcattatcctcgatcgatttttatttttatttcttttttgttgcggatttcgtttgcatgtgtgaaattctgggtttatcgttcaatttgaatccagacatagatggactggtagatttgaagctcatttgtgggataagagttcttggaacaatgttcagaacaagaaaggaaggcaaggtaaaaattataaaaaaatgaaaaagaaaattgaaattaatttattaaaaaaaccttgattatagggaatcaagtagatctattagcttaatattgtttgtttattatgttttctttttataaattttaaattaagttatgcatttctgagttctgactgtttttattcctgataaatctctgtcatttgcaacgttcatatgctactcccttcgtcgccgctcaatgtagtttatttgggtaagtatctttttatgcacctctttattttataattatatatatttttatattattattcttatatatatataacatacataaccatctctcactatattagtggacttgaaatttgaatatattaccaagccaaacacacacacatatatatatatttcgaaaaatattaccgatatttgtttaaattgaaaaatcaattaatgtacagagtagtcaattgtgtaataatttatctcgtattaattaagtagaaaccagtgtgaattaagtttagagtagataatatcactttctatatttttatttgtttcttatatatttttatttgtgatgtaggggcctatgatagtgaggaggcagctgctcgcacgtacgatttagcggcacttaagtattggggtgctacaacaaccttgaattttccggtatgatgcggtgatttttttttttaaatatattattaacactatatttatttattaatcaataataattaatttaataattagtgataagtgtgaattattaacattgctacttcacccattgtcttattacaaatctttgaattgacccattgatgcagacagattcatatacaaaagaaatggaagaaatggaaaaagtcagtaaggaagagtacttggcctctttgcggcgcaggagtagcggattttctagaggagtttctaaatatcgaggggtcgctaggtaaatgataaaatactatgaggaccttatacttattaattttaacattaaaaacatgcttatatatatttttgttttctgaaatggtataataatattacataaatattggtcaaggtttgatttcactgaaaaattatgcgtatcttgaattttgaaatgaaattaattaagctggttgaactcagcttgtgattaagtgtttcattaatattaattaatattaatagtattattttccttttctttttcctaggcatcaccataatggaaggtgggaggctcgaattggacgtgtttttgggaacaaatatctgtacttgggaacttatagtacgttgtttctctcctttttattttttattgagaataatattttgtagaataatataatataatatgatacatatttattataggtgcgaaattgcccctaccctacatattggtttctgttgatttcaataatcttttttaattgaacatacattttgcatttaagtattgcataaacttcataatttacataacaaatgtgttttttggccggtggaaaataatactgtagtactagtcaaacaatgaaacagacatttccttaaaaaaaaatgtatgaaacggaaaaacgtgattaagtgtcaaatcacttacacgtgtatgatttctttttcttttttgttgccaaaatttaacaaagaaaaataatagttgtgtttaatttgttttgttttgtgggggattttgtttggttttggtgctgcaaaatctgaaatgcccatttttctttttttttgctaatgtcaaaattaaaataaataagattgtagtcaatgaaagaacgtggaatcaacattttccgtacactccaagcacattattttatattattatttcttttgtttttcttggccggaaactgaatatttttacttagttcacttcaataaaatattctcctatactttagaagatattgcttaaatagtataaacagatcttagattcattgatttcgctatgagtgatatcttagctagttaatgattatgtagttcaaaccaaattttaacaaaagctttcattgcttgatttaattttttttttagtttgaatttatcatactcacatataattattaattttatttaataacttgacaacttagtgggttgattggtttatatatctacatacattcgtaggattttgtcttcaatactaaaaacataattatttgagcttatcttggctaattggatgaaatcataatatccttatcttaattattaaattaattaattaagaatggaaaaagagagagagagatagaattagatcaatacacactaatcttagtcagcacaaactttttttatttggatagatcctaaaatggagtcgggaagttgtgattgcctacatgcgatagtaccataagaaacggtaaccggccaaaccattagtttgaccggatctgatttgacctttggcaaaagaatatgtgagagtaagaatcttgggatttgacagcagtacggcacgtgacgctcccaagtgcttgtcattcttcaaattcattaaaacaaaggagaatcagatttttaagcagagatcactgaatttattaagccctttacgtttctaaaagtgactgtcactgggagtcacgtgttccccttctctctcttatatatttctctctctgttactctgtgagctagccaggtcacccatagtgtgttaagtccctcgttaacacccctaccccacagccattatatgagattctaaggtgggattgggaccactcgactccgtccacttccttattaggacatgtcacaatatttaataagggccacattctcaccgtccatccaaaccataaaacttgatactattttagaacaaatccactaaccttaaatcaatgtcaaatcacattaacgaaatgtcactcactcactcacaatttgattttgttattttctttaattgttacatttgattgtagtctactttgttatttatccaaaataaaacatatgaaaatgctagagcttatgtgcatgtcttcataggatttatttaaagtgttttgtcttacttgatgacgttacctcagaaaacatggatcctctatttcaggcctgctttaccgttcgagtttttttaatctttttttactaccttatatacctaccaacttgttatagctctgattctatgacgacaatattttttattgtttttagggaaaaggagaaattttatgtttaaaccgagaatgtatgaacaacttttcagaaaatatacctttctttttacctcaacactgaaaaaaattcatctgtagttttgctgatcattcatcaaaaatagaaagttttaaaattttcttttaagagaaaaggtcgggacataataaggagagaaactttatacatgaaagggtgcaaaaaagtacaggtgatctatctttttgtactattggatttttttaacgatgtgagacgtggttctgtactgtggtcacgcgagtcgctacaactactcattacttttattttttctgattagtataatagttgtatgcatcattgcatttactgtcaaaatagttagatattgtggttttattaggccatttttactgttacaattttattagtactgctcattgtttatagtgtcatatgaacaaggccaacattactaggatggtccaaagatttttaattgatttttattgacctaattaatttgaattaattgcagagacgcaagaagaagctgcggcagcatatgacatggcggcgatagaatacagaggagcaaacgctgttaccaattttgatatcagtaactacatcgaccgaatcaagagcaaggccggtgaaccaatccttattcccggcgttgaagccgaagctgaaccagaagctgaatttcaaccccattcaccaccgcaaatgaatgaggtctcctccggggagaatcttcagtgttctcagcttcttcattgcatggactcttcaacaatggcggccgtcatgatcgacactccagacgaccacgagctcatcccttggagcttccttgacgccggatatgttcatcatccggtaccggatctgccgatcgagaagccagaggagttactggacttgttcgaaaacagtggatttgaagataacattcatatgatttttgaatctggatcggtcgattccagtgaagacgatttctctaccgtttttaataaattggaaaataaccaaatctccggcaagggcggatcgggaaacgttgaggacgagagtaacagtggccggagagatcagcttgagctgttttcttcttcctcctcctcatcatccttaccttccttttctccgtcatcgtcgttgacggaaactccagtgtcttgtatgtaatttcaggttttggtactgctgtttggatgtttttcctggatgtttgggaaaatgttcaattttctttcttcttccttaaaaaattacatttttctttgtttggcttgggggaaaattgttcgtttagttagtttattcatagaaaaaaaaaatgaaaagaaaaatagaaagaggacatgttgttgggaatctagatgaaagaggtaagttaaaattttcttactttaatatatagtgtttatcggtttaagttaaattacttaatcccttttttatatataagcacatacaaaccaatacattgacaaaaataaaaaaacaaaaaaaattacacatttgtagtagatgcatagttttatatatatgtttcgtccatttaataaaagtataattaataatacatatacttttgaagttaagtacaattaataaatttgatgtgagtttttgttgcaattattataaaaaataaataaaaaaagtatgaaattatatttgtataattgttttgggatatgaaccgagaaaacattaatgtaaaattaacaaactatattcaaccaaagtgacatatatgtattgaaatataaaaagaggatgattaattatgtatatttacggtagaaaattatatttatgtaagaatttttacacaaagtgtgatattcacatatttttttttaggctaattatgatttttgactctgaacttgacatgtaccaaatcatgcccttgaatttttaaggtagataaaaatgtcccttgagctattgagatggttgtatttaaggacttttgtcaaatttcattcaattttactatttcagtgatt

SEQ ID NO: 36657 - DNA, 4488 bp, Cannabis sativa
accatctttaagaaaaacaaaaaaccgcaggcaagaaccaaagctgaagattattgtcttttttttaatatccagcggggatttgaactcctgcccccaccttttacacttaaccacttgagctagccccatgtggacaaagctgaagattattgcctagttgaagaagctagaatgctacaatcacatatgcaccaagctaccatcaatcttactactgagttgaccgcaaggtcaaaagaaattacatgatacaggaaattttgacaccaaacttcacgtttaaattttcaaacaaacaggttaatgcacatccacaagtttgatgagttctagaactacttttccaacgattgtactctgtatactcaaagataataaataaaacacactttctctccctagaactagtcaaaaaagaaattagcacatgaatataaaaagggcaccaggaaaagagagagaccccgaataaatacctcctctgtaaatcattgaatttctttgacatgaattcctcgttctcctttgccttctcagcctataaaaaatttataagccatgtaacatttgaataaactatgaagtatttaattaaaagaaccttttaaaaatattgcaatttaaagaaaatacaaacgaattgctatcaagcattatatataacaatcattacctccattattgcattatcccgttcagcaaaagcagcagctacacagctttggaaaaatttaacctgcttctctgcttctatattctgaaaaaagaatagcaaccattcagactcatgaaactaacaggcacatatagttttaaattcactaatcccttgaagtttatatcggccttatcataaactaccttctctctcactataccaaattagtggctaagaagttgattaaaccctttctattactatcttccaccaggtccatacaacaactgatgaagcgaaatccataaaaatgcataaccaacaactgcatcccctggcccacaccatcttcattcaatattcagaaggaactggtgaaaaaattaaaaacctagtttcttataaaggcaaaagcaattcagtcccgtctattctgttattataatttttgtaatttcttcacaatccaaattgatcataattccaaaccataacttcattgacaaaagataccaaaggggaaacaggaaagggtgaagaatatgtataataaacttagagagagagagagagagagagagagagagagagcacctttgcaacctctgcattatgaagatcagccagctgactctgaagagaacaaagggaacacgtgagattgtaaaagaactacttcactacaagagatgtttaattacaaaattctcactttgattctgtaagcctctgaaagctcctcttgaagattcagattctctcttgagcaagcagcaagcttctgttgtaagctctcaatctcctgttccaagccagcgatcctaatagagaattaattttgatgcaaaacatgttcaatattttcttaattgtggcgctcagtaaaaaatcaaaaaagagggaataataccttttaaaatgcattttagtggcaacagcaaggtagccaggcccggcttgttgcatgcatagttgctcaatatccttatgcaactcatcacgctctgtgaaaatctcccagttaaatatgaatctatgatagacactagagaaacaatctaacaagactcaaacattaaaacaaaatttacacaccaatgcaatgtgtttgttaaccatcatcaattacattttcaattatagtagacaaaaaaaaaaaaacaagggcaataatcgaagtgacagtttcactacaaaaagagaaggtagagtttcattgtcttcaacattgacattctcagtcttgatagaactccacctttttcaatcaaacagattgattttatcaaaagaaaactaaaacagacaattttggtttgaactcaaaattgtcatgtgttcagagccatacatcaccccccgccattttaggtttcagtgcttgctaggaatactaaatactgaaaagaaagaaaggaatgaatgaagaaatagataccttgctccaagtttcggatgcgaagcttcaaagattcgttctcgttcacagccgcatccatttctgggaaccaaaaaaaaaggagattcacatactcaatcagaagcaattgacctcgtttcctgtaacgatttttagttgaaaacgaaaatcgtaagaacaatccaattgaggttttgtttgattatacctgaaaatggaatgggaatttcgagagaagacgatagcaagagtagagagattggaagaagatgaaaattggttgtgtttgatttaaattttcaagaatagaaaataaaaagagtatattatatatattttttattatgttgtagaaggtttccaatgcaaaattaaaaattattattattattttaatttccaaaaatatatatattgaagtattttcttacaatttttcttttttcttcaatagcaaagtttgtgtttgtttgggaacactcagttgtagatcatttaagatttaagaagttgatgattgttcaaaaagtgttttattgagagaaaatggaaagagaagaaaaaaaaagtccatagttgtaaacaaaacaaacaaaggaattatcaatagttgatgtaaaattccccaaagacaactcaacaattggcaattatgagagggaataggggagatccacacgttcagggacagtgatctactgcttactactgaaaatctaaaaagaaaaatcattttgctcattctcaagcttttttgaagaaaatgaaaccaatttgtttcaagaagcttttaaggtgcaccaaggaggacccacgtagaagcgaggcgggacagtggtgtccctaaaagaaatcggaaaaaatgtatatacaatttagttagttacgacatctatttataataaaagatgatattgaaaaataatattagttttggtataatagttaaactaaattacatatagataaaagttaagggttaaaatcttgccgacgataattttttttttaagtatatttttgtcttctaccttacaaaaaaaaaaattatgtcctcctcattttaaattatgggttcgtcacttcgaaagatgtactaatgtacttttactatatttcggtattcataagaattttttaattctttttaatggtcgtgtgcttatagttatttaagtattttgaaaatttttgaaaaatttcaaataatttacaatataaaaaataatgtttaaataagtctatttcatatgtgtacatatggtcttgtataaatataaataatttacaataaataaaaagatactataacaaagtgattgaatcttgtttttgagattttttgtcttaaatactacaaagtacacacaatcattaaaaaaataaattaatttttttttaaatgctgaaacagataaaggtacatcaatatattttttttggagggtacaccatataatttttctttgttttatagagtccacatcaaatctaagaaaaatctacaatatactctcttaaaggaatgattcaatcgacaattcctatttgtttcatcagtaaggacaattttgtctatttttctttcatcgtgtaagttgtagttattttttacatgtaaatttcagaaaatttgaaatactttacaatatttaaattttattatcgttactgtaaattattcgaatttttctaaaaatttacagttgactaattataacatacacgattataaagaaaaaaaaaaccaaaaaactatccttaatgccgaagtaggtagaaaatctaccaaaatacacatttaggagagggtgtactatagattttttttcaataatatattgtagagaaatgatgaaggttacttatggtgcatgtctaatatgcttatatgacatataatattgttagggactactttcatggaatgtatttcgtagtacattaaatgggtctcagagtacattaaatgagtgtcagggtacgttactattttttaaccttaattacccctagatcaatctcaaccctcagatcaaataactccatcatctaacggctgccgtacatcacggaataaaagtacaatcacaggacaaaatcatatcccaatattgttattaatacaattcaatattagaatttacttagtctactttaatatagattataaaaaattgtaactaattataaaatatcacttcatactaatagtatgttagacattttacagcataacaatactctatattgtaggattagttaagaacttcatttttctttttgagtgttatattgtaattgttgtaatgttttaatatattcacaataatatatggtagaattaggaaagaacttcattttctttttcagtgttattaacttccgttcccacccttatttatta

SEQ ID NO: 36658 - DNA, 2590 bp, Cannabis sativa
aaaaaaaaaaatcaactctaatttttgacaaacaaataagagattaaatgtcaaaacagagtataaagttagaaattgaagtattaggtattcatataaatttatatgtagaaactaatttttacaattggtgtcgtctttagattatatttttagcattgaattatttttatttcattatgttgttgatgaaatttgttttagtttttgaccccctttgttatctttactctattttgtatgcttaaatcaactcatttttgagaaagcaaatcaaagattgaatgctaaattaaagaagttagaagtttggttattaagtattcatatacaatttatatattcaaaactagtttttaaagtttatatcgtttttagattataatttttttcattttatttttttttttgcattatcttgttaatgaaactagtctttttttcttctactttcaatgaaataattagtttattttaatgttgatgaaactagttttaaagttggtaacgtttctagattataattttttccattgtattttatttattatgttgttgatgaaactagttttttttctattgcttttaatgaaataattagtttcttttaatgttgatgaaactagtttttaaactttgtatggttttgttatccccaaaaatttgagaagaaaaatatttctacaaatattaaacggaaaggtgaatagctcaagatattccatacagacaagaaaggacaaaaggcggcccccacctcttttatccctgaatccactttagtcaaatcgaattatctcttggaagaacccatgcctgagcaccgcacccactcgccccgtgcgcccgctcgccaggcgcgccccgtgcgtcccacgcactcgcctgtacgaagcaccagtgtccgcttccccttatgcattaacaatctgcctattctcctttccttcctaacatcggcaggcctaagaagaagatgtcaggtgagatatcagaggtcttatttcaaatgcacccatcgaaaaacccaagtaaagatagtatggtggttgagttttatttaaaaatttgagatgttgtggggcaagttgtttcactggctaacttaaatgaaactatcaacacctcaatccccaaggacccgagtctcccaaccttcactcatacaagtgatttttgtgcattagtctttcaaatgtcctttaaaagatagtggcaaagatggttgctactaggattagaaagactttgtatgatgttatatctgtagggaaaagagccttcgttgttgttgtgcttattactgataatgcttgttggctttgaatgtttgaatgccttcaaaagtcataagagaaagaaagttcttcttacgttcaaagtcgacacggtgaaagtttatgaaagagttgactggaaagttattgaaggctgtaaaattcagagatgaattttgagagagagagagagagtaaaagagacgaaaaagaaagcagaagaaaagagaaattttcattatacaacagaacaaaaatacaaagtatttatagagtatagagtactctgattacaactggaaaaacaaaagaacagacataatagaattttatgtaatggtgtagacaccacttttagtttggataggggggatgttgattatcgacccaaatgatagggctgtgaagaatagagacgtgtaattcttgtagtagagactggatccacattaactcagcagcagcatatgccaaggctcgaaactcactctcagcgctggatcgagccacaacatgttgtttctgactatctgattggattgccccctaagaacaccaaataacctcccgtggatcgtctatcatcgacacagcttgcccagtcagcgtctgagtatgctgtgagagttaatccagatgtaggtgtaagatgaattccctctctaaatgttcccttaaggtaccgaagtagcttcttacatgcctcctaatgtaagtgtgtaggagcttttagaaattggcttagtttgttgacaatgtaagccacatcaggtcgtgtgagagacaagtattggagtgctcctaaagtacttcgatacaaggtaatgtcttcaaaaggttttccttcatttagtgaaaactttacagcaggactagtgggattaggacatggtttggcaccctccatttttaacttcaccaacagatctgtaatatacttcgtttgagataaatacatactagttttatctctataaatttccactcctggaaaataatgaacttgtcccaagtcttttaagctgaatgtcttctttagatcagtaacaagtttagaaataagagaggagtttggcccagttacctaaatgtcgtcaacatagacaagtaaaacaatgagattcgatctagccccatacacaaacaaagaaacatctgctttagaatctttgaaaccccatgacatcaaggtatattgaagcttttcgttccaagcccgtggtgcctgtttgaggccatagagggccttattcaacttgcatacatgtgtgggctttgtagcatcctcaaagccagaaagttgacacatgaag

SEQ ID NO: 36659 - DNA, 3408 bp, Cannabis sativa
aaaaattatatgaattaaaaaagattaaaattcatattttagtttatgaaataaattatataaaacaaaacgttattaaatttaaaaataatctttaagtaattacaaatagatccgacaaaaaaaaatgaattacatataaaacattaaaaaataaaaaataaaaaaatagcattgccctaactcaaattaaaaacaaaaaagaaaaattctgtagggggaaaaatcttacataaaaattaggcataaatgctcattaaattagccctaaaaatttaatgttataatgttatttaggaattttttttttataattttctaatattttatgaatgatattttattataatttttttaatggatatttatttaattcattatatgatttattgaagaaaaaaaattaactcatcaattttttagtaatcctacccaaccaaaacatggccaatcacaaatagacgcatgggtcaatcacatatgagtttcatgcacataattacacgtaaacatacacggagtaaaaatcaactaattgtttgttaaatttaaattgcgagataaacatttgtcaaatttttaggtaatttaaattgtttgcaaaacatttaaccagaattgagtttattttgcaagacctaattatcatataataaaacttacaggtcaattgcttgttacagcaaaacaatataggggcaaaactgataatttcccaattacatttttccttttttaaagtagacagtaaaagattcacatctctcgctaaacgaaaaatattgtcatatatctaaacattaaaatgcatctacagctggagtttacaggagacactgatcctcctcaattaacttaaaagggtttcatatgggcaagtgggttgtacactaaagtgacagtcgactcataataaattactctgccgcagctaacctcaattttcactacctaatttacattttgcgtacaggtacacgcaaattaacttcaagtcatgcttcacaaaatcagcacgcaaaacttagaccaccgcactgattggactacgcaaaccacaataaattgctttacgaataagaggatgcacattttcttttagtacctctgcctccagcttctccatgtgaagccatatctgcaagtttaatcaaaatatgtttgaatttataaacaaagaatcattgtaaatttatggcaaatactaaatgaatcattgaacagcaattcacaatatagtaatattgcctagtgcaccataatagatttacaaagttttaaacgtacactaagaaaagggaatatgatggctcaatcccacaaaatactattcggcctttaaaaagttgatctagatcattggtacatgcttagctgaatttcacaataaactatagcaaacagataaattgaagaagaaatcctactgaagttccaagttagcttcagcaaggtattgttgtatattgatataaaatggcaaatatagaaagataaaagccaggagttcgagagcctggtttttcccattcaaattcccaaaattcgcataaaacactaatgcctctccttacctcactttattacagcaagcctcctaacaaacaattcactctctcctatcctatgagccatcaggacacctcacccactattatctttcttcttacatatatgtatctcactactgatctatcattacctccttcccaagccacactttgtcctcaaggtgaaaagcaggaaactgttcattgatcacctcaaagctttcctataaattataaggacttgttccccccatggtactcatccaagagctgtggtgtgaaagaaaaagtatagggggcagcactatcttgccatggaagagcaagttaccttggcgcagtctatacccatccaccatgggagcggctgcttcttacttctaaaaagtgaatccgcatcaacttcacttggtaaactctccaacgattcacccgagacacagagagcagagccaaaagaatggactcatcgcattgtaaagaatagaatgaaagttagagagaataatttttatttcttatgtttttaatctgtacaatatcgagaccgatatataggtataatgcataatatttacaataaataaaaaagaataaaatccaacaaattagggaatagataaaaactacagatgtcactcatatttttgactctatttgctagctgtgtccccctcaagcttgacgttaataagtccaagcttgtttgagagaaagtagaacactggtttagatagtcccgtagtcagtatatctgctggctcttgattagtaggcacatactgaatgctgattagccctccataaattttttctttgataaagtggcgatccccttctacatgtttggttctatcataatgaacaagattatgtgctatagtgatagtggacatgttgtcgcaaaatagttctataggtgcttcatattccatctttagttcttcaagcattcgttttagccaaataacttcacgggtaaatggcggcaaaatctctaaaactttcattttggtttcacttaacctccaaaactcaaatttaggcggtaaaacccccaatactcacgttctgttagcaatttaacatttccgtccattttaagtgttaagtgccatgttggactgtccacgtgtgtatctacgtggatacagtgtacacatagcacaattctattggtctacataaaaaattatttaaaaaattaaaataaaattaatttgaaataaaaataattataaataaaaaatattttttctttttctttttctttttcttccttaatttatatatatataaatgtagtgatatatatcaatatctggggtggaaactagagtaattgggacatttgggtaattttcttgagtaaggctttacagctaagtttttttacctttgcaatcacagaaaaagttgatgtttattcttttgcggtggtattggtggagcttgttacaggccagaaagctatggacctcaatcaacccaagggtcagcaatgtctcattgaatgggtaaagtgatggagggaaatttattgatatccttctctctattattttttgcattcaaattatgttgattgacatggtaactggcatgccactgtaaacaatatctggggtggctgtcgggttttgaaaaccctatatcgggactgagagagacaaagagagaggagatcgagagagagagaaatagagcgagagggatagagcgagagagaggggatatcgagaagatgaatagataagaaggaaaaaggaaaagaaagaaaaagaaaaaatatttttttatttataaatttttttatttcaaattaattttattctaattttttaaataattttttacg

SEQ ID NO: 36660 - DNA, 18835 bp, Cannabis sativa
tcttaattaacaaataaactctattacctttccttagtaaaattcataaataagacaaagtcttacttagattcttagttgattaattaaaccaattaactgagactacaaagcaatattatttcaactagtgtggagaccatgtgactatataatcaagctcccaataagcagttctagaatttatcgagtaaattctttatcttattaatttctcctaaatcaactatatgttcaaaattacactcttgattacatagaacactctattcaccaagaatagatatactataagttatcgattatttcaatctaaataatcaatgctcctctatagatgatctacactgagtagggactaaaattactattttacccttcaatgtattttatccttaaaacacttcttcttataaatatattttaataaactaatataattactgaaataagagctcttctatttatgtctgttagccaaactctaagaaaattatcatttcacttctatgtatttatagaagctatagattccatttctatgattaacactctcactcaattgcaataccgtgtttccaagatataagtattgagacgatcccctagtaaggttgtaacgaataagtcaaagaacacatatagtacaattaagctagaacctaactatctcaagattaagatctttgatataaaataaactaagtaatattgacttataaaagatataatgataattttatgatatattttttactgtcaatatcagtcaagtccgatgtgtatctgatacattcgataatagtactaatgccttttggaaaagatattctacttatccaagtgtaagaaaatcccatcattgattatcaattcagtgtaagtctaatacattgataaatcgtgagacttaataatttgaagcatctaatcacaatgactttccattgtaaagacatcactgtaattgtaaataactgtatgtttaagatttaatagaacttatatattaaacatataatcatgtgtaaaacatgtgaacaaagcatatgacaaggtcaaaatatgaaattgggttttatttagggcataaaatcccaacaaactcccttgcactaatataaaactagacgactttcaatttaatctcatatacttgatgtcttgatcaaatgtagtatttggcattaactatgtaaaaggatctaataggttgtattcagtatcaactttctccaccatcatattttccttagtcataaaatctataattttgtgaattccccatccatgtgttttactccttttagggtacaacattctttactagttggcaattgcatttgtgttatcacaaagtcacactaagcaattattctatttcaagaattatgccaaactctatatcaaactttcctgagtctaaataattccctaattgcctttaggacaaccttattattaatccttcccggtagagttagttattccaaatagatttttacagttttcaaaaaacactagtccacccccagagtaatcatcatctcatatttagactttctaacattgatgcaaatctacaaatctgatttggtgtagcctaagagttttaaaatatcacccttgtaactagcatatagttcttctttacttatgtcaaaatatgtttgattatcttccaatgtaccttttttggaattgattgatacttactcacaacttccactcaacagcagatgtctggcctagttcatgcaacaacatacataagacctcctactattatgcttagggaattattttcttggttaattttacttgatttggttgatttttacatgaatgtatgaacaatattctttgctttgaacatgctttgattcttacgttagattgttatccttttggtattttaatccgcatgatatccttaggatacataatgtgtgatttctagacaaaaaagatctgaatctggccttcattgtgattcttagttctttgagtcacgaagaacatgtttgagttcttgaaaaaatacgtattccaatccatgcagatcttggtcggccaaggaggccttgtttgaggcctagccggccatgggtagttttcatggggtttgcccagccaagggggttgtccccctaggctggccgactgatgcttggaattagggttccttactggccactagactaggtcttgaggtccggccgaccactaggacctaaaaccttagccggccaaggctaaggctccaagtgagcagccagtttttctccctcttttgaccttgactagggtcttgtgacggccttggaggcatatagaattgtggccttatgcgtggtttctcttggaaactatgtagaaggcttggcaatgagtccattatagtcaattatacaacttaggacttactatatgtcttggtaagtgtacttaagacgatacttggttgttgatcaaccatgtacattgtattttacttggaaggtacccttgggtactatttacttgaatgtgtttttagctttgtcgggttgctctccttcccttatttcttccatgtaggtaataccaagtgttgaaaagaggaggtgacagtcacgtagctccctcatttacttcacacttatggccagaacgaaatagactctccgtagggtgcctctgtatgaccctcacgtggccagaatggccacaacaggttaagttaggatggtagaggagaccgctcagtcccctactaatgttgagccagagattgaccaagggctgagagttttgatgtagaatcagatctagaagaggttgctctaatgaggaggaggaggtataggacttgttctatcctcccagattgtgccttgggtcactatgatgccactggtaggccactgaacaggctcggtgagccttcagaccttggactggatcatgtcgtagaggaatcttctaagctggtgatactagatgcgagatcagaaggggacagttgggtctcccctgcttctactctttccgatgaggccttcagcgagatcctcgctagtggcttagtaggagatgtctagtgcgagattccccgtaggaattattgggcgcacatactccatttgggtttattagcgtggttcgagcgccatattaagcatggggcagtgatactacttcatcagtattttctagatatcgctgcttactttgggatgtgtccgacatagctcacaccaaaaaagcatcaaatatctttcaacgatgtttgtcttgtatagggagctaggctggcctcagcctaccctttacgagattggttactactttgatctgaagtctacattgaagtagaataaaaatggatactttaattttagtcagatcggtcaccaatggttgggtgacactaattgtacaaccatgtcgaaggtctgtgggtatgccaagaagtactttatcgcttatggcctccgtaggattaggtgcctcgaattctggccagtgccattcttcagacgctctatccctactttgcagataagaggtagggaaatccacatcctatctctttcaatagaacagagaaacataatctagttgaccagtgtggacaattttcaaaagtatgacttatatcctcctgctctcaaagttgtaggagtgccagctatagatggggcctaccctagagatggaaaagttcctaacttggatgatgatgaggtacctctatctcgcattgcacgaaatatggaaaagaagcaaagggctctccgtcaacatttggcaagcggggtccaagttgtgatgcttctctccatatcggggcaagaggtcaagcttctgagagatctacttgccttgtgcccgtgcctaggggcaaggacaaggctattgttgaggactatgatagttcctcttctaatgatgatggtacttaatagtcgataacaccatgattttgtcttgtattgaatgtttataattgctttctgactttgctactttctttttacagatatgtcttccaggttgagaggtcttactaggggaccatcagatgagcccacgggacgagtgaaggccaaagtggccaggacttcttgtggtggaggcgcttccaggtcgtcattgcctccccctccgccagggcttgcactagctaggcagcatgtgattcgacctacagaccaaggtactctaaggcctagtagaggagtagggtcagtttctgggtcgagggttgctgaggcagccaataggcgcatttagagaactatcccgttcatggatagggacctgaaggagtttggcgatggtgagccagacaggctctactctactggtcttcatgatctttctctagtaagttgtactttcagctctgctcatcttttgggcactgcatagactggctatccatgaggcttgttggatgtggttggccgaccttggacgctattgtgaggggctggccgaccatagcaatcccaaggggggactgaccagctagtgttgtggtttagacacagatgttgttttgttttgttttcaagccttgatgaagctgagctcagcccgtgatggctctcgggggtcctcagatgctcttcaggagcgggtgagaccttggaggcttcccttgtggtgaaatacaatgccatatctgagttgaaggctgtcttaaaggacagacagagaatggtttctggcctagagaccatgcttggcgccagaaacacagaaaacatcacacaagctacctttatcttcgagctgcagtctgaccttgatgaccacaagaagaagctgcaagaggctcttgatggctaccacgccattagggaggagtgcgccgacttgtcatctgaacttacttatgagttctagttgcataacccccaagctaatctatcgtataggggcaatgaggctttcgtggagagagcaacactagggtcgtatatatctgatgtttgccacgtgtttgcacatataagaatgaaaaacaataaagaacaaatttgtaatagaggttcaacccccttgtgatagcgggtaacaacctactccttttttagttgtaatagtaccaagggttaatactatccagatcactatatgtgagatctgctattgcacccttaggaatacaaagtatgaatcaataatggcaaaacttaagtgttgacatgatgctagtgtaggcgtgtgagagaagaagtgaggaagagagagattatttgacttaggcttagagcttggagctaggcttcagccttggattcaacttaggtttctaggctagggttaatgcctttatataggaggcctaaacgctagattatagtttaaaactctagatatttgaattgtttgttaaataattacaaaagactaaattgcccttaaatctagatattattcagctattttgttgggctcttagggcccaattcgtagcccatgagttgctatccaggtgtagaagtgcacaagaaaccctgcagagcacctcttggttggctagacccctgtggattccatggtgtacttccaaggctggccgccataaggccggccaggggtggccggccagctcctatgaggtagctactctttcatttgatgcctgtttaagtgttggggtctttgtttgcttaggtgctgacttggccttcgtattggtgagttgtactgccacgtggcactaattttgtccacgtaagcatgccatgtcggaggataaaaatcaggataataggacccttggggaacaacccgcaagaacaacaattagatcacgtccccggtactatgtaggagagacatgaccaagatttggcgagcctgctattggcaagccccatgtgaacttgggagaagatctagagttagccagacttagagaggctgtctcgcaagtcgacctaactgaagaaccacgcgctattgattgtgatatattcgctcagcaaagatgcaaattcctaagatggatggatgacaaagagtacatccttcgatatcaccaggcagagctagattgtcgcaattgagaggcatgtaacctgataaggcggtctaatcaaagaaccgatggaagaggccaaaatctcatctgagatccactttgaggaagactagttagtagatcaaggaagatctatcagcaagctgaccaattaggttcttcaagatgaggacagaccttgccacaaaagtctagtggagagactagccagatcccgatagccattggcctggggggtcggccatcaatctctggcactacaacgcccccacactacctaactcatggccgaccagcatcctagaagtgcacctctgaccgaccaacaaggtgaagtcctgtcctaggacattcgggagtgagtcactcaaaggctagtctttaacttgcgaggccatgaatgggtggaaacacctaagacaacaacaacttgaggattgaatacaatcacttcagacatttagatccaacagacaccaacaattggtgtgatctaccccatgtcaacgcatagacaccactatccaagaagacaagtgttggcgaccagtccctgcccagcacagggctagctgaccatgtacaattaccagactcaaggctggctggccttgagtgtatcctctctcaaggtatggacggccaagttctggttaatctgaggctgcaactcaatcaagaagggccaagaaactaggcccctgtaacaacagatccttttgtgcaagcacagctggataaaatgtgagaaatgctcaagggcctagctggtccaaaaccttcatagtttgagctagacaggtaaaggggctcacctttctcggcatacatcaacgccttgtccttaccaaaattcaagattctaacttggaagatgtacacgtggaaacaagatctcctagtacaccttaaatactttgagatcaaaatagatctccaacaagtatctggaggtgtgcaatggcaaatctttctggcaactctagctgaaagcctaacaatggtatttcaagctggtctcaggaagatttaattcttgggaactcgagagttctataattagttctctacttcaagacaaataccttcatgactagaggatcttgtctgaataaagcaaagacaagatgaacctttgaaggtgttatctagttttttgcacattgacgtggcaattggaccgagcgacacatgtcctatatctttgacacccgggtggaaggaagtatccctagcagccagcacacaattcgtcagcatctataattgtcgatcactcgagaatagttgtagagaagacatctgacccagtagatacctattatgccagcaacttacaagggataacaacttccgaataatcttgttaggtccagatacgacaagaatccctacaatcagggaattgagtcagagaaatatgacaacctgttgtagtttcctatttcatatatcttaattatgtaatcattgtaatttcctattttatgcattgtaagcaaaagggaaaccattcctcacgcattgagcccctataaatagtgacctagcctcattatgaaggggatcaaaagaatcgcttcagagagagagagattctagagagaaaataatgatctaagagaattactcagaaatcagttgtaagagctttcaagggggaagaacactttgttccttctcttaagttaatacaatacaaggacaataggctattaccacactcacaaggccaaatcgctttaaaatctggtgttcattttactttattgcgttttgttctcttttaattacattattcaattgcctattattagactcagtgtcgttggctaaaagtgaggtcaacattttggtgctttcattgagagcaaaaacacaagttctttgtcttaagttttgacaagaaaataggatggttctagtattgccttggggagtttagaagggcatgcagttgtgcataccgcacaaactcatagtggtcagccgtccaatccacggcagcaggtccaacctgtgggccaaatagtatacggctagatcctaccagaccgtcctttgggtggagttatacacactaacttcacccctactgaaatttctcgccaacttgctggccaaacaagtcagacactaagacctcatgactgacctaaatcgaagaaggggcctagatgaacaatacattccaccaactgtccaaccaggcatctgaggccaagatctagttccaagagatcccaatgtgacacaggctggtcaacaagctaaacaagttcatccttttttgcaagcacaactggatcaacttaaaaacatggtacaaggcctgaccagcctaaaactcactgatctcaaactcgaccaggcacgcggatcacccttctcccttgagattaaagtccttgagctacccccaaagttcaaaatgccaacctggaaaacataaacaagaaaagaagatcctttctcacatctgaagtattttgagaagcagatggacttacaaggggtgaggagtgatgcacggtgtaggatctttcttgccacactcgtataggccacccaacaatggtatttcaagttgcctccaagaagttttaactcaaagaatgccttctcatgaatatttcacgcttagtttccctcatctcatcaacttccttcacaccttgaagacctggtcgaggtaaagaaaatgccaacagaaccccttagagcttatattagcatgtttatgaccgaagctacaaaagttaaggggctgactgaggaaggaagactggctgcaatactagggggcgttgcgccactcaaagatttgtggaaggaaatcaaaaggcttattgtgtggtcaatggctaaatttctagatcgagcaaatgggttcattaagctcgaggaggctatttggcgtgtggatactgtcagacaaaagaaaagccagcaacgtgtcatctcagtaggaacatccatttcgatcaataataccctagcaactccaattcaaatgggaagaggtctaacaataataacaggcagggtaatagaaagaagggcaaattcaattgcaatgccaaaaaacaccccagggaaaatgcctcaaaatttactgccttctcagtcctaacaggtgacctagagacagtctatgtgacaactcagcctatgatgtcatataagaaaccatctcccatgaaaaagtatgtaagtaagagagacacatccaagttctactattttcatgtggaatacgcccacgacacaaacgaatgtaataatctgaagcaagaaattgagtttttgatcagaaagaataacccgcatttacagaagtatgtcaagtccgacaagaaccaaaggaccgccaaactggataataatcatagtccatgtaacagttgatgcctccactagtggacagacatttactggtcattattgggggtcaacatcttgctagagactcaaacaaagcttgagaaaattatgcccgagccttacagtatgaataaaatgaaacattcttggttgttgaagagagaaaacaaaaaataccacgtgtagggggagccaataataacgttcactgaagcagattccagccatgtccatttcctgcacaacgaccccctggttgcagaagtgaaaattgtaaataagatagtggcatggactatgatagacaatggagcttcctcgaacattctatttaaaacaacttatgaaaagataggactctaacttaaagatctgatcccctgcacccagctcgtatacggtttctttagccaaagcattgcacctccgggacaaatccccctacccctcactattgtacaagctttgaggagcataactgtgatggcacaattcctgataattgatgtccctttagcgtttaatgtcatgttaggctgaccagccctatatgacttaaaagttgttacatcagctttccacctatgcatcaagttcccaacaaggaatggggtgggatgtctcaaaggaaatcaaaaaattgcacgggaatgccacaaccttgctctaactaaagtcaagaaggaaaatacctttggctagagttcatgcaagggaaaaagcattgcccaataggaagccatccaaggcggggttgaagacatggatccctgacttggggaaaaaaacacaaatgtagggccagtggaagaactgaaaaaagttgaaatcaacccaaatatcacggccaggaaactcaaaattggtaagggtttgttgctcgaaaataaattagcttcaataaaatttttgagagcaaacctagatattttttcctggtcacataaggatatggtcagtattgaccccactctgatgtctcacaccttgaatattgatccaaacttttgtcccatccagcaaaagagaacactattggacaaagaacaggcaaaagcactgaaagaagatttagagagactgatcgagaacaagttcatcattgaagctttctactcggcttgggtggctaaccccatactagtgcccaagctgaacaaaaaatggcaagtatgtattgatttcaccaacctcaacaaggtgtgtcccaaggactattttccacttccaagaattgattagctcgtggatgcaaacagtcggacatgaaattctgagctttatggatgcctattcggggtataatcaaatcagaatgcatgcaccagaccaagaacatacatgttttcgaaaacatatgtgtttgtattgttacaaagtaatgtcgttcgatctaaagaatgctagagccacctaccagattctagtaaacaaaatgtttaaagaccagatcagatcaaatatggaggtatatgtggatgatatgctcgacaaatttaggaaggttggggggcacatagagaatctggatgaatgcttcaaaatcctcaaaaaatacaacatgaaactaaatcccttaaattgttccttcaaggacagctctagtaagtttcttggttttattgacaatgctcggggaatagaggttaatccagagaaaatacaagccctcttggatatgaaatcgccaacaaagacaaaggaactccaaagcttggctggttggatagccgcactcagcagattcatttcaaaatcaacaaacaagtgtgttgctttcttcaacattctccgaggtaataaaaagtttgaatggacggaggaatgcgagaatgctttccaagaaattaaaagacaacttgcaaagcctcctgtactctcaaaacccctagacaaagaagaattaggaatatacttggctctcaccgaatatgctgtaagcgtcatactgataagagaagaaaacaacgtccaacatccagtctactatatcaacaaaagacttgttaaagcagagggttgatatcctttaatagaaatgctcacttactgcctaatcttaggaataaggaagttaaatccctatttccaagctcaccctattcgggtatataccgaccaaccattgtgccaattattacaacggtctgatgcctctgggcaattacttaaatgggcaatagggttcggtcagtacaaaataatcttccaaccgcgtacaatagttaaaggacaggccttggcagactttgtagttgagtgcacaagtaaagaagaaacaaacataagggacaacctggagcaagtacaagagtccctaacaaaaaataatgaagacagacctacttggaaatttcatgtggatgaatcagctacagaccagctttttggtgcgagaatcgccgtcgtcacacttgggggcaacacctgcacagagcaatcaaatttgggttgaaggcctccaacaaaaaaacagagtatgaagcactcatatctggattaaaacttgcttgagaagtacataacaagtgcaatgaggtctgtagtgattcccagttcgtagtgaatcatgtttcgggagagtatgtagcctgggagagaaaatgatggcctatctaaggaagatacaagacatgctcgctcaatttaagggttataccctcaggcagattccaagagaagagaatgcaattgctgatgccctagcacgatttgcgagtaccacagtaatagataagggcattctagtcccgatccaattcttagaagaatctagcatcacttgtgcggaagaaatcaaaatgatagacatagcaccaaactggatgacactcatagtagcttacctcaacactggagaacttgcatatgataggaacgaagctcagaagttgatgagaaaagttacacgatatatcatagttgaaggtgtgatgtatagaagaggtttctgtatgccattacttagatgtgtaacaaaataagaggatacacgcagtaggataaagtctatcgaagaaaacactaaggcaaggatatttctggccgacaataatggaagattcaaaggcctacgtgaagaaatgttataaatgccagagattttcgaacatcccctgtgcaacgcctaatgagcttatactgatgcaaagtccttagcctatttccatattgggaaaagatctaattggacaattgccaaagggcaagggcggagtacaatatacggtggtcgtagtggattattttacaaaatggatagaggtcgagcctttagcaacaatcacatctaaaaaagtgttgaaactcgtgatgagaaacatgatatgtcgctatggacttctacacaagattgttttggataatggcaagcaatttgacagccagatgtttacagatttctttgtgacacatgaaatcataaaaaatttccccgcagtggcacacccaaaaacaaatagtcaggtcgaggcaatcaacaagatactcaaagatattatgaaaaaacgactcgaagaggctaaagggaactggccagaggaactaccagaagtattgtggtcatatcaaaaaacggagaaaacaacaactgggcaaacaccatttgctatggcctatggttataaagccatgctgcccgtggaattagaaccttcatcccacaagagattaacctacgatcaagaaactaatcatgccctcgttgcagaatcacttgacaagattgaagaaaaacgaacctcaataaacctaaagctagtggttgatcaacaaaaggtggcttggtacttcaataagcaagtgagggcaagaaaattctttgtgggagatatggtccttagaagagtattcctgaaaacaaaagacagcgcggctggtatactcagacctaattgagaaggaccataccaagtggttgaagtcatagactctggagcatacaagctgggacagtataatgaaaatatggagctcgttctagtaccaagatattagaatagagaacatttgaggaaatactaccagtaagtgtacaaggtttgatgaccctctcaagtacacaatgctagaacatttaatcttaagtagatggccctctgggtggatcccactcaaaggtttgaataaaataactagtactcaggtcggatgaccatctttaaagtacaatttaaaaaaactacatatgcaattgttttatgttttaattagctaaggatcaattagatcttataatagctttcataataaataaatctaagttactacggtaacaaaattattccgaccaataaatgaataaagatattaattatcattctaattgcgtcaattatattttttatatagcaagttaagaatttaccattaaaatgtgtacaaaaggttcgctcaaacccaaaagctgaaaagacaaaaactaaacaggtgaaatgcaagtgaccaagagtcataagtctgctcgatcccttgggggcaactatacccgtacaaagcataggtaaataacaagctcagaaaaaatatagcagttttcatgtgtaattactaaaacaagggaaatattcattttaaaatgatgacaaaagcacaacataaacccgagatttaaggctggccgatcagctagtcgtcttaaaataaaatgaagtattactaagttttaaggccgcttggtcggccatattgtattaaaaaaggcccatgggtcgaactaaaaaaaagagaaaaaaagaaaagaagggttcacatggcatgagtcccgggttctttatacgaatcagtttggtcattggtggtcggggtctcaatgctttggtcagtcagagctgtggggttggctacttcacggttttccttgtctttttgggccacacagtaactaagatatgcctccttggtttcaccgaggtaatcaaagttcccctcttggttggcctttcaaaattcatagaaaacctccaagtcgaccgactccaaactttcaatctccttcagaagcacttcctcccttgtctgcttggatttgacgtcctcttccaagcttgtcttctcctgggttaatgtagcaagaagattctggagactttccctctcatccctcaaaccattgacctccccggatagagcatccacatccgcctcatgttgggcaatagatggcatgtcttgaatctccttttgtagctcctcgactctcttgttggcagtcaagagttgcttgttcaccttgcccagctctgcccttgtgacctcagcctccatttcggctacaccacctccttctgcagattgttggtggtggttatagtttttaaggcactagacttggcttgggagtaagtgtaggccatcttcaagtttagctcataggaaaaggttaaaacttgcacaaagaaaaggacaagataaaacccaaggaaaaaaatacttactcgagttacctccttaggattcttcccatcaaaagctccacagacatctcatcccctctgaacagctgatcatttaccttggggagtagctggtcctggtaatgttgaagcatctctttgccctttttggtctcagggttcagcacgatagaagtatttgagggcctggacgaaccagacccatctgtgcttcctaccttgacacccttggacttagaggtcttcttggttattagctccacctccgacgccatctcctcatagacatcgatgggtgactcaactaagctcctttcctttagcggtatctcatcaccctttgactgtttggccagaggagtctagccggagctgtcactcaacctcttctttagggcctagaacaccttttaagacatagctgcatgtgaacaacacaaggaggttaaagacaagtacgatgtaagccaatacagataaaaattaaatgtaagttaaaataccatacacgtaggcaggagcattctctcgaacaagcagaggaggaggctcattgtctgaggaatcttcctgttcctactctattaggacgacctttccctttcctgccactagggtggatggccgagcaactcttttaggttcttccctgatattgatagaccactcaacatgtacttggatgcttggagaagccttccttttcctcttcttacttagagtctcctgttcgggcacggtgtcttttgcttctttcacagccgttggtaaaaaatctgccggaaaaagtttgtacttgacaaaattagcctcggtggcaaagagggagatgtttcgtgcaacaagaggaagttgaagaatcttttacatcctcttctggagctccagtgtgaacaaagggcgggtaggatggcacttgctggaaactggtgtggatggtgcccattcctttgacaaagtagtattcgtccaaaaagcctcctatcttcgtcacctcggtggccatggtgcccgttaaccatttctcctcgatttgagaaaaatagaagtatcctgacctattctgtttgggacttgacttcaaatcaaagagccaattggtgtcatgcgtggataactcaccccatccttgtatggtgtagaggatgaacaacgcagacaagtaattgaggcctttgggggtgaacttggtcagacttatgtgataatagtttgcgatcttcttgatgtatggaagtaagggtaacatcacaccctgcttggtatgaactgccgaccaagtgcagtaaccttcccttggtttagttaccagatggttgggggagggaaggaagcattcaacattccctaggtaaccacgattgagaaaaattttcatctttcccatggtcaccacggatggtggagaaatccatcgatctcctaatgcacattgcctcctaagggggatagcctcagtgtattcttcaacaacatagtctttgccgacctccaaaacatcgccagcctcagacacaggttttccttcttcattgtagccactgaatggtagcacccgagctactccctcttcttcatctccttgagtatcaaaattggtagcaggacggacctcgccttggtcctccagctcttggacttcaatgtccctagccataccctcctctttgtagcaagttggacatgttctgccccaggtaaggtggcaagataggcaatgtgtgggtcagacagtgaagatttttgtatagtttgcttagttcgcaccatcattctatatttggatggagttttgtttgtgtgcctagcaatagtcactacaaaagtagcaacaggtttactcgtcatagcaggatttgggcggcgctcgagcagagtgtcgactacgtccaggcagactatgtacgtccagttagttggaagatagcgtctccacctcttcttaagttcccaaatgaagcgactgtatccctgaccttggatctggtcaggatagaagtgatgttgcacctcgggttttggggaaggtgcgtgttcactacttattttccagtcttcaaggctagagttagagaggttatcactggacggagatgggctagcacggagacgaggatgatcctcgtatagaggttgaaggatatcttggttgatatgttattggcctccttaaaattcaccaggggtcatctacaaaaggtagcaaacaataagatgagaattggtcggggcaatgaataaaaataggttgaatgtactaaccaggtcagattgaggaatcaaaaatagaaatttaactcagaaatggaattttcaacccagaagttcaaaacttcgaattggagttttattctcacaaaacccctaatgaataagtgaaaatggatatcgtgggattaaaatcaaagcccaaatagaatcaaacgttgtggttaaacataatcaaaagttctaaatcgtaaacctatgaattatatggttatcctagaacatgttcaagaatagtcaagattcgcagacaaaaacccagaaaattaagcatgcaagtgtataaaagaaagaaataaagaacttactcactggtttgaagctttttgttctgcttggattgtgttgaaaagagtttcctgtgaattcttcgaagaatttgagagagaaattgcctaacaatttctttgctctagttttttcgagaataaaaatgactaaaaggattaattagggttttcaatcctatttataagtagttcaaaaaaggaagtaatcatttcaaaatttaaatttctcgaattcccccaaaaattatacgttatgtattcattgatgtcaaagtaatcgtcttcacgcgcggccatcaagttgcaattcaagggaaaactatctatcaacattaatgactcgaaattgaagagacccttggttagggtcacgttggttcgccattcgattcctaggacatgcatcacccgtccggacaagactctaggttgagtgaagtccacgtgcaaccaggaaggtcctgcgtagacttggggggcaaatgttatccagatttttttcacattaacgtggagatagaactgagcgacacatgtcctatatctctgacacctgggcggaaggaagtatccctagcagcctgcacacaattcgtcagtatccataattgtcgatcacctgagcagagctatagagaagagatccgactaggtagaagcctattatgtcaaaataatcttgttatgtctagacacgaagagaatccctacaatcatgggattgagtcagaaaaatatggcaacctattctagtttcctatttcatatatcgtaattatgtaatcattgtaatttcctattttatgcattttaagcaaaagggaaaccattcctcacgcattaaggccctataaatagtgacctagcctcactatgaaggggatcaagagaattgcttcagagagagagagattctagagagaaaatagttatctaagagaattactcagagatcagttgtaagagctttcaagggggaagaacactttattccttctcttaagtcaatacaatacaagggaagtaggctattaccacactcacagggccgaacctctttaaaatcaggtgttcattttactttattatattttgttctcttttaattacattattcaatcgcttattatttgacttactgtcgttggctaaaagtgaggtcaatagaaggactacatttaacggttcatggctgacgccaccaaggtcaaaggcctgatagaagaaggtcgatatacgaccatactcgtaggcatcctaccattgagtgactcctagaaagatatcaagaggatctcgatgaacaacatggaagagttccttgagcgagctgatggcttcatgaagttggaagaagttttttgtcaagcaaaaacaagaaggaaagttaatgacgaaaaaacacggggcctctctgctggaaatattttactaggatc

SEQ ID NO: 36661 - DNA, 4907 bp, Cannabis sativa
  modified_base (2290)..(2303): a, c, t, g, unknown or other
gggagtcgtgtatttcgaatttacgcggtattgactttttttttcaacattttgacttttataactcaaacattttggcaaaattattataggtttcttaatgggtaatagttctgtagctgacagtggtactagaaatgtgtttggtttcagtttgccggtacgattattatgtcagattctgattgatcttgttgctttttcaggttcccttaagtgtaattatcgtatggacatacgcattatttttgacggctggtggtgcatatgattataaaggctgcagctccaacataccgagttcaaacatactaaacgatggatgtcgaaaacatgcatataccatgcagcattgtaggacagatgcttccaatgcatggagaacggcagcttgggttaggattccctatcctcttcagtggggcatgcccatcttccatttgaggacctcaattatcatggtcataacatcacttgttgcatcagtggattcggtcagttacttataaatcaaattcaaatgtagccagaaacaagttatttgattatttcactttctaaaaaagttgtgttatatcttttggtgaagaagatgactagatggatggcattaatatttgacactaatgcaagtggttgaaaaactaacctcaggttggaacataccacacaacatctattttactcaatttgaagcctccaacaccaggaattgttagcagagggattgcattggagggtttctgcagtattttagctggactttggggctctggaactgggtccacaaccttaacagaaaatgtgcatactgttggagtcacagaggtggctaatagaagggctgtggagattggagcactttttcttatcattttctcatttataggtaaaccactcaacatgttacccaaaaaaaaaaacattgtagtaccaagtattgtatatggcatgagcatgcatcgtttatgtttaaaatgtgaatctatagacatgtatctttccatttgatttcgaagcgtttaaattgaatgttctatcatattgatgagttagcttcttctttttaattgcttcataggaaaagttggtgccattcttgcttctataccacttgctttagctgctgctacactctgcttcatgtggggtcttactgtggccttgggtctatcgactttgcaatatagccaaacagcaagttttagaaacataacaatagttggtgtttccttattccttggcttgtctatccccgcttattttcagcaatatcaacctgaatccagcttaattctgcccagttatttcattccttactctgcagcatcgaatgggccagttcattctggtaatgaacaagtaagccatcttttcattaagctaatcttctattatgccttgcttataatttgtatactgtagacttgctgatccttgctttgttctgtgttacctagattgattttgctataaatgcacttttgtcactgaacatggtagttacactcttggttgctttagtactggacaatactgttccaggaagccggcaagaacgaggggtgtatatatggtcacactcagaagatatcagaagtgatccgtctttgcttgcagattattctctgccagggaaagtcggccggtgtttttgtttgccaaaatgctttggggtgtgacagtttttaatatttcctcttgaatcttattaacaatattctgaaaagtcatcttatctgtgaagaggttctcagtacacagctgaattggaaggacactggagcttcaagatttatatatatatagggaattgttgctgttgatatacataaatagcttcttcttacacgataacgaaaatttctggctactaccaggtttgtgaaatttgttccattcaaaaaccaaacattattaatatcccggactgtactatagttaaaatttaacatattctttgagaaaggctactcgtctgtctatttgttactaatctttttcactctttttcattaatgtacaagcctaccatttactttacttacaaagaagttggaattattagagttgaactttacatggaatatatgaggttcacaacatcatattcaaaccacgtggagctagttcttagctaactttttcttaacatcttcataatgataaacaaattgatctaaagcaagatgcttggtgtattctccatctttaaaacacctaaacatcaaggttaactaagttggacatcgcattcaacacctaaagtctctctttctctctctctctnnnnnnnnnnnnnnctctctctctctctctcaatacatgaaaatctaaaagcaatacacaatgttagggaggtggaatggatcttttgttatgccaatcttgtataagtgtacggagggtgtgattaggggtaagaaaagtatttttgagccttaaatttgtcatgggagacgtatcattccccattctaagccattcctctatggcttctagctcatatgaaaatccatccacagctacatgtgggtttttcattacatcctgcattcaaataccccaaaacttatcactaactttttctttccttggtttaaatatttaaataaatgaaaaaaaaaaagcatacctgaaatattggacataggaaaaaacttggcacttccatggggtcctctccatctagggctctattgattgccacgtcagatccattacgagtagccaagttaaattgtccacttgacactagatccctagctttttctctcaagtcgttgagctcttccataacagtagccaatttcaaatccatattgggcccacggtttctggacaaacatttcaacgtgaggcctgctagtctctcggctaggtccatgggccactgcccggccatttcatccaaatcccggatcaaacctgctctatccatagtcatggcctcaacaagcccagcccaatttctcccagtcaaaaggtgcatcagtaaaactccaaaggccctaatgtctgatctaatccattgctcatcaccactcttagaaagcccaaacccagttatcttggcatttagattgcggtcaaggagaatattggccaatctcagttgaccgtgaacaatgggcttgggtttggccatgtggaggaaacccaagcctgaacaaatctccgccgcaattcggatacggtcataccaacggagggtccggatccgttttttggctgaccctttgcgagagtacaatatgtctcttaagaatatatcccttaagctaccattgtgcatgtattcaaatactatgcattttaactcagagcaatagccaaccatgggcaccagatttgggtgcctgatttggctcaacagcaacacctgtgtcaatcataattccctatgttaaaattaaaatctaactaatatgaattgttgaatttttcttaaagagtaatttagcatctcaaatagttttgactgttataatatgaaaaccaaaaacccttattaccttagattgaaaatcttcttgagacattccattaacagagtcaagccttttgatggcaaccaaggaatgaccaatgcggccgcgatagaccccagtccagtcaccgccaggcttcaacctcattctctccgagaagccattagtagccattctgatctgatccgccgtgaagtccttgcaaccgccactaggttgaccgagcctggccaccatttggatggcatctttctctttacaaaactcaatccgacgctggagaacatctctctgttgccttagctcctcaatttccctaaccatctttgatcgtaagttgacagcgttgtgtagctgagcctctgattgagatttggccaatgtggatgcgtgaagcttgttggagagctcgttgttgagctgtgtgagtgattttagcctcttcttggtttcttctacctcggccatggttgcgtggaggtgttcctcttcatcttctaacactttctttaactctgttcgcttctttacctcttctttgatttttgtttggagttcatcactctaataattatatatatatacaaataaaatcaatatgtggtgctgaaaatagaggttaatatattatatatatagcttagggatataagtaagtacccggcgattgcataaaaaaatagctctttctgcttttgaacgcctttctgcattgcccattgcttctattctcttgttttggactgtgtttttggcttctttcagttttgttttcagacactgaattttttcagcattactctgatcaaagtaatcaatacacatgtattttatttataagttacaggtataaattaacgtatacaaaagagtgatataacttctgctttttggtttggtttggttgatgtgcacttttttataagtaatccagtaataacaataataattaaaaaaaattgcctagtagcagtgacaaagtaggtatactttcaaaatgtagttaaaatgctctatttcatttgttctagtctcttctctattttattcattctgtaaacagactaatttgcggtataaatactccagtttaattctcaattataaataaatactaaaatttaattttcgatagtaataatactaagttataaatttttatatgtatctacttgttaagtgttaagtatattgctacgtgacaatctagtcaagtcatgaattttatttttttaaaaaataatttaaatatactaataaaaaatgacatgtggataatgattttacacttaatggcctgtatctagttccaaaaatataatttaaattttattaccgccaaaaattaaacttaagtatttatttacaattgagagttgaacttaaatatttatgttgcaaatttttttttttttt

SEQ ID NO: 36662 - DNA, 7708 bp, Cannabis sativa
tgctatataaatctccgtaattaataaattacgcttatttactcacttataataaatttaaattttatgttgaattagattagtaggaccataattctacttattacctgattaacccataatataagtgtaaccctaattatttaccattaggtttatcgggatattataggtgcgcactatttgtgtaaatcttttctgttttcatttctttttacccgaaggcttgcattaagagagagggttatcgagaattacccataaggaatgctacggtttggataccctcgggttgttgatagaactgggaaaggtctgtatcccatgctcaagggatccctgatccattcattcccttgagctgagatactctattttctactttgtgttgtatttcgttggatccttttcgtgtaggtctgagaacccccactcctggctcttacaaaacggggaacaccattttctagacgccacttttgactctaaatatacggcattcggcctggtaccaaagtgcttggcaatcctatctaggcacaccccgagttagatttgtgattgcctccataactctttagcctaatttaacgattcttggagtgaagagtgattccatgcgagccacaaacgtctcactgtgcgagggcaaagtggtcctgactgggttaaccgcttcaggttcattagccataaaatgggtgctctgctggagtcctcaaccgaggggctttttgtaatttcgtgcgggacttggctctatgatttctaccaacctgttaaccgaaaactcctccttatctggggacttataggcaagtccgcgatgaactttaccccctgtgtaccaattttcggaatttcctagcgatctttgaatggtacttcatgctgagtggaatcagcttggctaacatttacgtgactggatctttgtccttgggggaccaggtgtatgtcttatgtaacacctacgaaggtcgttttttcgcggagataactagcaaagctcttgcctatgggtgctaagggggtggacattttttttctcatgcgactttttttttttacattattgcttttggaaaactttggatccctctcagttgtgtgtggcctttctaaagttgtggccacctagccacctacaagcagtgtaaggcttcgggtctaagagcatgcaccacagtcccatcttcagccggcaaagtagatagtactagtaaatgcataccaggagctcaagagtgacctaatcctgagggaggttttacggtaccctgtcgtccaggtataagcatctttctggaaataacccctatctagtgtacaaaaaagaaactcgaacatgtcacctcaaatagttatagaagcttggggataaatattatttgtgtttctacacaggtgacacatggcatgagaagaaagagataatctcataacctcactaattaaaacccctcaacaaggcctagtcatggagaagcttcacgaaactcagaacaagtcaagactaagagataggaggaagtctctctcaaacttatcttagcttcccagacacagaagacatattatcactccgggatccagagtggtccaaactcagagtctgcccaactaatacccagatgggttctcgaaaggcctatcacggacgctaaccgcctaagagtgttacggacgtctaccttggatgcaacctagagcgcccaatgacatttatacttttttttttctgacacagaatcagatcttgtctcttgtgtccagacatggtagtgcgcgcacctcatataccttttttttctagatggttattccaggcctctacttttaaaggttgaactttttggcaacatacgtccactacatacaatagtccccaattgttcagctgctactacgcacgagcacaattctttacaaggagcccattagttagctctatttttacatgtaatttaccatattagtgagctttttgcagaaaccctaagtgggtcatgggcatgtccatatccgctcttagcctataaatacccttctatttccatacgaaggggggatcagaacctaaatagtcgaagctttgtaaatattattctaagctttcctcttcttcaagagaaactaagaatacagagttagaatttcctgcaaaaattgtaaacacatcaaatacacccttataggctaatagattgactcatgaactaaggttaattaacacttgaatcaagtaaaaatccccatctcatttatttttgcattttattatttccttagttcttaaatatttagtttttaaaatttcaataaacgcttattattaaggtggacaatgaaacctagggcatttaattaagtatttataattatattaattttcaatattataatgtacatttatgatattcgcttctttaagaaattattttcatatttaatatcatgtaattttttatagttaaaattataaatatttggctctatattttataaaaaataatatttttttttttttgaataaataaaaaataatattctttgattatctatatctacattaaattgtttcacatttatacttagaagttataattttaaagcgaaggaaaatctttttttgttataaaataattagattaatttttaattaattatgagaatcaatataatcacaaatatttttatttatagttaggtggattctaaaatcttaatgattcctctaaatataattaaaaatatcagttacttattattttaatctgttaaatcttttactttattttattaccaaaaatcacattattttcggaactatgttagaatttaaataatttagattaaataagtatttttttcaatttcacgcaattttcatgagttcgaccttgttttttataatatctatactacaataaagttttatgcacttacaagttgataaatttaaaacatgccactttttggttggagaggaatctttgtaagaattatcaagggtgttcacctagaggttagatcactcttcctacttttggtgtttccaccatattgagtagtgaaatgttgggcgagcttgtcgaatgagttgatcgatcattcatttagttttttcaaccaaagcaaagttgatctggtaagcgtagttgagaaggctttacacctaatgacgggattatttgtcttcaattccattcgatgttcaaattgcaggacatgctctaatggatctctttccccatcaaacaacgtgaaggtgtccttcaatttaggttccttgatgatccacttagcgaaatgagattttactacattttgaaccactacttttttaagaatgtcaaaatctacagctatttcttccccaattttagccataactcccttcatcacttggtctttctagtgagataatgaatcttatgactgcggcagctcaggattcatagtcttagcttcaagtaaatatgttttctctttgttaggtgctggctcagtcaccttttctttgttgctgcccctagttggaactacttttgcgagccctgttttgcttttgtggtattgcttgaggtcttcgtaggcgcagttccttccttcctgacggcaactggcattattgttcctaataatgctttgacagttgctatggttttcaacgcattttgcgtcttctctacagggttttgtaagatttttgcttgtagcagtcgctcttgtagcactgtctcgttggcagctaaattttcattgttagattgcttgatatccaactgtgtctggatttttctgatccttgctcccatatctgccattttttgcctgaatttctacaagctttgtgcaacatcttggtgatattggcaactctcgtcttgaccctgcgaacgtttttcctttatgatttgtcgtcgctcatcgttatgcttatcttgtgcaatcattcatcgatttatctctctcatttcaactgccaagctttcaattggattaacggtctgacttgaggtatctccctcactttcactcagtattttgtgcattatccactgttttcttcgatcccatcttaaattgtagtttagtcttcagcttttcattcttgtggttcccatagatggcacgagctgttgatgctaaaaattagctcaacgaaaaaattgtaattggacttggattctttacactaggataagtcttgccaaaaaggtttctacttcattattctattcctctggtgacgatggatgtttcttggggtcagtgtataatttcttgtgctgaattctttcaaagaagcaataaggcagaatttcgacaagttggtattgtcaagaattcatgtcctattttaatttttcgatcttcaatttataggccagaataggtcttgtgcttctttaggttcttttttatcggtccatgtgacttttctctccccacttctcgtgtcctgcattttctttattttttgagctctgctctttcgaattcttgttttctattgcggctagcgccttagtccttgctcccttttaatgaaaagacacatttcaacttctcctgacatattatttgttagttttacagaatttctctttgaaatcacttttttgtccctaagattaaaatctacccttactcttaccatataatattaacagatactaatagtttcaatataatgtttagaaagtttacaattttttcaaaagtaaattactaaagagtaagcacattatttacaattttgttgtaataaaaaattttgttttccgaacaaatatagactcacagacaattttactataattttaattttattttgaaaagtcttacacttgataaatagtaaactcattatttgtcctttaagctgattatttacaactacaataaaatagtatacaactatactttaactactcctaagaacaaatgtacaacttaaaatagtatatacatcattagctcaaaacaaattgagtacccaatcgccactgttgtgcaaagctaacatcaccacatatcacaagctttgtgtcattcatgcaagagatctcagcattctcaacagtaaaaccccttaaaattggcaaaggcattcctttccaaagctgcaagttcacgtacggtaagaccaccgttctgaggagggctgacattacagactgcatatttaacataattaacagatgctgtgcaacaagagaagctaaaagccttgtttcagatatgacatttgcaaacaaaaacttacctgaactaaacgcatgtgaaggccaccgatttcgctccacttcagaactgttgtgaagtcttttagtttaagagtaccaaccagtttgttcaccacaattttcggagagcacgagccagcaatctcctgcacaaacaaaacactctcaagcatttttattgactaatcaaatctgttatcaactatgaaatccaaaatgaagcataccaatgacatgcacactactggtatgacttcagtgccattgagaacattaattatgacatcggagtaaattgcagtttcaatgtcattatttataactttaactattggcggagaggatacagatatattaagaacaatgggatgatctggatacttcttgtacagttggggaactgcatatttccatttagaagtgttcaaaagtgattgatctggtactttgtcaacaatccagtgcatataacctgcctgaggataaagaaagaaaccaattttagttccactatatggagagaattatagagatcagtgtatggataggttagtctttaatttttaagcctccactcaataaaatacattaacagaaagttcacaaatagagaaaataaagttatcatttgcacatcatgatgtgaatcatgtaatgactagcttgcatcctatataataataacattatgaaaagagcacaacagaattttctactgacaaagtagagcttacattgaagaaaagtagggacactgagttaaaaacttcttcatgtaacgaaatctcgatcatcttagtagaagcattgcagaaaacatgatctagtaaatttttatggtaaaatctagaggttaaatcatcaattgctgtgaataaaccattgatctcaaattcaatagaagacttgctcaaaacaggcttgccaacgaaagtaacgttcattgcagcaatatcatagacttgaatttgcttagggagtgattgcagtaacgaatcaagctttgttatcccttctccgatcttcttagacatagcatcttcaacaagagactctatattaccttgaaaggcatcaactaacctgtaagtgcaaataaaaatccagaaaagatatttctttatatgaaatccttcattggtatagtatgtgtatggtgttagaaagagttactcaccagaaactaactaggattaaatagcctcggtaaaaatgcacaaaatttacataatggaaatttatttgagaggattgaattacccttggtaaagccaggatgctccaccgtccaccttgattgagatatcattgacagagcatccagattcaaggatggaaagtttgagagttccttcttggtttcccaaagccactgtggcacccacatccataccttcaacctagaaaaccagagcactccatcagatactaaaatcatttaaaaagcaaaaatgaatatatgatttaagtaattgtatttcacccactgcatatctcatcttttctggcatctttgacactctcataataatgtcaccacttctttcttgggacaatacacagcccaaatgaacaaactcaaccgaaatgtgatcttgataacgaagttatgaatcatttgaattgctctatgttatagtagcaaaaatcaaaatcaagagaaacacatctgagtaaactgtaaaacacacctgaatagaagccctcccatcatcagagatatcaaaaaaccagttactgtacgagtacttccaattcatgcttagctttgcagtagcaccagaagcaattatagcaatacccatctcgccagtctccacatatgaagaagggacatcaacgctgtagattgtgatatttgaaagagcgacgtgaaccttgccaattagagggacttgtacatatttttcaatctgagggagatgaaatggaattatagagtcaatagctttctctattagcaaatcctttgaaaaatcaagacccttgtctgatatcaccacagagacaaaaccttcttcttgaaaactagagggtaccaataaaagaagccagaaaaacaatgacacaaatttggatgccatgaattttgagaagaaacccatgtgagattgagaataaacacttgaaatttatgataatagaagatttcgcctcgaagaagattacatccttcctggtatgggatatggaggaacacaaaatttaattttacatgttgtattgaatgagtttcgtacagaagtagttaaactgatatgctattatgcaacacgtgggaaactagagatatataattttattcgctaactaagagcatctcccatgtacaccatttcaccacattcctccagaatttttacactattttacttcaatgttatactaattataattagtgtgcactaaaattctatatgtgtaatctacaccaatttaggtgtacaattttt

SEQ ID NO: 36663 - DNA, 4395 bp, Cannabis sativa
gtaattacacagtgtaattacatccaattctcatgggggaccatgagaattggagagtgtaattggaacccctcaattacttgtaattacacagttacagtgacaaacatgctaaattgtgtaattacctccaattacacacaaatttaattacattgtggctttccaaacacaccctttattgtgtcctcaaactttgatacctactaaattatattttgttattttagtatgtatcaaatcatgtccctgaacttttatctatgttagactttcgttaataaaattgaagaaaaaattttatgttaaactttcgttagtaaaattgaagaaaaaattttatgttaaacaatctttgataatttatataaaaaattttaattgtctgaaaagttcaaagaatctaatttaatcaaatgaaaaaaattataattaacctaatcaattaaaaagaggaaaaatgaaataagttgaaactgaaatatgaaacgtatatatggaaagtaacatacgcacgcccaaggcaccaacaactcttctctttccttgtctgtacggacgagttttctttggaagcatgaacattattagacagacatgacatgattgagttccaagtttctcactaacaacttcaaatccagattttaccaatcccaccaaccccctctttcttataatcctttttccaaaggtaataattccctttgatttggaggttttttaatttctcattagggtttttgctaatccaaattactttctctaatcatatttttttttcccgaattttttttgttgtaattatagaaaattgttaatttgttattctagggctaggcattgttttaggggaaaattcaaaacctagacttgttttaatttgatgagtaatactgtttgaattgggggttgtatttgtttttctaaggctgggaagaaaatgatagctatatgtcaatctgggggtgagtttgtcaccaataaagatggtacattgttctacaaaggaggagatgctcacgctatagacattgatgatgaggttaagtttgatgattttaggcttgaggtggctgagatgttcaattgtaacatgaattcaatgtcaattaagtattttcttcctgggaacaagaagacccttatcacgatttctaatgagaaagatcttaagcgcatgattaagttccatggggattcttccacggctgatgtctatgtaattgtggaagagattgccgctcaggatatctctaacatgcccgccagtaggtagttttcttaatttaatccttcctgttatctatatgtactttattgtttttggggtttattgctagttagctctgctattttgagggatttatgatttgggattatctgggtttttgtaggtctagcagaacaacattgtctgaaactgtgcttccagttgatactactcttgatgttgttggcgatactgctcaacccgatatggcaattgatgttgtggatgacaccaatgctcaaattgatttaactgctgatatttcaccaatgtttcctcttgttgcttcctttgatgagaagaatgctaaaggtgcacagcagtggcagaacactatcactggtgtcggtcaaaggttcagcggtgttcatgaatttcgtgagtccttgcgtaaatatgctattgcacatcagtttgcatttaagtataagaagaatgatagtcaccgtgttactgtcaagtgtaaagcagaaggttgcccttggagaattcatgcatcacggctgtcaactactcaactgatatgcattaagaagatgaatcccacacatacttgtgaaggggctgttgcaacaactggacatcaagcaactaggagttgggttgcgagcattattaaggagaagttgaaagtctttccaaattataagcccaaggacattgtaaatgacatcaagcaggaatacggaatacagttaaactacttccaagcctggcgaggaaaggaaattgcaaaggagcaacttcagggttcatacaaagaggcatataatcaattaccttatttatgcgagaagataatggagaccaatccaggtagtttagcaaattttaccaccaaggaagactcgagttttcatcgtctttttgttgcgttccatgcctcattgtatggttttcagcaaggttgcaggcctctcatttttctagacggtgtacccttgaagtcgaaataccaaggcaatttattagctgcatcagctgcagatgggaatgatgcagtttttcctcttgcttttgctgtggtggatgcagaaaccaatgacaactggaattggtttttattacaactaaaatcagcgttatcaacatcttgtcccctgacatttgtggcagacagacaaaagggattaagagaatcaattccagaggtattcaagggttcttaccatggatattgcctacggtaccttactgaggagcttcttagagacttgaaaggacagttttctcatgaggtgaagcggctgatggttgaggattttttcacagctgcttactcattgaaggctgaaaccttccaaagttctcttgagaatatcaaaagtatttcgatagaggcttacaattggattgcacaaagtgaaccacataactgggctaatgccttttttcagggcaccagatataatcacttgacttcaaattttggggagctgttctatagttgggcctctgaagcaaatgaattaccaataactcaaatggttgatgtgataaggggtaagattatggaattaatctatactcgacggacagattccaatcattggttgacaagactcacaccaaccatggaggaaaaactagaaaaagaagcccataaagcccgtggtcttcaagtgctattgtcaactggtagcacatttgaggttcgtggagactccattgaaactgtgaacattgatcactgggaatgtagttgcagaggatggcagctttctggtttgccttgctgtcatgcaattgcagtcatcagttgtttagcccagagtatgtatgactattgttcacggtattacacaaccgagagctacagattaacgtactcagagtcgattcatcctattccaaatgttgatattcctctattgcaagattcttcccaaactgcaataactgtaacccctcctcctacccgtcgtccgcctggccgacctacaacaaagaaacaattatcactagatgtatctaaacgtcaactgcagtgcagccggtgcaagggtcttgggcacaacaagtccacctgcaaagaactggtatagaatgctatccaattcttcttttaaccaagcttcatttttttttcaacaaatattgttctcttttgtttgcaagtgtttagttcaatgtagttatgcgatttcagaaaccatttacgacatggtacttattttagtagcgttttctctcctgcagtaccttgttgcacccgattcatgattcatacttatgtcgtagccacgtaaatacacctcatgtagatgattcaaaccattataaaaagtactactatcatcacgctgtcatcacttttgtgtatgcatctgctgtcttcgcatgcttagtatttggctgccactatagggcaccaataacacatcgatgtgccggcaattgataattctattaggtgatttgagaaaagaagagcaacatcttttatgcttgctgttaaaaccttactattttatccttatctttcttaatggtactaattggttcctcttttcattttcctttgacttttttcaataggattgcatcactgccccaggaacatcataacctgtacatctaaacagctctttatgagggattgcaagatttacaggacccatattttggttttcagcaaccaggaatgggacttgaatgtatgtaaatgtactagtactagtactagtagtagttgtagtaatctgtatttataattccagttgctctagctcacttgttatcatttgtgctatgaagatttagtgcccatgttaaggaatgagagatttaggataataagaatattgagttagatttagttgaggttccattttaccttactcgtgtattaattagtatcactaccaccattaccaaccctgttacttcttgatttgattgaagtctattgtgaattgtgaatgaatatgtagttactcttttgctagcaagaattgattctccatatcaaacaacgacattggcaaatggatattacctactaaacaagcttttttttttcccttttcattttgtatatttatagcaaaaatgactgaatattaatcaataaagtgtgacccattgataactaaaataaatagaattaaattgcactaata

SEQ ID NO: 36664 - DNA, 3331 bp, Cannabis sativa
  modified_base (3224)..(3230): a, c, t, g, unknown or other
atacttgtaagtagatctaagatcctggtaaaattaattccaacaggtggatcaactgctaacaatgtcaatggtggaaatcaactcaacaatcgaaatcgaaacagagaaccagatgagaattcacctgtgtactttaatcactcgatttcaataaagcttaataattacaactttattctttggaaacaacaggtcctagctgccatttgaggaaatcgattgatgaaattcatttaaaatgttactcctcctcctcgatttctcaatgatgcagatcaaactaatggcgtgttcaaccctacttttatggaatgggatgtccaagaccaacttctcgtttcatggctcctctcatccatgatagaaagtctgctaacaagaatggtagggtgcaacacagccagacagatctagaattccttggaaaaatacttcactcttcgagcgtcatctaagattctggagtttcgtactaaactccacaatattcgaaaaggttccatgtcgttgaatgactatttgttgaaggttaaacagattgtgtggatcttctagctagtgttggagaaacactgaacgatcgtgatcatatctctgctatcttcaaaggcctccctagtgaatatgacacattcataatctcctcaaacacaaggattgaaggctatactgttgctgagattgaagccctgttacttgcatctgaatcaagaatcgagaaaactgatcaaaaacatgagatcactgctaatcttgccaaaactgactctgattatatttttgatcaggatcaagatctgaatcttgaagctaatgtggcctagttcaatcgtaatatgaggtatcctatgccaaatcgcaataactttaacacctgtagaggaggctatggaggtaatagctctcgagaaaacggagctcaattcaacaacctagttccaacaatcgaggagttcctgctactggtagagaaggaagattcccagctccacctacaaatccagttctccatgctcgcaccaaacatatcgagcttgacttgtattttgtaaaagagaaggttcaaaatcgccaaattactatcaaacatgttctagcaactaatcaacttgcaaatggattcaccaaagccatatcaagtcaaagcttttgccttttccgaaccaaactcaccattgttgatgcctctaatgctgagtttgtggggtagtgttaagagctgatagttgtacaatttttgttttgttagttacctaactaactacttttttgttagttagttagttagctttcggttacaagtaatcttgctttagttctgtaatccctgtacatatattgtacaactgtattctcaataataatcaagctctttcatgatatctttcatcttcttcctttcctctcttttctctattttctctgtttttagattttctttactgttctttgttgtttgttcatactcgagctttcaatgtcaaggagattcaactctcctaacagtcttccacatagaaaacatgacacactagacaaggtcggcccaagtattggatagtttgggccattgcacaaggcctccacttttttaagccccaaattcttttttttttttttttttaagaaaagacttactttttgttttttattttcctattatacatacataataaaaattttatatctaaaaatttaggaaagaaactttaaaaaggaaaaaaaaaaaaaaagttagtaatagaattgtggtcttaatgtacataatttttttagagagcccaattttaaatttttgcataagggtcccaaaaaattgggctgaccctgactgtaaataactaaatatttctatatgagtgatatctagctgtagcgttaacatgtttctttttaataaaatattagacgtctcatccaaagtgttaatttgtttaagaaaaaataataatacaatatatatgtttacgtattattatttgacatccaaacatatcaagtcgaaaaggacaatattttctttgtgaaggacgagaaatgagaaagattgtgagaatagttaagtatgtgaggatcaatggaaacaaaaattgggaaatttatgagcaagttttagttttggccgaaaaatggtgataagacgccatcttcgccgtgtataaggacggcgttttgaccattaatgttcaaaaaattccgccgccggtgacaaagaggcctaaagaccacttaagggggtatgaaaggaatctttatcacatgtatactatataactaacattactatgttcaaaaaataatagtatataataatgcatatatgacatgaaattattgatttttggttagatacgagcacacccttatttactgactgcttttcttctttttatatataaatataaaaaaatatatatatttatatatatatgattaatttgtctcaaaatattaaggaaaaagaagtaaaattttaaataaaatataatgtctaaaataataaatttagatagttacttattaatattatgagtataaaagaaatagtaatacgctaataaaatatttaaattttatttttaatattataatttatacacaataaatttacgatctataacatacatgtcataaagaaaaaattgaagaactcttctaagacactgaaagaaataaaaggtgttgtgtgcataaaaaaagctaaagctattactgctatttagtatatttttcgatatcatgccgttatcgggttctatataatttaaaaaaatagtctttagagaatatagttaactaatcgtaaagtatcacttataaaaggtgatggatctcattagtgtctaataacaaggggtttttataccacatactgaaatttcaaaaaaaaaaaatttactgtggagcggacttttttttcaaaaatactgtgtaaatttcatactctgtactgtgttaagttttcacttttattttacggttgttttttagttgttctattgttgtttttaattattctattttgttgtattacggttgttttataaaaagacaatacttttataaaaaattccgtgtaacagtaaaattgtaaacttagacccaaaatctattatttttgtaaaaatcccaataacaatgctatgtgtataaatagcatttagggaatttatgacgtggccttgtccacgtaatatcatttaggtgtcgtttggtaacannnnnnntttctaattttttaatcacaaaataaaagtcaaatttttgtttttaaaaattttgtttttgaaaaacaaaaatgtgtttttgtaaccacttttatttttca

SEQ ID NO: 36665 - DNA, 3502 bp, Cannabis sativa
ttaaatccctccccccaaactaaagatttacattgtccccaatgtgacataatattcaaggtaagaaggacttacctgaacccccatcagaaggtgtttggcatcggaggctgatcgtagggatgaaagcaaggagggtatgccaagtagtttggatcctcgactctaagactccacatgttaatcagatgattcaattgccttacttgattttcgtcaattttactcctttgcaccatgtaaatctggatatggtagttttgctggataatgtagttgagttgagcatgcatatgttgcatcctcgcctcaagaggagtaggaaccgcttgaggcatttcttcattttaattttcatcttcggggacaggagtttcttgttgttgattttgacgagaaggaggcggttatccatactgatgtggtggcttaaatattcaaatcttttttgggaaacctgagtgcaggagataaaaaatgaggaactcttcagttatcgtgaaatttctctaggctcttttctctggtctctcgagccttgctcaggcccgcgaataaaatatataataatatacatttttttaatcattagactcatattcctgcaggtcgcagtcttttattctggtcaatcaactatacaaataagccgagctcttgtcagaatgaaattatcggcaaggttggtgctcacaatgtcactgagttccgcgagccctgccttaattttatagcacgctcccgcgatgcgtaccaggattcacgttgcgactacacttgagtgtcataaggatactgtggcacaccatgagcgacacacaattcagttataactcatgctaggccaattctggcatgtgtagatcctgagaccatgttgtcaaagctttgtatgattatacccccaactggcatagtaattcccttcataattgcgtaaacaaaattgagcctatccaatagaacatttgaaaaaatgtttactaggcacaatcctagcacgcacgaaaaacatccaagcacgagccacttggttcaattcacagcgatagaatagttggggctcatcatccacctcatgcaatctcaatctcggaaaaccaactatttctgctaactccacaaggtcaaactttttgtccataaacattttatagtgttggctattcaccattcgtatcccaagcagcgtatggatggatgcaatatttataggcacaactgttttgtgcactcttacttttttcgtttctctgctagggccaatttgccaaaaattcaagagccaaagattaatggactcgctcttggacattcaaaaatttttcccactggtagtcttgaatttgttgcctcatactctcgaacagtggttgattcgttatgggattttcatcatattcgatacctcgatccataatgaaagctttcttttccaattcagagtatctctattgtgacttttgattgacaaatctatcttttacaaaatttaacttcgaagtcgacattggaggatttaatgatgaaggacccgatgtcctgatttagtacgcttggaacccattaagaacttcaaaattatcactcaaaaattcttgggaaattttggcaacacctccccttaatttcttcacttcccaaaatttcaattgttcaccaaaatcacaccacaatattccaatagcaataataatccacaacattcaaaaatttctcaaaataaatccacaaacccccaaatactatagcaaactattcaaacttgcaaaaaattcgctcaattaatcaaaatcttgaaaagaaggagacttactaagtgagaatgctgtcaatccacctccattgttgaataaccatgaaaagcttgaggttgaagatgatgaatagtggtattttcggatttgggtgtgaagtggtaatttttggggtgttttttgaaggaaagggagattgatgagaaaattttgaagaaagaatgaagaaatttgagcttttatggtaggaaaggggttggatcgctgagagagaagaagaactcgggtggggtttgaatttttagggtttaagtgatttttgacgaagtggtttttttattgtggcagaacagggcttcgccgcggtgaaggatgcgagcccaaatgtgaaaatcttctgccatattccgccgcagcgagcaatgggcttcgtcgcgactactggagggagccaaaaagtgtcgatttattttttttcattttctttgggtcccgttgcgacgggcaatacctccgtcgcgactactttagcggaccacaattttttttcttcacgtactcatgattctaattacaactcaaattgtacaaatctaaccaaaatgcaatgaaacaaattaaaatgctacaaaacacttgcaattgtctttaaaaatttcaaaagagtaagtaaaatttattgggttgcctctcaatagcgctgtctttatcgtcatatagccggacgttgattgttttcttcaaagaggcaccagaattatggcagacttggcttggtcaatatgaccacccaagtagagcttcaatcattgaccactgactttgaaagtttctgggctctcacctttcagttcaacatcctcatatggaaataccttgaccactgtaaatggtctagaccatcttgacttcaatttgcaaggaaaaagtttcaacgttgaattaaaaagtaagacttgctacccgagttgaaattctttcctgactaaatttttgtcgtgccatttccttgtcctctctttataaatcttcgcattctcataggccctgttcctgaattcctcaagctcatttaactgtagcagtctttattctcatgcagctgctaaatccatgttcaaagttttcattgcccaaaatgccttatgctctaattccacctgtagatgacaagcttttccgtacaccaacctatatggtgacatccaaataggtcttttgaatgtagttctgtaagcccacaattcatcaactagtttccttgaccaatactttctagattgttgaactgttttctccaatatcagcttaatttcccacttggaaatctcagcttgatcatttctttgcagatggtaaggtaaagctatcctatggcggactccatatcttgctagcaatgcctcaaactgtttattacaaaaattactcccttcatcgctgatgatttctcggggagttccaaattgagtgaagatgtatttttaaaggaaagacaagactgttttaccgtcatcagcatgtgttgcagctgcttccacccactttgataagtagtccatagcccacatgatatagagattgttaaaggaggatggaaatggtcccatgaaatctataccccatacatcaaacaactgtacctccaaaataccaataaaaggcatttcgtttctccttgaaatgttccatgttccctgacaacgatcacatgccttcacaaagtcattagcatccttgaaaag

SEQ ID NO: 36666 - DNA, 4075 bp, Cannabis sativa
  modified_base (42)..(57): a, c, t, g, unknown or other
  modified_base (3955)..(3981): a, c, t, g, unknown or other
  modified_base (4027)..(4030): a, c, t, g, unknown or other
aaaaaagtaaaaaataccacctgacagtatttttgtaaaaannnnnnnnnnnnnnnnataccatgtaaattttcctataaataactctattttcatagacttatcatcttgtctaccacacctacctctcaacttgggttgaattgaaggcccattaagagaagattcccttttcaacaaaggatgtatgtcctaaaggtgtcacctttaggtaaaatctcatccaagggaataatgtaaagagggccatctccatttttttcataaataggagagccattttcattaaaaggggatccgagaattttaaattaagccaaaacgttgtcaaattctctatacaaccttcagcataaatacaagtgactcgtagactagggttcattaacacccgaaccacataaaaatctctactcttgtctactctttaatcatcattagacgaatatttaattggttgccgaaaatctcaatcaacattttgatactttcattgagagctataggaaactttcactaattttcgtcttttcgttggtggtcatttcaccatggcagtttgttgcgtaaaattaaacttggtacaagtgtacattgccaacaaaaagtatagcaataaataccagatattgtcttcacaaagactatttcttatgctttccaatgtgaaaataaacactagaaaaatgattcaaaatacaagaataagattgatggtaactaaaactaggagtaattaattgaatgtagaaaaataaaagaaaccaactggaaagtggaaaataatagcacaaagtatcaaatatgagatgttaagctagaataattatccccctaatatgcaaaatactgatagtaatgttgtattaatgctgcagcaacagagcatttcttagttaagaattccaattaattttataggcttccgtcaaagtcattatggtttcaatcctttaattaaaccccatatgtatatgccaatttaattttaaaaatttaatttaagtaccaattatctaagactatatcactacaatattgaaataaaagaattcaagcatgcacctgtgatatcccaaaaaaaattaattgtgattaattaaatatattttatgaaatatgaagtaatatgtgcattaagagaataaattgagtaagattataatcttactaagttaatataagatgttatttgtgtttttgagtatgcgacacgtggcatttaaagaaagggattcgtctcatagtttccctaattaaaatcccccattataatcttatcacggagaagcctcatggatctgggaacaagtcaagactgaaggatatacggaagcacttggccttgccttagcttcctaaacgaggaaggcgtgttgcctatcttggacccggaggggtccaaatatgatagcatgtccagctaatatccggacgagtactcgaagggcctaatgcagatgttgactgcccaggagtgtcgtggatgtctacccttgatacaagccatgtcaccaagtgacggttatgctttttctgacgcaggatcaaatcttgtctcttgcatccaagcatggtaatgcgcacaccacctccacctttttgatagatggatattatggacctatacttttaaaggtgaaatctttgggtgacacgtggcctctacttttaaaggttaaacttttaagcaacatgtgttcatatagtacaaatagtcctcaattatctagttgcagcatgcaccgacacaattatttccaagggacccaatagtcagctctcttttgcatgtaatttaccccgttagtgtgctttgagcagaaaccctaggtgggtcatgggcatgtccatacctgccacttagcctataaatatccttctattttcatacgaatgggagatcacaacctacatagctaaaacactatcaatattactcttcttcttcatcttcttcaagagaaaccaagagtacattattagggtttcttgccaaaaatattgtaaacacatcaaaaatgccctaagaggctaatagactgactcgtgaactaaggttaattaacactcgaaccacgtaaaaaatttcaatctctttatttctacattttattatttctttagttcgaatgtttagtttctgaaaatctcagtatatattttggtactttcattaagagctaaagaaagatgtaaagcctataatgttactgctaccatggttttcacatgaaagatggttcctaagaagactcttcaaggtggcctcaagaccgtcatggaggaagtaaaccccctttcgcccgagaggacgacccaaacaactagcacaaccacatcgatgatgagagagatgctgagaatgatgaagaggaagaggacgatggacattacgtcaaagatgggtactataaagatggctaccattatgagcaagaccccaaagtagtttgagtgtctaacgagttgcttgagaccagaaaaaagctagcccatcaagagaagttttctcgaaagatggagaatatgatggctcgccttcgagccaagtttggagatctcgatgaggggattttgacgatgacacctcaatggaatgcgtcggtagaaacactagggaaatccctactaatgctggaacctctactcctgtacaggagaaggggaaggcaaaggtaagtgaccctaagaaccttaatactcctatacctcctcgaaaaaatataaatccagccaacaagccttctcaagcgcagaaggcgaacgatgcctccgggctcggatgctcttctgcccaaaaaggtcctgtagcgccaaaagggactggtacgaaagtaccaaagcccaaaggaaggaaaaattgccctagtgattcaataaaccaggacagtgggataagggacaatacttcgatgatagttggtctacggtggatctcagaaggtgtctagatgccaagtaagagaaagcaaaatgcgagaaggcgaggccatgtggtaatgacctcataaaccacctaaatgacaaagtctatggaagagacctcccagacagtgacaccaaaaggttggaagaatagatcgctgcactaacgaagttggtccagaaacaaagtggggctctcacagactctgaggatgaggacctggagccatgtataagaagaatcacagaagctctactcccaagaacttcaagatgccccaaatcaagttgtacgatgggcacactaatccaaagactcatttagcaaagtacaataagatgatacaggtggcaagagtcagtgaggacaccaagtgtttgtgcttctccctaaccctcaccaaattttatgaagattggaggaagagactggctcctgaatcaatccattccttgaaggagtcgcaatctacctttaggaaacaatttattgttgcatgtgattatgacatggaaatgggctctatcactaatgtcaagtaacatgcggtagaaagtctgaagaactttattcaaggcatgatggagatggtagcaaagactaaagtaatggatgatatgaaactggtggccttacaattgggacttgcagttggctccctgctgtggggacaaatgcaaagaaaaagggttgagatgttgtctaaatttacggcaagggtccaaggcttcattaacctggaagatgcttaccaacaagcatttggagtccctttgacatcaactccaactgcttctacttttgggttcgtctcaccagttcttattcttggaacacagtataccccgacagtctacgaaccatctacatccgtacaagcacccacgcaaacccaacactccttgatcgactagctctagctgcagtagccatattggcttcgagatcgagaaacccatattccccaggcgtagctctaccactagttgatggacacatggctaccatgatctagatttactaccnnnnnnnnnnnnnnnnnnnnnnnnnnngaatttctaaaacaatggaatttatacacatataaagtttaagaannnntacattggttgcagtggaattaaatgactccttccgctcagatct

SEQ ID NO: 36667 - DNA, 5801 bp, Cannabis sativa
  modified_base (2650)..(2655): a, c, t, g, unknown or other
agagagagagagagagaataaataaaaaatttaaaatataccttggagttttagtgatgggaatctcaaatctgtggtcacctaggcgagacagagagaaaatgaagcggagacgattaggcagagagaaagaatgtcaaaccttcaagttttggagccattgagcttgttgttggagccggaggagagtacaactctaccatatgggttagggttggtgtggccggaggcagaagatgaagtggggtgggggtggtgtagctggaggtagaagatgaagtgggtgtgggtgtggtatggctgaaggtagaagtcaatggagaaaaaaagaaaaaataatgaaaagaaaaaaaaaatattttaaaaagtatattttttttaatttaaaattattttttagaccaataatattttaacaagtggcaattttgaataagttaacggaacagttaagcttaggattaacggacttacacaaaagttgaccttggggattattgctgctatttttaaaggttggggactaatttgcatcaaagtaaacttttagaggatttttgccgcaaatttttcattattaaaattactcaaactgcaaaatggcattaaaaaataggctataatgctatggcattatgttaacaacggaaataaaaacatttttattatattttttaaattataaaataaatcaatattctggatccatttttattgtcccaaaaaacaagatgttggcggtagtgagttgaggggatggaagatcgaggtggtcggagagattataattgtggtatgagttttatagtaccatgagggattgttggctgtagttcttctttcagcttgtctatattctcaacaattgattatcttaagatctttacgtacgactatgagttgttgcaagccagtcaacaaaattttgtgaagatagacttcagtgctctggagagaagggaatttgttttcataaaaagaagtgtttgaaattaatcttatactatttacattttcagtaaagatatccttttatattgataaagtaaattattatgctcgtaaatgttgtaatcataattgctttgattactcgtactgataaccttagagtatcagactaggttgaagtgcaagatgactttaattcaaaaatagggtaatttataagtactaacttcatatctaaatagaagcagacgactatttatttggtctagtctttaaattccaatgcaataactagaattattcactatgatggcaaaaagaaatactcaacttcattattaagaagacaaatagtctaacatcataaatataaactcagaacatcacttctattaaaagttttggaaaagaataagaagttttagcaaaattatgagctattctcttagtagaatgatacacaaataataaagagattttgctcttacaattaaataaatgcctacaatcatattaacaactaaactaaaaggagaggttattgttaattgactgcgaatggcctcaatcgccattaggcaatctgtctcaagaaccatcatcaaccaacttttatccttgatcgagctaagagccttttgaatccccataatcctagtcaactcaggcgccatgcttccatactaacatacagtacgagcttcaattaagtagctcaggtgatcacgagctaccataccaacaccgaactaagtagtctcaacaaacaatgcaacattaatattcatcttgattatttttttcaacattgtaattttagtacaagttacaatgataaaatgtttggaatacaaccattccaaacaatttttttttatctagtcctaaagctctgacacgagctgatgacgtccatgcatcacttgtatgaaagtaagtaccatcctgtcaaagatatgtttttttcccaagcttgaagcaagaataggaataaatgaagcccaccgatcatggcactgcactgatcggaagagtgtcaaagaatttttgaggacctaaagcaggcagtgattgatgacactgtattgcaactgccagatcacacggatctcaaaaaatctttttatctagttctaaagctctcttagacaacatatgagctactacatttagatttctagccacataattaagagaaacatttagaaaattaaacaaaagagatgctaacatccagcaacatatctgacaatgaggatttatccttccacttatgtctaattttattaataataacttgacaatcattctcaacttctattattggaagttcaatgacaaaacaccattttaaggctacttttaaagctaaagcttcagcaacaatgtgagctactaaacttgatgttggaaatgaaagttcaacaacttcttcacctctactattcttaacaatagctctaataccaattcttctatttttcacatatgttgttgcatcaccaactgtaagaagcatcatttagttctaaagcatcatctcgatcaacaactcttatttttttatattgtttgattctggggcaactcactcttatgtggcagccaatttttttgataaattgggtagattgtttgatagttatgataaagggtttgaaaccctactgcctgatggagaattagttatctccaaaannnnnnttaggtctatgccgatcagaattaatgatagggagttgggtgctgatttagtggaattggacttagcggatttcgatatgatacttggaatggatttctagtccaagtattcagctagtattgactgtaagcggaagatggtaatcttccaacccgagggcgaggaaccatttgtatttgtgggatcagttcaaggatcccgaattccagtgatctcagtattaaaagctagagatttgttacaagatggatgcttagggtttttggcagcggtattggataccacatgacctgaattaattcgaccagaagacatcatagtggttcaggaatttttagatatatttcttgatgaacttctgggtttaccaccgcagcgagaaatagatttcgttattgacttagcacttggagcagtttctaaagcaccttacagaatggctccggcagagcttaaagaattgaagattcaactttagggatgcttgacctagggtttccatgacttagtgtgtcacccttgggagctcccgtgttgtttgttaaaaagaaagacagatccctacgcatgtgcattgactaccaggaactaaataaaatgactatcaagaataagtatcctttacttaggatcgacgacttgtttgatcaacttcaggggaagactgttttctctaagattgatcttcgattgggctatcatcagttgagtattcgagaggaggacattccaaggactactttccgcactaggtatgggcactaatgctgcggtagcttttatgtgtgcgaagcacaggaaagagtagcagtgtaccacacgcgcgtgggaggttagctgttgagatgcatgcgttagtcttttagtatttttgtaaaaaaaattgaaattcccagtataaatgttaaaaaacctatgtcacaatatttatgaaaataataaaagttagaaatgtatataagtaaattctctttttttttttttttattaaatagatcatttttaaattgacccgcctagtttaaaaatacaaaataagaattttcttaaaagtatacacaattatattttttgtatataaaatattctaataagtcataaacatgttaaagaattgataaattaactataaacttgtttataaatagagtaattttgagatttagttttcgacactattaataaaattaaagttaatatttacttgtaaagcatctctaaccatattcttttaacacattttttagctaaaataaagagtgagctttagaaaaaaatgagcttcagccatacaaaaaatagcttcttataatagagaatagataaagagctctctaaatataagaatctctctaatgttttgctaatttttttaatagtattttaatcaaaaatattattattttatcattattttactaagggtgcgtttggaagtaactgtgtaattactaagtagggtaattactagggtggtaattacacagtgtagtaattcacattgaacaaattcaaattataaaatattattaaatacaaactaaaatagagaacatgattacaacaagaataataaaaataattctattttagctaaaatttaactaaaaaaaatagatagtaccattaaagatgctctaacacgtaaacgaggtttggataaacaagaactacccctctccaaatttaagtgacataaacttactgtatatttttaacaatataagtacttaatatttataaaattaaaattcttctctaattttgtccgtatagattttgttattgtcttaaacgggacatcagtatataaaaggtccaaattctagattattggtctgaacagaaatatgtggtgtcaattatttttaaatgttcttttaataaattaaaaaacagaatttatatgacgaaattaaaaaaaaattacagttttataaatattaaacatttatgatgttaaaaaaaaaatatttaatttaaactacttgcaaagttaaaattttgagttcttttagggctatttacctttagtttatactattgtaggtattcgtttcgtacaaaaaaacttctgactcaaacaaataatgagacttgatgaattcatcatgatagtagcgtaggctagttggagttggaccttgacagattcagaatccagatctaacaaagaaaagttataaaatactaaattatatattcaaattacaatctgttctttttgtcttcttacaataaattcaagaactccttacagaaagcttttctctttttaacagacaaacaagttcctgtgcttttaattatttgtttatttgtggagcatattttgtgaaggctgaatggaaagtaacaaattaaaataataaataactatatctaccctcaactattgtaaatgtgtgtgtaatgtatgtaataatacaggtagagagagagagagagatttaattattttagagatttgggtcatttgatttgaagggaatttcttccacttagttatattttgagacatgtcgacgtgttttacgctttgtttgccggaaataatgtgacatttctgtccttatatctaataatgttctactacatttacattacaagaccttctcaaatgattggtgtaattttactaaaaactgaggtaaatttttaatactaaaataaattttatattaatagaaggccaattatgtaatctctcactaactttttgaaggattacacccctcaaataagacaaaataactataggttgataatagtgaattacatagataggaaaccggttgataatttaaaatttaaatattgaaaaattaataaagtacatttttgaggtcaaacatgtcattttcaattaagtttgagtaatattgaattatagaaaatggtataattgtaattgtatactattctaatattttattgtttgtatttggcatagagtagtttgtatttttatagaagtgttttgtatcaatcactacaaaatattgtatcaagccatttcactaaggaaaaaaattactataatattgtatgaagccaaatgtgacaataaaagagattatgctacttgaacaaaattaaaatttatttaaaatagattttaaaaatgcaaaaaagaacaataaaa

SEQ ID NO: 36668 - DNA, 10478 bp, Cannabis sativa
  modified_base (10292)..(10293): a, c, t, g, unknown or other
  modified_base (10433)..(10448): a, c, t, g, unknown or other
atataacatgcaaaccttataccatctaacaaaataattatgaggtgtacgcatttagaaaaaaattgtcacaaattcacaacacaagagattagaaagaaaaaaaaaatagcaagttattaaaaaaaaaaaaaagataaaaatgaatagaagtagttagaacactcccaacaaatgttataaatttagtaagatacacattgtcaaaaagatgacatacaataaatattctatttatattaaattttactgcaattaatatataaatattaatattatatatttaaaattttaaattaataaaatatctcttttttttattaaataatgataaaacatattaaaaagatagaataccaccaaaccaaatattttggatctgaataggatttgtatacccatacatatatacttggagtgtgattagaggaattaaagcaatgacctttatattctcaaacgaccaaagtttcttcctttaatcctttttcagaactagaatatcataaattactagtctttgaatcacaatcctttgtttttgttcaacaattattaatccagttctagggttttagcaaaagctcaagggtttagttaaatccattacctttgtttatggaacgagaaaaatcagccaagcttcaacacttacaggagtcccttcaggccaatcctgaagattcctctcttcatttcgatctgggagtttttctctgggagaattgggaggaagacaatgaaacactcaaatcattcaaagaaaaagcagctgaacacttcttagcctccgccagactcaacccccaaaacggcgacgcattcagatacttagggcattattactatggcggaggaggaggaggagactccattgttgatccccagagagctgttaagtgttaccaaagggctttatcccttaatcctgacgattctctttctggggaatccttgtgcgatttattcgattcattagggaaagtgaccttagaactcaccgtttgtcgtgatgcttctcagaaatctccaagggccttttgggcatttaggagattgggttatttgcaactccatgaacgtaaatggtcagaagctgtaattagtcttcaacatgccattagagggtacccttcttgtgctgatctttgggaggctcttggtcttgcttataacagattaggtaggtttacggctgcaattaagtcttatgggagagccattgatttggagcccatgaaagtttttgctttggtcgaaagtggaaacatttatgttatgcttggttctttcaaaaagggagttgaacagtttcgtctagctttagagatttcacctcagtgcatatctgcaaattatgggcttgcttctgggttgtttggttgggctaaggaatgtatttatctgggagcttttcaatggggtgctacattgttagaagaagcatctaaagttgccattgaaactacaagcttggctgggaatttatcatgtatttggaagttgcatggtgatattcagcttacatatgctaaatgttatccatggatggaagagagccagagtttagaacttggtgttagtgttgaagattttaatgtctctgtcagtacttggaaacaagcctgttgtttggctgcaacttctgctaaacactcatatcagcgagcattgctcttgactccatgggaagctaatttttatgcagatatagcaataagttcagatattgtcaattctttcaccaaaagttctgatcttgacataaatgtttggcagccaccagagaagatggcattgggggccttgttacttgaacctgaaaatcatgagttctgggtggctttgggatgtttatctaattttaatccactgaaacaacattctttgattaggagtttgcaattggatgtctctcatgctgttgcttggtcatacttgggcaagatttatagggaaatggatgagaagaaactggcaagacttgcttttgattgttcaagaagcatagatccttcacttgcattaccatgggctggcatgtcagctgatttccatggtaaagaggctccggtagatgaagctttcgagagttgtttacgagctgttcagacacttcctcttgcagaattccaaattggtcttgcaaagcttgctgtaatttcgggccacctttcaaatccacaggtttttggagctatcaggcaggctgtgcagcgtgctcctcagtatcccgagtcccataatttaaaagggctggtttgtgaggcacggttcgagtatcaaactgctgctacttcctataggctagcacgttgtgcactcaccaatctttcaacaggttttacaaaatctcaaatcagagatatatcaattaatttggccagatcactttttaaggcagggaatgctcttgatgctgtagaggaatgtgaaaacttaaagaaagaaggattgcttgatggtgaaggtttgcaaatatatgctttatctttatggaaacttggtcaaagtgatttggccctttctgtagctaaaactcttgctgctaatgtttctactatggatcataattttgttgctgcccctattagtttaatctgccgattgctttattacatttctggtcaagattcagcaatcaatattattcttaaaatgccaaaggaactgtttcaaagttcaaaaattagctttgttgtgtctgccattcatgctcttgatggaagtaatcgactagagccagttgtttcgactagtcggaagtttattaaatctcatgaagatatatgtggaatgcattgtctaattgcacttggtaaactgctgaaaaatggatcaggacattctattgggttacagagtggagtggctcatcttaggaaagttattcacatgtatccgaatagttgtttgttaaggaatctactaggctatttattgttatctggtgaagaatggaatgatactcaccttgctactaggtgctgtaacgggaatgcgacttgttctcctatcgacggtttgaaatcagcatatgaaattgttggtgctggagcagttgcttgctatgcaattggcagtagtaatccaaagtttactttcccaacctgcccaaatcaatgtctgaatgaacttggaactgtccagcaactgcagaaacgcttacgccaagaaccatggaataggactctgagatatttacttatcctcaatttactgcagaaagcccgagaagaaagatttcctcgtaatctatgtactatgctcgagcggctaatctctgtggctctttcaaatgaatgttattctgagactactgatctgtcatatcaatacgaaaaattccaacttctactttgtgcttctgagattagtttgcaaagtgggaatcaaaatggttgtattgagtatgccaaagttgcttcaacgattgcaattcccgatagttatttgtttttcgctcatttgcttttatgccgtgcctatgcatcagatggtgatgttatgaaccttaaaaaagagtacttaagatgtttggagttggagacagattgtgatattggttggatttgtctaaagatgattgaatcgcaatatactttgcaaaatggttcaaatatcttagagttgtacatgaaagattgcttggtgggagagaagaaatcatggaatgcttggatggctctatataatctagtccaaggtttaattgccatacagaaacaggacctttactcagcgaaggagtttctcgaacaagcttgtacattgtcaagcgccgaaagctgcatacaactctgttatggttccacctgtttagaacttgccaaggaatggggtgattcggagttgttattgcttgcaattagaagccttactaaagctcaaaaggcttgtgttattactaccccacttcctatcatctcagcattattggcccaagctgagggtagcattggctctgatagcaaagagaaatgggagaaaaacttgcgtttggaatggtatacttggtcaccagagatgagacctgcagagcttttcttccaaatgcatttgcttgcaaaagaatcaagaggtggaccagactcttctttggagtactgtcaaactccattgagatgggttctaagggctgttcatactaatccttcttgcatgagatattggaaggtgttgcagaagctacttgattgattagtgatatatctctgcctttgaagcctcatcaactttaacttaatgctaattctcaattgatcattatgtttatgtaaattattacatgtctatgtaaattatatcaaactttatctttgttttgacaaatcagttaatgaaattttctcacatacaaagagcttgttctttttcatttggagctgtatatgatcatattttcataatataaaattcaaagattgactatttagctttctactagcttaatagctattattaaatatggtctttgcaaatttgagttttcacttcaaaatttatacttttttgcttgaaatcacacatagtgaaaattcagaactaccatagcagaaaaaacaggtgcttaactgatttcagatgagcttctgttgtcagttccaaagtaacattttttttgttgctaaaatgttgattttgcctagttaaaaaagcttcagttttgctataaaaaatcctaaagattccgattgaaataatttccgagctgtattgttaataaattatttgataaatgtcaacttcttttttaataaatttactgccattttgtcctagtgaaaattttaagatcatcttttgagaccatattcaatgaagttattataagacatctgagatgccaggtttcttaatattataccatgaattgagtttggggtaattatattatctttggagggatccatagtgtttaacttatataccaatcccatgcaatttgaaaggaagtgttattttgctccatttttcagtttcagaagaacaaaagatatgacctttttgttgataccacatggacaatataactaccaaaactctaagcctgttactactaatattacaaccactacacctacagctaacgaaatcatggcagattattgacgatataattatcaatgaaattattaatgaatattacccataacaaaaatgccaagttttcctaatttcgtataacagtatactaggaataattgtaaatttcatgaattaaaaaaaatatatattaaataaaattaaaataattaatttattatagaatttggcgttctaagatataatgagtaaaaaaattataagttttggatgttcaacacgttccgtttgtgataaaaaataaaatctcaaacttcgagcgaatctttgactatcattcgttcacttttagggaaaacgttgtgaataaaagttctagatttttcttttaggttttcaaacgtcttgaatcgttcaattccaagtaatatcaagagagttataatcaaaatatcatcaatcgtcgcagtaagatttcaaaataaaaaatattcaccgtagttttttttgggcattttaggaatttcaacaaaaatagaattaggtcttcatttttaaaagggagaatcgcaaatttgaaaggagaagaccttttaaaacttagaaaaacatgaaaaagaatattggagatcaaactttggagcaattgtagaaactccaaatttaatttcttctcttctcttttaagtttctattttattatgtttctatagatttgattataaacttgttaatggagattgttagctaaattccagtttggtttaatggagattgtttgaaattttctatggatttatgttattttgatttctttcttctattgatgtatgatttattcatatttgtgcttattatatgtgtttgactgaccatcttatgcatgatttatgatttcaatataaaatttgaaaagtgagtattgagaattctctaattgaataaacacaggtttcacacaaaacgagagtacttgtgtggcttatgtaatttttgaattattgcttaatgctgattatatgtttgttatgcttcaaaaataaaagatattgtcatataatttagattatatatatcttaatcagaatataaattatttataatccgctatcatactagatagaagaagaataatagtttgcattattaaaataagaaatggaagcaattgaaattaaattcccaaaaattttatttcttgattaaatcttgtttattattttttttatttaaatcttgtttagattatttaatttgacaaactatttttcgattgccaaataaaaacaagaattcaattaattggtaaatctcatttacttgagtattgcttgtaaagacgatacgtatacttgtgtattgatgttagactatttttaacctaagttttaggtcactttttatagttatttttcttctttattattatttttggaatagaattacgcttattttctttggtttcaggtttcacatttggaatgtataaattgataaaatattagaaaatgatgtataaaatagagaaaaatttacaagaaaatacaacaaaaacttcaagcctgaattcgattatgttctgatcagattttagaaaaagtcaaaatatagaagttctagatctctttttatcttttacaacgcatcctgaattagctcttttagagtttgtatgtaaaaattatgtatattttactgagagagatcgaagcaggaaattgaattctggtcgcgacaagcccgttttcagttgtgactaattgtggtcgcgaaccgtgggtttttagctatacaatgtggttgcgactagtcttttatggtcacgacgagatgtttcgtacgtgaatacgggtctttcataatttgaccattctgaagtgtaaaattgatttctataaacgggtttccaatttttatccaatttattgagaaataaaaccctagaaacaaataaggaggttgaggaagtgagcgtggcgatctggatcaagttcatcatctaattctttcttttccctttttaattttttacgttaatttgtgtttctagtttgaacatggatttgaattttgaagttatgaactaatttctcaatttagagatatgatgaatgctgattgatttttactccaattagttaatgtgatttgttaatctttctttctgaatttttatgatttgttcatatttgtgttaatacatgttttagattggccacctctaacatgattcatgatcctactataaaatctgagaagtaaatattaggaatgctctaattgaacaaacatagatttttatttaaaacgagaatattcatatagcttgtgtgaccattaaattattacttaatgcaaactgtatgttaatctaattgagagatacaatagataatatatgatttatgactttaatgatctgaaaagagttagagttattttataatctgtcatcacctaaagaaagaagattaataaattacataataattggataattaaaacaacaggattcatattcctaatctctcatctgtatatgaacaattttattcgatttcctttaattttctatcaatttttattattttttctaagattattttgattaaccaaatagaaatataagtctaatttaatagtattcaatttcaaacttgtggtttgacctcacatgtgtgagtactacttgatacgtgctcttgcgtaactttacaattttttttgtaacaattggatttatcataacaagaatgactcattgtattgttgagcaaaactcacgacataatgctaatgtagtattttttatgtaccttgcaaatcaatatagttgtgttattattaccccacttccccaacttgcgtatggaatggtatacttggtcaccagagatgaggcctgcagagcttttcttccaaatgcatttgcttgcaaaagaatccaagaggtggaccagactcttctttggataagggctgttcatactaatccctcttgtatgagatattggaaggtgttgcagaagatacttgattgattaatgatatatctatgcctttgtagcttatcaaccttatcgatcattatgtttatataaattatattaggtgtctttgtaaatttatatcaaaaacatagacaaatcagttaatgaaattttcacacatgcacagagctgctattttttcttttaatttttattaggggctatatgtgataatatataattcaaagattgactagttagctttctactaatttaagagtattgtatatcctcattttcaatgaagcttagtagaaaaaaaaaatggttgtgaattttagatgagcttcgattgttgtaagtttcaaaattaacattttttttttgttgcttaaattgttgatgttggtgttgccttggtaatttggctactaaacacaacaagtctttgtaactttaaaatggtgtgacaaaattatttgaaaaacttatgataaagtaactttatgaattcatcagctcccatattgtataaattttttataataataaaccaattattagcactagccatgaaaatctcaatctctttgcctcaatggtaactataacactttccaaccatctttttaaattattagtgttcattttccaaattttgagaccatattcagtgaagtcctcataagacatctgtaatgccaaggtttcttaatattatacaatgaattgagattgtggatggataattaacttacactaatcccatgcatttgaaagatttgaaagaagtgttattttacttcatttttcagtctcaatagaacaaaagatataatctttttcttggataacactaccaaaaaccctaaacctattactactaatactacattaaccgaaactaaactaagaacactaaacatatttttggccatataattatgaatgaaattattaataataagagtatacaagtcaagtcaatggaatatattcgtgtgttttcccatttttcattagcacctacccttttgttcatcgaaaataatctgtcacatgatagtgttggattgcaaatcgctagttaatggaatcaacaacccccggccgcctacttccattgctttttaaattttttttgagaataaaaccattagaatctactggttacttgttttgttgtaagtactttgataatggactatgagagtccatcatccaagtttatattacaaaaagagctataatacaccaaatcattaaatcaacccgaaatcattatagaaagttctaatcaaatctatataagcttttttatttatttatttatattttaaatttctcaaaagtaaaatttagtgaaacatagtaaatttttatgaacagagagaagaacgagtggacaccagtaagaatagttatggcaatcgaggctgatattgagcaaaagtaaggtgttattgatctgaaattgctacatttagagctttgatcaaaggaggaccaaaacattgttgaccattgaggttggcttgaatttgttgataaggatcggtcaccgtggattgataccatatcagagttgagaaacaagaaatgaaataaggaacatttgaaaattattatgaaaatgagctaagtcagtttgtaatttagttcttatagctactaagctaaggtgagatgaaatcatttcatttgttttaaataattttcactacaaaacaaaacacaagtaaccaaaaagaattattttagtgtaaatttctgatttttagagttgatgcatgaaggaatattctattgacagaatatccaattttttttttgaatttgatgcgggttggaggtaatgaaatgaaaataatttttattttatttatttatttatttgtattttaaagtattagaatatcattctaatagaatgttctttctactattttaatagaatatgaaaagagattattctaatgtaatatgaaaaaaatttaataatttttttatcaattttttttgtattttaaattttattttattccattttattcttattttcattcttattcttatatttctattcctcccaaccaaacgccaccttaaagcttacaataattaatattaaggagcacacaactagcatagcattttcctgcattgatactaaggtggcgtttggttgaaaggaatgagaatagaaataaaaatggaataaaataaaatttaaaatacataaaaaattgataaaannaattattaaattttttcttatcatacattggaatggttttttcttccattttaaaatgaaatagtcatttcaccaaaatagtggacaggtcattctattggaatgagattccaacattttaagggtaaataccattttgnnnnnnnnnnnnnnnnaaagttaccaattggaccctgtgttttgtt

SEQ ID NO: 36669 - DNA, 3261 bp, Cannabis sativa
  modified_base (94)..(94): a, c, t, g, unknown or other
tttttttctcaaccaaaaaaaaaaaaaccttgctttaaaaaccctctctttctcctcttctcctcaatatctcaatctctctctctctctctcnctctctctctctctctctactttctcactccaaaagtcccatttcttcatttccaatccatcaatggcggaaaccccacatacccacatagtagaaatcccaacaatggattcagaacaccacaaaaaaccatgtttatcatccctaaaaaaccatcctttaatggaaatctccaacagtccaggccacctcttactcctcaaactttaccaaagacaagaacatctctacaatcatagaataacccgaaaagaaacccgattcgattctatcaaagaagaaatatttcaactctgttgctcattcttcttattccacacatttttcttaacccttctgttcacttcatcactaaactcacaaaaacccatttcagtgtgcaagaaatggtggattcctagccttgtttcggtttcggtatcgattgtgtttgtttttcttgttcataccaaactttataagttatggaaagtgtggaatcagttgttgagagaaaggaatgataatagaggtgtgaataggtgtattcaagaattgagaatgaaaggttcaagctttgatctttgtaaagagccattgttgagtgggaagagaatgaagagctctagtgttgagattaaatggaaaccagttacttggtgttgtcattattttgttactattttgcttgtttgttttgcaggttttgtttttcctgcttctaaactcattttatgttacttttgagcttctttttttggctatttatgtaacttaattcagatttggcttggcttcttctcttctcttcatgtaagtatatatatatgtatgttcattattatcatgttattataagttggaataagagttgaggaaatgctcatttttaattgcaatattttgtagtatgctaaaatggttccttataagttggaataagagttaaggagattctcatttttttattggtatatttattagattttgattaaaagagaactagttattttgcatgattattttgcatgattatgctaattctcatcataatcttaggatcactagttacttacaatttaattgtactagcatagtctctaaattggttcatttcatgattttgttcttatactcaaaataagaatctctgaatttgaataaaatagaattttttacacactaagaattttgattatactaaaaatctaagtttgaagtgttttatttgttttgtgtttgggcaggcaccaccaccaatatgtctcttccttgtttgaatgaattcttcttcttcttcaagagcaagaggggatgaagcattttggtccgatgattaagaaaaaaaagctctaattttgaagaaacaagtgaagattttaggaagtgagcaacaccacttgtgtgcttcttaattgagcagccaagccttttcacctttattattactattcttctgaattttgtataattattattgtttatttattaattatgagaaaagctaatggtataattattcttacccttcacacaacttcgtatgttttacaactaagaaaaaaatatagaaccatggacatatattgttaataacgactatgacaaactatgcttagtgtgtgttttcctccttgtaattttattttttgagttgactttgacaactattgaatttttattattagatgagattaattctaataatattagtgtgattatgaggggatgtggtattttatccaattcatagaaaataatcaaacaaggctcttgttttaattaaatctagatgtaaatcttaaaattgtaatttcatttccaaaaaaaaaaaagaaatttgattgatgaaaaatcagtacaacctttttcgtcaccattttgtggaaaatcggtggtaggttggaaatattttattaggatctacaagtagtatatttcattaacatcttaatattttagaaaaccatatttttttttactgccgcgcaaagaaaatattttattacaaatgaacaattgtttcacacgtaaaatcatgatgtataaaatgttcggttgttatgttttaattgcgatttaaattgctttatttgattgctatgtaaaaataaactatgagtgaaaatgtaaaaatgaaaaaatttcaagaccctcaaatttctaattagaagaataaatactagagtgaaaagaattgacagataaataaacaatctagaaagaattataaggatgtggcagataaataaacaaatagtatccacactaacatttttggttccatacaaatgcaaaatttactgcattttcttattctttctatatattatatatttgaatgtatgtacaaagaaatgagatcattgaacttttagtagtaatctgaccaaaaactatacaaaattgaaagtcaactagcttcctcaccaccatcaaaattgagctctaaaactacgtgagaagagaaaccagctacaaatcaaaccagcaacactttcggttcgatcaccatatcctcttcgagtagatcgcgccaatacaggctagaatccatctcctttcagaagataatcgggagaacaaaatcaaattaacctcttttactcgagtgggggtcgtctggttctgagtgtttgagttttgttcctcacttccattctgagaatatggcttccaattttgtttcgattccaagatgtttagtctagtcatgaaaatcctcgtatggcgaggttccacttgaagaatcactttcgaatggagtggtctcccttggtgataagggaggtgattctttctgttgggacgaggaagctgaaacaaaacaaagtatgcacaaaatcagctaggtatttttattttaataaatttaataacaccaagacattgactcaattaccaaaaccctgtcacggacttaaggcttagtagctactaaggagtcgtttggtacgaggttcaaacttgatgggaataggaatgtcaaactaattaaggagtcatgttaatcccctccaacacttaggtttcatattccctccaacactttcatattccctcaaacttaaactcacataacaaataccctattatatgatatttggttggaaggaacaaaaacatagctagataagaatgacataccaatactttaaaatgaaactaaacaaaagaatggaataaaa

SEQ ID NO: 36670 - DNA, 7733 bp, Cannabis sativa
  modified_base (45)..(49): a, c, t, g, unknown or other
  modified_base (3866)..(3866): a, c, t, g, unknown or other
atattattaattttaaaattatgatattaaaaaaattaaaaactnnnnnaaaattaacatacgtgacttgatatgtaacatctatctagtatatatatacgtggatgtaattctaaaaactcctaatacataaaaactaacaattaataatttgactataagtgagataagatgacgatgacaactttgaatatattattaatcacaaatgagatacggtaatgacattatatttgaaatgatatgatgtattttttatatatttatcaattactttttttttaatttctattttatgtgaaaattagtaatcatatattttttaattttttttaaaaaaagttaggaaagaaaatagcaaattttaaaatttaatatcaaactttaaaatttgatattattttctaacttaaatatcactaaacaaaataaaaccgcatgttccggtttgtttgctagtttcccaaataatagtcagcctttgcaatcgcacagtgtcttcgtaacataaaaccctaactccgaattttccagcgcaccaaacagtacccggattccctactcaagacgaaccctccttcattccaaaaaaaaaaaaaaaaaaggaaggaaaaaaatccagggtaatagccttcactcaaccctaacaatggcttcccatccgaacctagagtgccgcatgtacgaggctagatatccagaggtcgacatggccgtcatgatccaggtcaaaaacatcgccgacatgggagcttacgtttcgctcctcgagtacaacaacatcgagggtatgatactcttctccgaactctcccgccgtcgtattcgtagtgtcagcagcttgatcaaggttggccgcatcgagcccgtcatggttcttagggtggataaggaaaagggttacatcgatttgagtaagaggagagtttctgaggaggatattcaggcctgtgaggaaaggtacaacaagagcaagctagttcactccattatgcgccacgttgctgagacgatgggaatcgatttggaggtattttcatttttgataattcaatgatttataattcaagaacaagactcttaatttatttttggtattcctgatgtaattatgtctataggagaatgatgggttaatagtttggtttagttgctgggagaaaagaatgattttatactgaccataatatgaacaatgaattatttcaaagaagccaaatggttatgtctttcataggtgggggttaattcttaacacataattacgtttgtagaagtgtttatttgataagagcataatagtagtgcatttatgcatattgattttatggttgagcccagttttgtatgcctgccttcaagtgattgatttgattaaagatacaattgtttttattcttgactctttgatcaacgttatttttagcttgtttagcagcttagttattagaggtaccattctatgtatgattctaatttttttccttttaaccaatatttgattctttcatgccatacgaatttttttaccggtattattatagatatagatataggggttaatatatagatacagatatatgtatatatgcacatgcatatttgtttatacattatttttgtttcatttggttttctgaactcaatcacttgttgcaggatttgtacattcatgttggctggcctttataccgaaaatatggtcatgcttttgaggtgagtttttgactaattttaaggtgcttttggcttttacattgcagcacacagcctaattgattgaatttgcaggctttcaaaatagttgtgacagatcccgatacagttctaaatacactcactcgtgaagtcaaagaacttggccctgatggacaggaggtaacctttttctgtaaccttaggccgaaattctcaagttcatgtttatagctgctttcttctttttttttttttttaggtgactaaggtggttgctgcattgtctgaggaagttaaagatgctcttgtgaagaacattaggagaagaatgactccacaacctttgaagatccgtgctgatattgagatgaaatgtttccagtttgatggtgttcttcacatcaaggtctgttttgtttttgcctatatacatttatggctttcatttctaagtagtctttttgttatttattcatttatttatccttttcgacattttgtaggatgctatgcggaaagctgaagctgcaggcaacgatgattgtcctgtcaaaattaagcttgttgctcctccactttatgttttgactactcagactcttgacaaggtagtgcaaagtttcatttagattaatgactgtgattatccaaatcattttatgcatatttgcgaaatatgaaactgtctgtatagaccagctgcaagtaaaactcttagtcttaggtgaagttagcccttttacaccctttcttttcttttacccctggagtaatgactcctatggagagtctgtagctgtaaatttgtgcctttagactctacctcgtatcacaaaattacattaccttattaaaatagggaattaggggaatgaattagtgatagcaagtgattgcgtactattcagattttagtccagctatattcctccatttggaaagtgacaataaccttcaaaagaatcccagctcccattttagccttccttgaaaagaatcccagctcccattttagtcttaatttctgtaatgatattctatgctgttctttttctggctcacatttcagaacactagaggaagttatctttttccataatagagtttcattttagtttttattttttctaagaatgtcattttctaatgtgggcaggaacaagggatattggttctaaccaatgctatcacagcttgctcagaagcaatagagaaacagaaggggaaactcgttgtcaaggaggcacccagagcagtgagtgtcaatcttcttttttcttttagctatgttatgtttgtcggcattcatgtctcggttgagtatgaatttatcatcgagtcttctgatgcaaaaactggataacctgttgaatgctcaaaaatttaagtggttaatcttgtgtgatgtatcatcgatgcaggtgagtgaacgtgatgacaaattactggctgagcatatggctaagttgcgtcaagataatgaggaagttggtggtgatgatgaaagcgaagaagaagaagacacaggaatgggggaggttgatatcgagactcctggcattactgagtgaagaaaagaagaaaagtttagctttgaaagagatattgacacttattttttgatcaatttttagttgttttattttgcatttaatttcttttagtctttttcttgatcgatgtataaaaacctgtgatgagaaattacatccccctagttcttgaatgtcggttgacgacattttcattcaagattgagttatttttttggtcgaaaaagtctcgttcttttgttactcaataattgactgtgattattgagttttttatttttttttgggtgcctttatttttctctgaatttgcgagacttatttatttaatttatctatagccaaggaaactaggggcactcccataggatgcataatttttgtttgtttactaatctaaactgtaagccaaattaattaaaagaaaaagagagagaccacagtgatgaggcatgagttgaatatttggcatagtcatataataattaaaagccgagcctgtcgttaaaaagatatatttgttataatacatgttaattaagctcagataactatatttcgaaagcattcgttaaaagtaccgcgtattcgtccttttctctctctctctctctntctctctctctctctctccgtctccgaccgttactttacctgcttatttacccataccataattttagtctctctctctctctctctctctctctctctatttataattacagaggaattcagtacagatctagtttcttccaatatttggtcagctgatttatttaataaatgtcgttttccgtataattgacgacaccactcatttcaggaaaataaagaaaaagaaatggcaatctcagtccacaatctcttccaagagagaaaatacccattcattttcgcactctctgttctcctcttctgcgtcatcttcctactcttcaccaacacaatccaataccctctcttcctctatcccgatactcaatcccgaccccttgtttcactccctgtctccggctcatcttctcaccctcctcctccgtccgtacaacaatccttcaagcttcccgattcagtaacaccttttgtcccgcctccgccgaacaacgaagatgtcggatttctccgggataacgctaccactacttcttctgacgatgggggtttcgaatggaagctctgtcgagatcccgaggccgtcgattacataccttgtttggacaattacaaggtgatcaaggccttgaagtccaggaggcacatggagcatagggagcggcattgtccaaatcctagtccaaggtgtttgtcgcctcttcccaaagggtataagatgccagtttcatggcctaagagcagggacatggtgagattgatacttcggtaagcttttacatatgtctatatgtatagaaaaactcgactcataattcatggttttgaatcgtttgttactaattttgatgtatatattttttaatttcagatttggtatgataatgttccacattcaaagcttgttgagtacaagaaggatcaaaactgggttcgcaaatcaggagattactttgttttccctggtggtggtacccagttcaagcaaggagttgataactacattcagttcatagagaaggtgacagaaacgaacaaataaactattatttgaatgcttttatggttcctaattcccaatcagtggattcatttcttgagaaacttaagcaggcttatattaccttatttgttataaaatatattttacgtataatgattgtaattgtgtttgttgtgctttagactttgcccctaattaaatggggaaagcacgtgagggttattttagatgttgggtgtggtgttgctagcttcggcggagctttgctggataaaaatgttcttaccatgtcatttgccccaaaggatgaacacgaagctcagatacagtttgctcttgaacggggaatacctgctattctttcagtcattggaactcaaaaactgactttcccagacaatgcttttgatttacttcattgtgcacgatgcagagttcactgggatgctgatggtactttgttttgactcccaagttcttttcaattcattcaacctttttcatgttttagttttgactagtgtggttgggtatgattaggtggaaaaccattgatggaactcaataggattcttaggcctggcgggttctttgtgtggtcagcgacaccagtgtatcgtaaagacgaaacccatcagaataaatggaaaggtttgttagctgaaacctatcttaatgcgtgatctgatcagtgagatacttacatatcagtattaatttaatacctggaaagttacaaaaaaatagactaaagctgataaagatatatgtacttgtttttcttgcagctatggtgaatctgacgagctctctgtgttggaaggttgttgctaagaccctttctgatacgtcaagaattgggattgtcatattccaaaagcctgtctccaatacttgctatgagaaacgcaaagaaaagaatccacctatctgtgacaatgaaaataggaaaaacaattcatggtatgcttccataaaatatctaacaatcatataaaatgtgctgctgctacttttcactgattgtcttcttattgtagattagatggtgtgtgattatggccttaaagaattcatttttctacacacttcttattagattacactgtgtgacaggtacgtgcccctaagcagttgtctgtctccacttccagtcgatagcatgggtaacatattcagctggcctgagccttggcccaagaggctcaagagtgaacctataagcttatcaactgaacaagatgcggtgcaagagttctacaaggacaccaagcattggtctggactagtttcagatttttatttaaaaggtctttctattcaatggtcaagtgtgcggaatgttatggacatgaatgctggttatggggggtaatctattcaatcatttagcttaaatctattattttccatcattaccccgtttcccctccatcctctttttctttcaatcttgaatctgcaaataataaaaactaaagctataaactaattttaagttttgttttttctcagttttggtgcagctcttattgatcaaccagtatgggtaatgaatgttgtccctattgatatgccagatacattgtctataatttatgacagagggttagttggagtatatcatgactggtgtgagtctttcaatacctatcctcgaacatacgatctactacattccagctatctcttgggaaaccttacgcgaaggtatttggatacctttttcttgccactctgatataaaaattaaatgcaaatcttagtcttattacatttctttagttgggttggttttaaagtctgcttttgttttcctttgtttcttcccagatgtgacatggtagaaattgttgcggagattgatcgcatattgagaccaggtggatatctactggttcaagacacaacagacacgatcaaaaagcttaagccaattttggaatcacttcactggtccttaaccgttcatcaaaatcagtttcttgtttgtaagaagggtttctggcgtccaagtagttaaaggggtatgactgattatttttactgaaaaatctttgtcccactcccaggtttatatgggtccagtgcaagtgtaatttatacaaggacgatagaacccctagcacctatttttgtttaccgcttataattgatatcctatagaaataattttacttcaaattactataattaatatatcttcataatttctttaaaaaataactgcccaaatctgaagatagttgctattgtgtaaacttaaaggaagaagaacttcttggctgtggagcacagccattcttgccattttttgttgtgcagtttggatggaattaataaacaggaggatctttgaaggaatcaataatgaggtagaagacgcatgggggaagatcaaattctgggttgcaattgcaactttggttttgagggcttgttttttcaagatctcactaaagaagtccaaaggttttgaggccatgtcattttaagatctcactagagaatgtggagttattttgcaccaagataatcttatcatggtctaagttttatttgattgtactgagagctttggtgttcatgtatttatgcttgctttcatctatttttaatttttagtttgttaccacaattttccttcgccataagtgaggcacccgaaaataaattttggacgagttgtcttagacatataaaattatggtgtaaggtttaggtaaaaactaagaaattaaattttgcaaattatatgaaggacacaccatttaagtttcaattatgcaaataaaacaatttacaattatatattttaattcttattttctttattttttatttttttaaatgatatgtgaaag

SEQ ID NO: 36671 - DNA, 5934 bp, Cannabis sativa
attaatgaaagtggtatttttcaacttacccctttttttattatttttgtgaaataatcccttcaaagaaggcttacagaagcccagtagtgaaggcccagtgatccatggagtgtttgaaaccgggtttacctaaacgaagcgatgcggaaaaggcaaaaataaacccactcctcttgcctttcttttcatctaactcgttctgctcagccacctcaactcaccatatctctctctcctcaaaactcacaatctcgctcttcccatatttacttttatcaaattattacacaacttcgttctttctaaattacgcgccaaaaggtactcaagttttccattccaaacttcatatttttatttccgccattctccacttcaatctagggttttctcccttcctcttctcctctctctccccactttcttacagctttgccgactcatcactctcttcaccgctacgtcatggattcggcggttgatacagagggtggcaaacaatttggggagacattaccagtgtcgatgggtgagaagaggccgctggagaatggggaaggtggaggattggaaagggaggaagctcagctcaacaagaggcctagaattggaggactaaagagagtggcagagattgtgttggtgttgtcgacgatggcgagcattcggggtgggaagaagcctacggaagtggaggttgggctaatgtcagaggccaggactaagttggtggaattatgtgaagggttagcgccgaaggacattgttgctagggatgcaattgaggcagtggttgaggatttggggcttaatgctaaggctaaggaccagaaattaggatttaggggaccaaggttgaccatagcagagaggttctcgcaaactaagcggaaggtacggtgtcaattctattgcttttgcagtgtttttcgtgtttagcttaatgatcctgggtagtctttagtgaaaaataaaatgcaaatttatgctaattagtgggcgggagtatggtaagaaaagtagattgagtcatatatgtatatacatataaagcttacagatttgcgcatgattattaatttgctaatttctttataagatgtgtaaaaataagttaaataactgtgtatgttcatggtatgatggtagggcttatacattttatgattgctgagaaaatgtaggaaagagactgtatctttgatgtgatgggtggctaagaaagtttcacaaggaagagacttggaacttttgtttctatgctgagttaattcttagttttctgttcactaaaaagttgaaagttaacttctacacaattaattaataattataaatcaattgtgctaattgcaattatttggttcgtagtactttaagttatcaggtcttgatttcatcattgttacaagtgttaactctggactatgcattgaaatttgttaccaccttgggataaagatattatcagcggttttattatgctttagttgattttttcaaattcattctagcaataaattctattgggcctttaatgactcacttcctgttatagcatttacaatctaactattttagagaatattattggatttggtgggatctttacaattgtcattattatagtgtatatttttatgttttagatggaagaatctaggaaatatgctggacaatcttctccatatacctctcattccctgcaaacaagctttaacacgggagccgaaagccgtgggagcccacatactctaagaatgatcccttcagataaacaaacttatctgccagtttcctctgtggccgctcctgcttctttgcctattggtcatgtctccacagcaacttcagcatctatgtcataccagttgccaaccagtgatgttagagcaccaacagtttctagtggctttattagcaataatttaggaagggattcaccttctttagcattgcctagaattgaaaggccccagttcaaattagatggaccaaatgtgccctctttggcatcacaaggacaaggtaatatcaaaagaaacactgtgtatttgtcacatgaaggaagaactggtcgtactttttatatgagaatattgataaagtatattacttcagtaaatgtttctactttaactgctattctgacaaggaaacattgtttgttatctacttacagtaaatgcttcttcaaatcatcacctagtgaatgctccaacacggtctgtacagacacaagctactaaaagtggacctgaacaaagcaagctgccaattccaacccttgtcaaggttgaaggaactggtcaaatgaatgtccaacgattgactacttcagctcttagagatcaaaactttaggccattaatttctcaaccagcctctgcaaatttgcctactatgcctcagccattgcaggcctcaaattttgttcaagctgcttctctttccaacagtcacaatgaaattgcaaagacagtgcagaagttattacaacccaagcttcctgatcatcccacatggattcctccatcaagggactatatgaccaaggctttgcaatgccaaatctgtatggtgactatacatgaagtggataacgtgcttatctgtgatgcttgtgagaaaggatatcacactaagtgtgcacagtcatttaatttaagggtgattcctattccacgaggtgagtggcactgttcaaggtgcttggcattaagcaatggaaaaccactgcccccgaaatatggtcgagtaatgagaagtaatacaccagcaaaaatttcttcgagcacagctggagctcagtcatcttcagagaagaaagtagaaaatgcaaatgtgaaggtcagtcagcaaatagtaactgcaaatggaagctctgatttacagactcctactcatactgatgttatggctctgggaaacaataatgttgattctgcagcagacccaaatcccaaagaaacacaaacgtataatttgtcatcaatcagtatggacacgaaacctgttttaggaagttgtgcaactgtctcaatgaaatctgtagaagatacttgtggttcttcagctgttgcttcaagtgaaagctcttcacaacttttaaaagactcagaaccaccaaaccatcaggagaactctctggaagtcaaaacgcagcctcttaatcatgcatctgacacttttggtgataatatggttgatccttcacaatcctcacttgactcttgtgttgttgagcaagcagatcagacaaattctgctgaagttgcattgaagaaatctcaagaaaataatgaaatgctgaaagaaacagataaatctcatttaattgaaagtactttaacttatgacaagcgagttgaacatgatggtgcccaggaaaatactgttggatggtctgcaactagcagtgaggttacagagcactctgggaattcatttgatgacctaaggtctgttgaatgggttggtaatgtaattcagaatgtcgatgagaaattattttaccagacttgttgtgtcgatggagtaacgtacaaactgcaggatcatgctctttttcggtctagtcatggcaaattgataccttcaaagcttaaggcaagaaaacaccaaatatttctactaaaattttaccagcaatttgatcttgaaatatttgaacttattacaatgttggatgagttattgatgttggttacctaacattggtgttgagatatctggctgatgtattagttgttttgggaattgtttatatcttttgacagcactaatatggctacattgattcttattgcagtcgatgtgggaggatagcaaaactggatcgaagtgggtcattgtcaatagatgctattttcctggtgatttgccagagaatgttggtcgcccttgtactactgacagcaacgaggtatagtatttgggtatatttatgtgcacattttatattataattgattgacctccgattttctctcaattctgaaggctggttggctgtcaaattagttagaactagaatgaattgacttagtctttgtatgtgtttatatatgtacatatatatagtttgactttgcacattctttttccattgcatcatatattaggatttctgtcttattctagtttactgccactctcccttttctgttgctgtattgtatgttaaggggaacatctgtagacagatattcacatcaacttaattctgttgtaggtgtatgactctaatcatgatagcaccataatggctggattgatcaatggcccttgtgaagttcttcctctgacaaaatttaaagatgaaaatgaacgacggagtcagttaaatgctgactctaacagtagacttcatccaatttttatatgcaagtatggctctttctctaactcaaaatctcacaaggactacttactgccgtttccattatgttttccgttttttagcatgactctctcatggttttcgttatgcatttcaatccaagcagaaatattttgctcaagttggagtcttaaaatgaaacatttttttttttacagatggttttacgacgagtttaaagggtcattccagcctgtttctggttgatccaggcatctcaacagttggctgacttcatattcttttgtcattggtgtaagaagttgctttcatctggtaatgtcgctatatcttggttgattaagggttcgttttcttgttctttgaagtgccttaccagagttgtgttctcaaaacccaacccatggcgactgcaccagtaggggtaggcctcaagtactaataaggaattaacattttcattcttgtaagatatgtaatttgtagtttgcaaccatcaccccattagagcagttgaacctgtaatttgtaagcccctttttgggtgccttgaattatgatcactgattacagtagtacatatcatcacataatttatagaatcaatgccttttggttagttgttgcagtcattcagcaaaaaaaaaaaagttgcagtattcctagctgcagtcttgcagagagcatagccaagtatcaatttttattgaccaaaacagtcaactatctgcccaaagagcagcgttacttacattttaaatgaaattttagatttcggaactgcaaaaatttgttaaaaggttcttcaagaaccaaaaatttaaaacttctcattttatatggtagaaacaaaaaaaatatagtacaagtttaacacttcagagtcagaccaccaaaaattaattattcgaataggaaatattctaaagtaatcaagcttgggaggaaatgatacacataaattagctatagtagacatgtatacaaagtgagaagtaatttataacaacattgagactgagttggcaatggaatgaaaagcgatgcctacagtttaagtaaattaattttcaagtcaaaactattatttgctaggcgcccgtgatctattctcattacaaaagtccaaaatcctaaatttcatgcagacctatttccaataaccctcattaatttaagctggtctttcctttctctctatctctcgataatatattatatagagctagatatggatgtattgtctatacatacacatatatctttatatttatacagctacagtgtaaggtttttaccttatatatagctagatacgttgacatctaagtcgacaaataggaataaatgataacagtcatgtcaccttagtcttaccatattgcttaaagtaattctctaaatcacaaaagatacagacaaagcaaagcaacaagttcaagcaaaagatacagatagtgtgagatattagatgcccctactaccctatatatgttttatacataaatatatatttatatttatatttatatttatggaagaggtttcaatggttacatttttattgt

SEQ ID NO: 36672 - DNA, 4348 bp, Cannabis sativa
gcaaatatactactccagataaaaatttaaggattttgagtttgaactcctactatcttattttttctcatccatcccctaccgagctagctttaattgctattattataatctcttagtcaatatttacatataaagttatatattgaaatattttctatagcggtattcgttatatagttacaatattatctctgtaaatttttaaaaaattctaaataatttgtaatttcgaaaataaaattcccgatacttcaatttactacacatatttaaaaaaatttaaacctatttttgatacagtaaattattagattttttttaaaaaaaattagtatactataagcataacaaaatatagccataattttatttttttttaaataatattagcatgtatcttcgaacatagaaattgactaaaaaattacaataaaaacacttaataagatttttttttcgctaacataatattaatcatttgatgagatttatatacaatatacaaaaaatacaaatatacaatatatacaaatatgtgaacttacatatattctaatataaagctcactgatcatattcttttttggctgggaaaaagttcaataatacagtcatggacatgtatatgtatgtatgtattttttttttcttttttaattgttattactttcatataaacaaaattattttttagaccaatttgttggaatcattttcctttctgaatgtgaaactgaaaagttcaaatttataaaattatattatatttatcttttttttttttttttacctcaattgataaaattctttagaaattatacataattttttatctttaaaatttaatattgaaaccacttataagactcgttcatgtaattgggtatgtgagattacgaggaagacaaaggttggattccccataccatataaaagaaaaatccaaactttaaacaaatttatgcaaaaagacaacacaaatcaaggaagattttaggttagctaagtagttttctaagctgcaaaatgcctatgtcacattttacatgctttttttcttttcatatacaaatgaatattttaaattttaccattttccaagtggccaaatatataataatttaatataaatttcttcaaataaatatataaatatataaattagacacccgggtagttgaggaacttgttcaaaacgaggaaaaactggctaacaaaagccaattattcaacacacaaaaaacataagaggtagatatatataaacaaatatagacataaaataacattaaaaaatgggccattctttgcttgtactccacatttggagactactgtttagtaatcttttttggcaatttaatcagttttggggagccatacgttaagcttgattgattaataaatacaaatacaatggaatcattcctcaaccttattcttattatttaatattaatttaacaaaaagaattgtaatccagttgtctgcaattttgtgactaaactaaagtggtcaaatctatccacccacccaaaacctcattcatgatcagttttagccgacaaaatcaaattaatattttcatttggtttagttaatatgttttaatcgtggctggcttcaactctttattttattactaccattaagtgttctttaaaaaaattaaaaagtgattggcatgcaataagcatgattaccgaaatggagtataataataattcgattatagattattagtaacttttgcaaggtatacttctaactaataaagagtcgttaaatctgaaaaaataaatttgtaatcacatttaatttgatatcctcgttaaaattctgaacaatctatttagaggacgttttacaaaaacaaaatattttggttcttttgtcaaaaaagcatttgagttactgatcaactaatctaaattatgcacgttatataaagctatttcaattccatatattatgcaaacgaagtcccataacatggggtgttaatttcttatataattattaatttatagtaaggttcttatagtatgcattatttcatacaatcatataaaaaatgtagcttgtttggtcagctgcaacaataagttaatatatataacagtgttaatcgttgttactatatcaacttttattatttttaatagatgatttgtagctcaaatattggacagtttcttgagtggaaaacattgaataacaccggcctagattagattatgattataatgactaattaaaatgaatgaaagaaaaagttgatgaagtaggtgccaatgcatgccatgccgggtttggcatctttttctattttaccaattgtttttattaaatcaaaagcaatattcccttaccaaggttgaactgaataaggttatttctcatatttacatatatttttaaaactagtctcagacgctcagtagcatattatttctatttcattttggttaagtaagatgaaatgaaattattcaattggaaaaatattaataataattaagaaaataatcaatcaggttaagtataggttttagttgataatggtaataaaattctttctgaagttgcattttagtcccagaaaataaaaaaaaaaagatacttgttagacttgaatacaaaatctacaaaggaatttaacatcttatgcatataactatggatatggagatgttacacacaacatataacctttcttttttattcttccttttctttacagtaacttaaaccaactcatataatgtggttttattgtagaaaaaggaagaaggaaacaataaagaagaaagaaagaatcaaaactgatacattgtcaaaattcagcctgatgcccttctttcatcaagattcaagaactggtttgccttgtattttttcaagttgaaattcgagcctctgagttgccaataattgacggtaaaaaaatctctcatattggtgtatatgcacacttgagaagtattcttgctatggacttactaaagctccttaacataggatgaagaattatctttcaagagggaaaagttacattgataatacacttcacctattatcatacaggcctaacaatgcctactattatccccttagtccaaaggactaaaatggtgtaaacttgcacagacctaaagaagctcgtgaccgagcaagacaactcttcaactctcctactgctaaggtttgaagaagctattaaaccagtttttcatgaaggtgttatatttacatgttgccatcccatctttgaatacattattttgaaattacctttcatcatatctcacattgtcatctgtctatttctgctaaaagagcaagtagctcattgtcaatgaagtgtgattttttgaagagcttaagaggagtattaccttctctgtcaatgactttccgattagctcccctgcaattagaagttggtaagaaatacttgggatgcgccttatgacagaaacaacatttaacattcaataagaaaaaaaaaagaaatggaatcaaaatcaagtgagtataaaagtatacaagacaaacttcaaagtaaaagactggttgggaaacccctgaatcagagtagaaactaaaagagtttccaagtccacttaattgcataattcatatgtagatataaaatataatgaaatgtgtgtagtgtagatggtgagtacagaatcaagtgccattttccaaatcaagatgtaaatgcattaagctgcaggcaatataaaggcagacaaaatacacaccttgtaataagtaatttcgcaattgcatactttcctctgataatgcaataatgaagcggggtctgacctcttgtatcagaaacattcatgtttgcaccatattgtaagagtagttctaccatgccaatgtcagcagttatgcaggccaggtgaagtaaagaacagccttcggggatgtcctctataagtttctcatttttttccaatggaatcaaattagttgtggaagacttttcccgagaattatctgcaaagcaattagttagtgataacgactttcttgcttttgctaaatgctctacattgcaggctttaaggatgtacattttagtgcttgtccaccgctggtactattcacatctacgtcagtgcaaacaatatatcggtagacagctttcttgtcattaacacagacacctctccacacctgttgctccaatggataaagatttttattatctttggcttggcggacaaaagctttttctgagtactgcaattacagagaaacttgcaatgaatctaagtcacaaactaacaaatgttaatcactttcataaaagtttatccgctta

SEQ ID NO: 36673 - DNA, 3606 bp, Cannabis sativa
tagtttttattaactgttaatttcctttatttagttatttgcttcctactttcactatttttcttattttaaatttctctcttcatcttcttcaaccaaatagaagtaaaagtaaaagtttaattttatagtactcttaactacaatcctcgtgggatcgaccttactctttgtgagtctattacttgttaacgatacgtatacttgcgtgtgcaaattaccacaacaaatattgttcaagattatttttcatctcttttactgccacgaaaattaataatactgagatgcaagaggtgttggatgttgtacaattaatgtttacaaggaagatgaacgctaaattgtttgaagaattttcggaggaagatgtagtaaaggcggtgaaggagataaacccctcaaaagctcctgatgaagatggattacctgctctattctaccataagttttggagcatgcttctttcaaatgtgttcctggttcgccttctttctcaaaatcatggagctaatctaaaatgcttaaatgacaccatcattgctttaatttccaaagcagagaagcctgcacgggtacaggattttaggtcaattagcctatgtaatgttatttgtaaaattatttctaagtgcttagctaattgaatgagaaaaacattggtggtagtgattttcgagaaccaaagtgcgcttgttaaggggagacttatacatgataatgttattgtgggatatgagagattgcattgcatgagaaattgaaggtttcaaaatggaagaaaattagctttaaagttggacatggataaagtttttgatagagtcgagtagaggtacctttatggtatgatgttgaaattgggctatcataagagttgggttgaaaagattatgattaatggggaagttcaaggagaagtaacaccacaaagaggacttcatcaaggagactctttatcacaatttttcgttccttttctgtgcaaaagccttttctaacttgattcaaaaggaggaaaataatgatagactcgatggtctccatttttgaaggatgggtctatcagtctcacatttattcttcgcagatgatatcctggtattttttgacgaaaatatggacgaatgccaagttttcaagagggtattagagatatattctacaacatcagggcagatagtgaactttaataagtctgaagtttgttttgggagatatgttagggaaatggataaaaaaaggttggctggattgtttgatgtaagggtagttgacaatcatgggaaatattaagattttcgtcctttagcggaaggaataaaaagcaactttttgatgtcattaagaatacggtgcgaaacaagctgcatagttggaagcgatctatgttctcaatgacaggaaaagaattacttatcaaagccatcatacaagacatcccaacttacacaatgatttgttctcagattcctaaaaatacaatcaataaccttcataggttggctgcaaggttttgatggggatcatcgcagaaaaaagagtaaaatacattggtgtaagttgccagagttgtgcaaactgaaagagaataggggttggggttctgaatcttaaattttttaaccaaactttgctccctaaacaaaagggaggtgtataagatatttgtttgctttgtgtagtcaagcgttgagggcaagttattttcttaacggagaggtgcttgaggctaagtgtggttcgcatgcttcatttgtgtggaggtttttggtgtgtgaaaaaaaaagataattctaaatggatattggtggaggataggaaatggaaataatgtgagggttctagaggatccatggatcccgaaacctgttagttcaaaatttatgacaagcctatcattccaccagagttgtatgttattgatctaaacatcaaagtgggcagtgggacagggagtttgtgaaggatatctttaatgatgaagatgttgggctaatactgaggttactgagctctaattgggagattgaagacaagatcatgtggcactatagtgaaaatagggagtattcagtcaagagcggatataaaatggcttgtgagttgaggatatgagaagaacaatcgaatgaccaagttacagtgtggtgaaagaaattatgaaagatgagaattcctccgaaggtaaagcattttatttggaagttagctcacattggcttctaacaaattttgctcttgccaagagggaactttattctcactgtctaagatggttccaaggtggtcaagagacaaattttcatgcactccaggaatataaacacaataaaagcagtttggaaattggaagttgtgtggacttgttaaacaggtgtgtggagattgggggtgggggtgggggtgatgcatgcctagacttgggaatattgtggagtggtgcactaaatattatgcaaactataaagatcaggaaaatactcaagtgcgtatggcgaggagggggggtggttgttctagtttgggatgtgtggtgaggaatagtgcgggaagggtgcgggaagggtgtcctatgcttctgttacagcgctgcagcaagaactaccgcctcttcagatagagttacgagcaattcaagagggtctgcaagtggggttgggtctgcaagtatggattcaacaacgattttaatattttagcatcgaatcaaattaccttgaagctatgcaattaatccaaaacaaggaggaaagttgatggcatgctaaagaacattcaaagactattatttgtatgataatgttcctgaaatttctattgtgttattattgtatgataatattcctgaaatttcaattgtgtatcgtgaagctaatcaagtaactcattattcaaccaatcaaacttttgtgtaagtcatgctctacaacttcacttacctaatcctttgtacttgttttgtaattaaatgaatccagtttcaaagaaaagaaacataaactcctagtttaaaaaggattgataataaaagcaaaaacgccacacaagttttaaggtgactttgaggagggattagcctgtgaatcaaactatgttttcttaagttcttgccgaaaaacataaaattaaggtgaaacttaaaagcctaaagtcagaagatactactacttgctagttgctgctatactttgattaaatatatactacaattaagtagctactacattacatttttcttttctgatatacttgacaggcttgaaacaatttctttcgaaaattaaaaaccagcgaatcaaggctgggctctgtcagtattaatagcccctctttctttttttagttttaattttttttcttttaaaaaaaaaaccatacgagcctgatacaaacgagcgaaaacccggcaaaaatcaaacaaaaaaaaaaaccataaaataacaaatcacatcaatgtgggttacgtgtcccttcggagatcaactacaatcacgctcacgttgtcagtactgtgcctagccagggctaacttagtcagcaacattgacgcatccgcacacgctttatcggcaaccgccgtgtcggctgccgggactttacttt

SEQ ID NO: 36674 - DNA, 4824 bp, Cannabis sativa
taataagctcagaaggaaattttagtgaattagtggagattttgacaagtgatgatttatataactaaagttaagagttagaacttaaagtttcttcatacttgtaaattaataagcccagaagggatttttaatgaattagtaaagattgataaagcttgttaatcatttataattttaatgggatttacttggtaatatagagttgctcgtgaaagaaaggagcgtcgtagattatgggctcagagaaaaacaccaaaaaaaccatctcaaaaggttgaaagcgttcaagatgttccccagaccgaagacccaagcgaacctaatggtagagaaggaatgctaccaagtgagattgttcaagttcttgctgcccgtgagaagtatgatgctctattctataataatatacctatcatacttttatgattatagaagatggtctaaccaaatgggtcatcttaattgttgcagacatgtgtttttatcagactctgaggatgagaagactgaatcaaaggaaagttctaaaaggaagaaaaaatccagaagaacatcaggctcagggtgagtactctgtatctttggaattttggctttaaacccagaaataatctctgttagtattagctaaaagctattcattttagttaaagttggtgtttaatcatcttcttgtactgagaacacgtataaaatgagagtctcagagttatgcttttttactttcaatcgtagtaataattttttgaaatatgatgtgtgcagggtggagactgttatgttgaatgaaataccatcggctcaatgcttaaagaactcattggagttcttgaagaaaagaaaaatgcaagtgccaagatcatttgcagtgttgaataactccaaccaagcattgcgcttactttcttcatctggcttgttaaaataaaatttgggcaatcttcaattttgtctgtttttcttttaatcttttgctttttgtatgttatagtttatgtattttgttaggtcatataagttacgtttttctcttctttttcttttctaagatactttttgctccaccaagagcacatttttgtgactgatgaccatttcgaaaggctttaaatcgatgaatgaccaattttattatctggctctactcttcttcttcactatctttggatcttattagcttagccttacattttcttaagtaaactaagtatatatagagcaatgattttcatctcattggagtttgaaaggttggccctaagttcatgttgagttgcacgaaaggtaaattttcaataaaaacataagaaaacaaaaaagagcccactttcttagttctaattcttattacattttaatagctactttctctgccactgaatccacagccatataactaattgaggttaacttaagtgaccataggtgggtgtgtgttggaagtcctgggttttagttcaagtaaaacataattgtatataaaagcttaaaagaaaaaaatccacagccatatattttattggtgcattaaagtgaaaaaccattcaagcacttttgttgtcttttttcttccaagtttgctattacataaatatattgctagaataacatctcaagacacagaagcattaatcattacataaatatattgctagaataacttacttatacatgatatgctcaaaataacatgttgggattcagttcaatacaactacatatatacaatatagtgatgtacatatatttctcaataaattgtaaatgtgttgttgactagtttagcttagcccttcaatcagaacttaagaagcaatatttagtaactcttttcaaggagaagaaaaattgtcattctggtcaagccacttctgctcattgatagagttagcatcagcttggccttgaaaaacacttgtgactcttttcaagcacttgtgaagacgaatacgtctcaaaacaacatctctatttagagacttggatggtttgaggtgtagctcacttgtgatggtctcacttggtcctttggatttggatttggagtctctattatcaaccaatgtcttctgatgatcagtctcagagaaaacaaaagccatgttttttttttgcttggtagtatagaatttgagaagaggaaatgaatgaaaaagttaaaaggggtgagttgagagtgtaacaagagaaaatggggtcttatttataggaagaaaaaggaagaaagagtgttcatttatttattcatttaataacccataaatatataaaggaattattagtgtgagtggtttttgggcttttctgggttctcaaagccagtggttttagagtcatgtgtgtgtgtgaggttgacacgtgggaaggaagcaaagctggtgtggcaactatagtataatatgcattctaaattaatagcgatattgacacgtaaaaatgtattaaacaccactaatactttttaacatttctaataccactaattctctaactattactagctaggtggacaataatgagttatgcaatgtaacacacttcctaatataaattaaaatataatattatttaactatgtaattatatatattgatcaaagaagcagaaatgtttttttaaataggtaaattaaatataatttattatataaatataacgtttatagtcctagagtaaaatcattagttatttataataaaaaaaatttaacaacaatttcaactaatagtgcatttagaaagctaccgtataattaaatttaagtgtaattaaagataattatattgtaattgtataattaaaaataattgaagggttttaattattttctccaattctcctactccataaaaattaagtgtattatattatgtaattactaaaaattttatattttaatatataattaccattttatattcctattaattatactacctaaattataaaattactttcaaatacatcctagaactctaataaactataaattatcaggcatataagttaattattacttttaatgagttgtggtgtcaatagaaaaacaataaataaaagacaaatatttaaatagagataatataaaatgttcattaattatttctactttttatgtttgccatttatgtgaaagaggaatgggtgatatgtggagatttctggttatgttttttatagtgctccatatgggctgattgtattatgaaaatatatataatatgttagttttatatttgaagaaagtctaatcaatgagtgtcattttttggtgcatgaatgtgctatttttaattttaattttgaatatgatgtatgattcaataatcatcgataaacttaagtggtatctgatatctataacattattttttttttcacattattattcataatgattatttataaataatctaaaactaatttctattcactcaactctactacaattataaatatcactatataggcatttttgctcctaaactttaacatgtactaaatcataaacttttttagccgttcaaaatccccctgaactaataagattgttagatttaaggacttttgtttaatttcatttaatattactacttcagtgattatttatgtactaaatcatgttccccagattttaatatttaccaaatcatacctatcgaacttcgacatgttagatcatgctccctgaactttcatccatgttagattttttttactaaaattagataaaagtccttaaatccaacatctcaatagttcatggggcatttataatgaccttaaaagttcaaagagcatgatttcgtacatgtgaaaatttggaagtaaaaattctaattaacccatttttaataaaaaacaaattaataaatgcaagaaggtgtatataagtcaaaattccaaaaatctccttcccaatgtaagagaaaaagaacatagtttgttattgaaaaacatagtatttctatggggcatcaccaataccacttaatgtgacatgaatttaataattttaataattaaaagatttatatcattttcgatcattaatttaaaatagttacaaatattatcttatattttataattgaacaatgttattgggtatcagtagtgtgtagcaccttcgaatgtatcgctttatgattgactaacgatactctctgatactatatgagacttgatacttagtcaaaccaataacgatattaacatgtaggaaggtgttagacactactagtactttttagcctttttctttatagtttgtttagaaaaaaaaaatgataaataccccacttcaaatttggttaataataagctcaaaacttatataaattttcataattatgatctatttagtagctaagctaagctcatgagaggagaaaagaaaacttttttttaaggatatttattgttcttacattattaaacaaccaaagggaaaggtggtttgagcataccagcccttagtatttttttcattttcgattcttatggctcttgtttgaaagaattgtgtggagagaaaagtattaaaataaagattttatcatattgtaaattaacatatattaaatgtactagaaaattaataacaaagagaatttttttgtatgaataacatcaatgagaattattattaagtaccttaaagtatttaatatagccaatatgccaagtacaatattaaaatgtaaataataatgtgttatctcttatgacattttacatgtaaaattaaccctaataaaagtatttattgagagaacaaagagagtgtatgctgattcatactgatgccgagaaagatta

SEQ ID NO: 36675 - DNA, 3671 bp, Cannabis sativa
gaaaataaattgtatgttcactgtttacatagaaataaaatggttgaaaaggtgtgacctatttttcattatatatataaattttttcagtaatgcataggacaggtgtttagtggaaaggaaaggaaatgagacaacagattttagggccatttcgaccctttctctcctcaaacaagtctcagtgtctcgctcttttaattttcttctaacatttttttgagccgacctggttgtttaagcggcttcccttcagtcagttatttatatgaattgtgataactctttcaataccttttcttcctctttcttttctctttctctctctgtttttgctttctctttcgttttattgttcatcaatggcgagaccatctattatgttatcacagccatttccacgaatgatgagttctttcaggtacttattattatattttagttctaaaatcgatcatgaactgtttctctgtggaattttgctatgtttggttcggagataatataagtaaaatccagagatgaaaatattgaagcgatgctaattttttaaagtgcataaaatacattgaagtatcagtgcttagttagatactagttttctggttttgattctgaacatttatgtttgtaaccttgaaaagtgatttttctctatatttgctcttctctctagatccaatactgcaatacatgaacatggactcaaacaatccttttctcgaggactctcctctcactctcaactcggcgtgttttatctgagcttacttgatgatgttctgacaaatgatcaggttaattttaatctcagtattcttcttattgcaatgtatcaaatcaattgaaatgaaatagaagggaaagaagttttcagctctatgcatctctttcatttttgtttatagaagtcagtggtcagtcactattaactattggaatttgctttcggtagattaaaactataacaggagagaagtgtccaacaatccttcaattgcaaattagtgcagtagtagtaagattcactagttttagtggataagagttgcaaaaagtcatccaagacaagttgatgaaaatagaaatttccttgctagctaaacattgtgattgtttctacagaataattttttttttttatttttctttcgtgattgtttcaggattgcatagtgtgttgcgaagctgtgctccctgctcaaggcactggtatgtttaaattctcactagctagtgactgaattttatatttctttgtaagttatcctattttttcaataggtgtgagggaattttgtgcgggtgtgtggtgaactatgtttacttaagtgtggttgctctaagaatttatatatttggtaataatatatttttgttttatacaaatggatatatctatatttggtaatagatgggacggatcctcctccattagatgaggaatcagaagacaacagtgaaaatgaaggaggagaaggagaaggggaaggagaaggggaaagggaaggggaaggagggggggacggttcttcatgggaggtatatcctctgttttttctttataaattatctattaatgcaattttcttaataaactataatgtattttttttttattattttgacataagctacaaatgtaatttgtttgcagcctttcctgaaaaatagaagtataagtaaagatgtggttattttaagacatggtgaagaggtatctcgcttcgatagggacacatgaaaagatggaaatatgtgggttttgccagagctgtataggttatactgtaaaagagaagacattccaatacctaaagaagaccagatggatgtgaatgttctatatccatggccctaccataaggttttgtatagaaataatgaaggtggagtgcttagtcctctacgccatggttggatgatttttggtgaaagtttgagtgaggtggagtttgttgaaggagcaatggactatgttcaccgaattccaataatcgaagaggaggatggaatatttcaaagatactttgaattgacagaggaaattagtaactaccgttcatttttgaggggtctccatcttcgtctgtctgccattacgggccattaacttgaatctagaaatcactcttccccttcccacttaatcttaatgtcttgcaacgaggctatgaaaccattaaactcaagatcatcttcgccatcatcttcgccaactaataaattcactaatcaatgcattgaggcaagtttctcacgatggattcttcaacagtttactctacgctctttagaagatggctctccaatgcctgtgaaccaaccaatattacaagaatggattttagttggcgaagatgatggcgaagatgatcttgagtttaatggtttcatagcctctttgcaggacattaagattaagtgggaaggggaagagtgatttctagattcaagttcatggcccgtaatggcagacagacggagatggagactcctgaaaaatgaacggtagttactaatttcctctgtcaattcgaagtatctttgaaatattccaccctcctcttcgattattggaattcggtgaacatagtccattgctccttcagcaaactccacctcactcaaactttcaccaaaaatcatccaaccatggcgtagaggactaagcactccaccttcattatttctatacagaaccttatggtagggccatggatatagaacattcacatccctctggtcttctttaggtattggaatgtcttctcttttatagtatatcctatgcaactccggggtaaaacccacatatttccatcttttcattgtgttcctattttccaggaaaggctgcaaaaaaattacatttgtagcttatgtcaaattacatccatctggtaatgcattagcaatttctgcttttttcatctttctatgatctttcgagatgttggaccttacctttttagtataattggggaagggtattagcacatatcttggagcagctcccattgttgaatgtttggaaaagcaccagcctaatgtagtaataacttcccgtgttgcagatgctgccctatttttggcgccaatggtatggattttgtttgttcgaatacaaaattaaatattccgtagttattatttttttttgaaggaattaattatccttttaagaaatttccaagttttgccgagtaagaaaagagtttttgttgtgttccatccaatcacattcattccagatattactcactgttttaaaaagcagtgtcacgttgctgtgtataatgttctggcgcgcatgcaatgtagcagtgtttcttcctttcttatacatctgtggaaaactctcactagaaattttgtaatattgggtagtgagatccatgaatgggtaattttatcaaaaaatttcgttccatctcttgattgtattgtaagcaacatagctagagttatgcttagtttctaaagaattcttctgctatatgaatagatatatgaactaggttggaactgggacagtttggaacttctagcacaggggtctctgtctggccatcttctagagtgtagttgtcaacttacagggggatacttcatgcatccaggtgacttgtgaacttagtttgatcgacctaaaaatatggatagttgca

SEQ ID NO: 36676 - DNA, 5122 bp, Cannabis sativa
ttgataacaaatccgattagattgtaatggattttatttagggcataaaatcccaacagaaatagctatgaaaactgcagcaaccaatagtagtcaaaataatcaaagtgtgacaagcatggaaatacaagatgacaaggaagaagaagagagttcagttcaggtggatacattgcaatatgcacatttatagattgatatagaagaaattgaagaagagacatctctaacagagtcacaagactatcaacttattaaagacaaagagaaaggagacagataaacccaccagaaagatttggatttgttgactgcacagcttttgcacttgcatcagtagaagaaattaagaggtttgtaccaaccacttaccaagaagctatcaattttaaaaataagaagaagtggctttttgcaattgatgaagagatggcttccctagaaaagaacaagacatggaaaacagtcacaaggccaccaggacaaaagttgattggctgcaaatggatctttaaagagaaagaaggttttccaggtgaagaagttagatacaaggctaaattagtggcaaaaggctttaaccaagaggaaggtattgactttaatgacattttctctcgagtagttagacagacctctataagaatcatgatgaccaaggtagcaaagtatgaccttaaaatggatcaaatggatgtaaagacaacattcttgcatggaaaacttgaagaatagatctacatggaagtaccagatggttacaaaagcagcaaacctaatcaagtttgtctatcacagaaatcactttatgggctcaagcaagcaccaaggcagtggaatttgagatttcatgaattcatggttagtattgggtataataggagtggctatgacccttgtgtgtattataacagtgaaccaatttggttactgctatatgttgatgatattctcatcattggaaacaaaagaaaagccatagacagactgaaacaaaacttgaatgcagaatttgaaatgaaagatttatgtgaagcaaagaggatacttggcattgacataaagagggaaagactagaaagaatatctctctcataaaggagctgcatacagaaaatgattgacaagttttgcatgagtgaagcaaaaccagtaagcacaccattggcacaatattttaaacttactcaaggacaatctcccaaaatagaagaagacaagatgcacatggatacaataccttatgcatcctgtgttggtagtctcatgtactgcacggtatacactaggcctgatctgacttatgctctaagtatggttagcagattcatagcaaatccaggaaaagagcattggtctgctgggaaatggatacttaggtatctacaaggctctatggatgtgggacttgtctatgacaacaagtctaagaatgaggttgaagtaaatggctatgtggattttgactatgatggaagcataaacacaaggagatcgatcactgaatatgcatttacagttttaggtggatgtattagttggaaagcaaacctacaaaaggtagttgctctgtcatcaattgaggcaaaatacatggctgcaacagaggccataaaagaagttgtttggctcaaaggtttcacaaaagagttggggttcaaatcagaagatataacagtgcattgtgagaaccaaagtgctctacacttgatgaggaattccatgttccatgagaggtccaagcatatagatattaaactacatttcataagagatatcatagctttaaaagaagtgaatgtgaagaaaattggaacaaaggagaaccctgcagacataatgacaaagtatgtgagtttagctaagtttaggcttttttctaaacttactaaacctcatcaaatactagatgaggattcaagactagttcaacctcagatctcaatgacttactcctcttttaatgactaaggtggataattgttgtacttggtctttaagtgaggaagttttttggctctaacagttttttaattgttttaactaactgtcagttatgacagttagtacttatccaaagaaccaaaggctatttatggccattctttcatgttcttttgggacagaaaaaaagagcccctctaatgtgttagagagcttcttcagagagaaaagaagagagaaaagagtgttgtattgggctatggtgtgcctgatccatagtgtcacaagtgagtttgatgtagattgaagctaggattcattgagaaattgtgtccgagaacacattgaagaacaacttcttgtaaccaattctttctaactcaataaagattaaagccactaaggctgttctggccgaggagtaggcaagtgatactcaatcactctgttcgaacctcgttactttgtgttgcatctaattttatgtttcttgtctaattgttcttagtactgtttttagttctttgtgtgtgtttactgtcgatcttgatcatttgttccatcattttgtttgtcttgattgtgcatgagttacatgatcgagctattgatcacatcaatattacttttcttagtgcaattaggtcaatgttttgttatttttttgtcgttttgtagttatctttttgttgttttaaggttgtttttgagtcatttttttttattttactgaaacataatatttttgtaattttaaaactttaatacaatatttttgtaaacttagtacaatcaaaatataaagaatgttggtgttccaatatttgtaaatttttttttctaatttttagtgtttttgtaagtttcccacaaatattactactaacaaaaaaacctggactatatggaactataaaggaggcctggttcaggcctttatcaatggcacaccacgtgtttaatgggctacagaggccttgggcttctccttggtattttccttttctatgatttgacttctttttcatttgactttgcataattaaaactacatgcatgagatcatttggtctcgactcaagattggtgccggtcaagaaaaaagatatgtcataccataataaataaatttattaacatattcgaaatatttacataataatctttatgatttagaatgggaaagatttgattttgtaataaacatcaacgaatgtacggatagatttgagatcatttatttaacaattagattataatacaaatgagagaatactaagaaatacaaaattagtgtgaataatataaaacttgaacaaataatcaaaacacaattataaaattaaataatttagagagaaaaataaatcaaaagccaatctaaaactagagtgtttataaaatatttaattcaattcaatataatttataaagtgcggatatttatatctttctagattgaattagattgaaaaatctaaaattggtatctatacttattagataagtaagttgtaaaagtaaccaatcttatttaatctatatatatattaaaaaaattatacatacaataaatattttattgtaaaaaatagtaatttaaaaacttaatacatataattacaaacttcaaagcttaatagattaaatttatattttatttttatttataaaaaaaatataatttaaaataaaattatatattttcttatagatattttttttttctttttttagatttgctattttttgttttatttattttaatttgttgttatgaataaaaaataataataatttattttattttattgttcattatttgaaaaaaaaaatatattttttaataattgctaaataatttaatattaaaaagtgataaatttaaaataatcaattcaatctgtattagattagattttagttattatgtaaattaaattatatttaaaatataaaattactccatacaagttaaatatatgagtaaaataatacagattagattaatattcatctaaaacagatgagctaatacttccaaaacgaattcacatgttccaaaaacgacaatgagatcatactataattaatttgactttcattattaaaagttgcattgcatcatttgaatatgtttggcaattatgttatgaattgtctcattgacatttttattttgggcacaattacacgtgtttttttcttaaaaaattaataagaaaaaagaaagaaaaagaagattttgagtagaagctgagagggtctaaactcgaagaggcaagcaaatataagaggggaaaagcgtgtggagacatgaggtaagcacgtggtgggcacgtgcatgtgtggacaatatagaaacggcaatataaacatttgttttgggcgggtgatccaatccaaccctacgtgacgacaaagctttgaacggcttctgttttcataattaaacaaatgcaaaatgagaccaacttcccataataggttaaaggccacagcatgaactacaccctttattactactaacttaagtactaatttgccaccttattcttttttaattaattaacatactaacttatttaatatacaaaacttataacagaaagtttatttcaattaatgtcattattaaaaaccccagaaaaaaaaatgtcactattaaagggtcgtaacatcacgagctttgaattacgtgataaatattttcatacatatttaagaatactctattcaagaataacttctaatttgttataaaaaaattaagtttcaatttgaaccagttataaacaagaataacctctaaattataattagttatacattttctaagtcccgtattaacaaagtatacatctatataaaaataattacatcgtaataaaatatatacatatatattattataaatttatttatgtaaaattaataattctattccaaattataatacatgtataaacattatatttactctaaaataattctattatgatatagtattaataattgtttattgttattattgttacattaatattttttggtattttaagttttttttttctactgtaactgtatttagttataacctctcaattagaatataatttacttggtcccaagtgtattattggatagaggttctactgtagtaatataacttaattat

SEQ ID NO: 36677 - DNA, 4308 bp, Cannabis sativa
tattcaaatgtttttggtatttatacgaacaatagttctttggactagattagaggacataatggcatgggagatttgatccattatgcctaattcttttacttcttcttcgtgttggtggttattactgttttgtttattgacatcttatattaattccaagtgtacttttgacagaaaagatcaaagactgcacaaagacttcaacgcttccaagagagtgattacatggatccaaaacaagaactttgtttaggcgcactctttgatattgccgcaacaaacgtcagcaaccttcatcctattacattattcaactttttaatatgttaagcattctgtttatgatattatgtacgatgattgctcaaatagttaaatattcaatttagggacttgattcgggtagaagactctgcatctttggattttgccgttccatagagatgctgagtgatgttgtggaagacactgttttggagcatggtggggaggtatgtttagttcatattccaaatatacttttttttaaaagtaaagaatggtggagatggtttttttaggaaagtattctttctcaaccacgcttaacatcaacatcttattccacaatgcaaggattagagaacaaaccttctactaaaatttactttcaatttgtcgaatttcccaaccttcaaatgacattattttggggttgtaaatttcatgcagtcacgaaacaatttctcttattcgttctatacttttaggctatgtttggaagttggattttggcgtggaaagaaaaatttaggaaaaaaaaatgtggggaataaaaaaaaaaatcaattttccatgtttagtatggaaaagtttgttgaatcaattttttttaatacaatttttctttccatcctaaacattagaatttttttattattattttctatgtttttcctctacattccttacctttttcttctcctaccaaaatccaacttctaacatagggttattgttgtagccatagaaaatacctttatcactttgtttcaggttcaatatgtacaggtgaatgaaaacagcctttgatggcctatacaaacatggttttggcatttcagatctggaaagattaatctaatttcctttaataaacattctaaaaagaagagcttaaatagttaaagctgaaatccacctaactttatgtacacacaattaacaaaaacaacacacatctttgtatcatcaggttaagatcttaaaatctttcccttttcaaattttcaggttgtttctgcagagaaagctatcaagggcggtttgcatgagaagctaacaatgactgttgcagtgccattgctttggggggttcctcctgcttctgaaacacttcaccttgcggttcagagtggaggagggattgtagacaaggtttattggcaatgggatttcttgtaaatgaattatattatatgtatcatattatggctaaccattatttgtgaatgttgtacataactatcactttcttctgtacaaactctaattcatattctcccatgtataaaataaaacccaattgttgtatttatgtatcactgagccatttcagaaaattgaaatcgcagactccatttgccacctgtatggcttggaactactgaagctctttactcactgattttgatgtattacttggattaaagggagtgaaatcagaaagcaactactcttagtggtaattttttttaattgttaatttactacaaatccaggaagagacaaaaactaaaaaataaaagtaaaaggtaaaagaggaagctctgcaagttctgtgcaaatggaagtgtttattactattacaagctttactcaaatgtcaaggtttttgaagctgataaatcagccatcttaagggaaaatcttgatattctaattctaattgtaattttagtttctcgttttcttttacgagtgagatttcttttaagttgttggaaaaaaggcaggccgatgtcgatgcatatataatatgttttgttctgaaaataatgtaataaaacaggggaagtgggatttgatgtaagccagccttttatatctaatagtatatgcctttttaagaattcgaacacataatattatattagattattaatgatacaataaaaagaaagatcttactttaattaatgctccacacactctgatagagattcatatctaactctaccccaaaccaggaaaccagccatagatttaaatatgaggagtttgaatttgagacatgtaacctagccaaattatacaaaagactactttttttttgaaaaattctttcaagactattaggctagactttccagctagagaaagaaccttcctattacataaaaggtctgtccagctaaaccacacttgaacagtaaaacaaaacaaaattaaatttgctttttagtttttgtgcaatttccatttttggtcttaagtgttcttagcttgttgtgagtgacagtaaccatttctttccatggtgatgaggaagggttcagagaatagagctaccccagtaagagcttgatagtatcatttatttatattattgggaaaagtaaattaaagcactgttaatttcttggttaatggccccacaagaaaaccacagtagatgaatgaatattaattaaagttagagacttgatcaaaaccaaattgtctaaagagataataaaagtctgaaactatgatgtcccatttaagcaaacaccccaaatttgattttatcatgaacagttcatctctgtttacatactaattaattaatcaattttactttgtgtagaaattatgagccaaaagagatgttcttggaaatttcaagggccagtaggaactacctttttgacatttttatcattgcactagaaaagacattctagaaaaactttcctcttagttgataataactttaaaagacaattgtactttatttttaatatgaactataaaatgcctttagctggcaaagctcaaatagtcttctctacttggagaagaaaacaaaaatggtgaagaggtcaatgcatttatttttaaacattgtttaatgtttatgcttttcctcattaaaataaataaataaataaaggaaattactttttatctcttcttgtttttttttttttttgcttaaattaatgacacactcaaggcatcattatccttagatcatgtaattttggagccctatggtatggactgcttccctatgaggattctccatcacacccattataaatgccttcaatcttgctttttataatatcaatttcccaagttgggatttgtttataaatttactccttttcttataatcaagtactctgtccctcctccctccataccgcacaagtcttaatcaaaattttgtcaattattgagacttggctcacatgttactatactcatgaaccaaacaataaaaaaatattacttaacgataacatgcagcctaatttttattgaagatttctttgttcatattttttcaaatacatgtcattatcaggctttaatgtattcaattgccatgttttgttttcttctactccaaatttgattctttatgagactttttagatcatatacaatatgaaatatgcaacttgtttaataaggttaagataaggattaaaaaaactaatctactaacaagcatattagaaaaatctaaggcattcacattaaggcttgaggattgaatagatcccttttgaaacaaaccaacgaaaaaaaaaaaaaaagaaggttgtaatagtaatagaagaaaatattactaattggagaaaaaaataacacattgataattgtgcatatacttggttttaaattccaagccattgttcttataaaatgtaaaatgatctaaaatagaaaaagatgatgagatatattctgactatcatgaaatttatgtctgagtgagtaaggggggcagttaactgtactcaaaacaacatcatttcccaaaaagaaatgcaacagagaggaaacattttaccatgtacagtccaaataaaaaatttaaaataacagaagtgtttactcatcagaattatgtatatgatgtccaagcctactacccctaccacctcccccacccaaaaagaaacccaagtccaagtctagtagtatcttttaaccatacccctcttcctttgccactcttctccaaatctttttgattgattttacccacagtcagcatcagaagtagtacaagaccctttcctccgctgtcttgctttcatcaaacaaaaa

SEQ ID NO: 36678 - DNA, 3302 bp, Cannabis sativa
atttcgtaggtgtgtctcatttcacggtggatcactcctttatatacaaagcaagtgcccgattgtttacaaggattgtattcattgctaatccgttcatacattgatttaataattaagctaaaacgtaaacattaataaatgaagaacagtttctatacactaaatacagcaacgcatgcgacttctcatatgcgagttggctgttcatattctggtgtaagctcgcgggcttaggatacacctaacatttaattaagtccgagatgtctgcgttcttgcatagtcgcgcctacggacatcgtataacgagctgatagaacctaaacatgcgagtctatattggtttatcgaggttgttgggtcatcgagaccagctcgctttatagagaatcgttctccatgttttcgcaggaggtttgagaggatactcgcatatatcgtggtatatgcgagttgaatccgttccttggtcccatatagtgtgagcctcgcaaatgcgattagactttggtcatgttcgcatcatctcgctgagtttagctcaaacgaggcttaaactcgagaagtctcttattgacaccccagctttccttggggaaattttgtacacgtgtactccacacaagagtctggtctcgagtttctaggtgagaaaaatatcactataacaagacttattattagtctactctctaaatattgcacaataacttgagaataattttctacaaaatgtatgcatgtaaaatcaaatttctgtaaataaataaacgaaggtgaggcagctttgactaagtccacttggcaaaataagaaaagatttcacgcaccacgttgaagcgcgtgcaaagtaagatttattgagtccgtagatgaaggtggcaactgccaagtcaagtcctcataaactgacaaagcagacctttgtcggctagcaagacttgacataacacgcgtcacgcgcttcgaagctgcgaaagggctcgatcaaactaacttggacatacgttatatattatgtactctcaattgtatttgtatatataaaaaatatattatgtactgtcagaccacaatatcatttatacgtatgaaaatctctatacagtatttttatacactcatcatactagggtagcagatcgagagagagaagaatagaaaagaaaagaaacaagggaatggaatttttggtgtgtggaattgagtgggcattttggcgtcttttgagagacctgtcttttttctgttaccaagtttattatattatttataattaaatatatgaaacaaaatttaggccacacaaagaccaacccaatcttactatgattattttgagatctctatactatctcacactctctgcatgtctctattcttttgtcaatcctagtctccctctcgcactcacacatgataaacattataagtacattcacatattattactaaatcattcatttccttttcatatatataatatatatatatgccctttcactctggcatgttctacatatatactagaacctaacctaataaccaaccactataatgctttgtccatctcatcaattattgggaatatgtacatattgtataataattataatattatagctattaattatctcttgaaccatagtaaatatatagtattgtaatttgtacgtgtatacatacatatataataatttaataatacgctctctttcttacattttggtctcatgtatatatataaatataaatatctttaaatatatattactacgcaaataaaatgatacctacaaaaatcattttatatatatatatataaatatttttctagaaaagagtggacatcgaagtaaggaaattatggcaccagaataagcaacactacttacaggaataggactaactagtaaagaagactacgctaattttgccaaaatctttggcttttataacatatatatatttatataaaataataagtatcaactgcctggacaaggttagccttttttgctggtaatttggatgaaaagcgaacgacagacacacacacatagagagagaaggtatgtgtgtttttcttttctctctcctacatctttgactaacatttttacacacatattcataagtatatatattatatgaaaaataaatatatgattgtcattatgaggcacattaacggatatgctcttattaattataaatgatatgattatgtgtgtatgtgagtttatgtgtgtgtaatatataaaaaagggttgaagttaagtaatcaagtggaaatgaaggcatatatatgcaacatctaaaactcaccataagagttgttggaataggatcatgatattgacatatactttgcaattttataatttgtttacttttactatatgtaactcttgaccagaatcaggatcgatgtgtttataccaattccttttctcttcttttttaattagagcttggtgtttcttgatctataaatactgtctagtatatagattactttttcttgaaaaaaaaattaaatgaaaaggttgtcttatatatgatttatattacaaatgtctttaacaagtgattaataatcgattcatattgcatgtaatcccatcacagattattgattattgatcgatagagaaacttattaacaaaccttataataagcagagatagacaaaaagaaaataatttacttgactttgtaattaataatgatttagttatcctacaatacacaacattcatgagactatatagctactgataggatcatcattacatatccacgtatacgtaatcctgtaattatttagtaactatgtatatcatcattatagcataattactgggcaaacctccggtaccaattgcgcgcaatttatgataatgtatatataagaagaaaataatgaatgccaaaaaaaaatattatctagattattaccaaacacacatatgcatggttatggctccaaactaataacttaaaaaaataaatatatatatatactaattatatatatgtctggaaacaatatattggcacaaatttatatagaactagattttattcattgaggatgggcattcattagattggcagacatattacattttgacacacatttatatagaacaagctagattgacacgcattattcaacagagatagggtaattatcaatcattaaaaatctaagtacattaaatcagatcagatatacgtacattaaattaatctcattttgcagtatttatacatccaatttcatacaacatgg

SEQ ID NO: 36679 - DNA, 4570 bp, Cannabis sativa
attttacatttaaagtttatatttatagtgtttattttgagatttagaatttatagttgataatttagagtgtatttgaatgttgaagttgaaatttagaatttacataagagatatttttttttattctattttttgaaaaatattgtatttgagttgtgagtttagagaatttgagtcaaggtagagattgttggagtttgactcaaattatttatttatttatctatatttgtaaagttacaagttttggtggccaagtttagagtgtcttagtgctcaagttttgtaactttataaatatgtgcttttgtgagagagattggtgtgtgtgtgagagaagaagagtgagttgtcgaaagaggtgtgagtgtgagtgtaagtttgtagagtggtgagagtaagagtgaggtaaaagcaaagggtgtattgggattcaggtggagagattgaaataacgagtgtgtaattttgagttataagtgaaatatatctctttttgtgggtttggtagttttaccaaactgagtaaaatttcttcgtttcatttttttattgtttcgatgggcttaacactctcaaatgcttgatatgtattctgttttcagcactttaataaagatttcttggagggatttcagcacttattttcgcaagattgagagtttgattctaactaagaaaatacttatcatcatgacacttaccttcaattttcaacatttttgtcatttaaaaaaaaataacaaaaaaactcaaattacaatgttgcgtggacaaataatagtgaacagcagagaagctaacttatccctgaactacacagatatcatatatataatccttgtaataatcacaagggcccagaacatgatgaaaaccaaagtgatgaagaaattttaaaatagtctgagcataaattccatatgggttcggttcatggtgcttgtactggttccatctgaataaattcccgcagaatattgcaggttctaagaaaaattatacttgactttcaagaataatagtagaaataggacatttactaccgcaaccaaaagggaagaaaatgaaataatataatcataacatgaagtgtaatggaaaaatactaatgaagaactggaaaactcaattaccgtatcaagaaacagaggctcatcatcttcaatgaatatgttatttgtgcttttgtacatatcaaaatcccatttttcaccactttcatggcgcccactggtaacccaatcaaccatgagtagacttgagtcaccaaccatcctaaagacttgtttttgagtgtatcttgctgtggaaaaacatgtaacaggatctggaattatggccaaaagtgcatcaccgctcactcttgcctactgcatggcataaattaagcccttgtcacttccaaatttatggataattcattcagtcagcgattttgacaccaaaaagtttccaacattttaaaagaaagcaaactttactattacttatctcttgactcttgactatactagtaatagtgatacacaccccccgtaaatttgtcaatgaaaaacaaaatattgagaggaaatttaaagagcacttgaaaaacaaaaatctacaaaaaaaatgagccaattacatggtattgcaaaatttaagaacaactttaaactgataaagccttacaggaaacaacaattcatgttactggggtacattttagaaatcgttagtatgttacctctaagacctgctctgagcactttgatcccattgacttgtagacctccaaaaccaaaagaaataaacccatttgagatttccgaacagtaaacacggtccaatagagtagagtctcaatgatcaaagctacaaatgatgataagggtattgaatgggagaagtgaaagttaaacctttgttgaagcttgagtagtcaagacagcgttgcagccatatccgacattaaacttgaatgaaatagaatctccctgcaccaaatatcacacaccactatcctttaagtaaacttattaaggatatataaatatatatatatacaatatatatacatttatatttatatatatacatgaagaagagttttaaacaagaaaatagaactagagagagagagagagtgaaaggaacatacagagacaatgccaccaccgtatgtgaggctataaatccaaacagcgtcacatttggagttgcccacctaatgaatcagattaaggaaaagtattaagaggaaatagttcagattgtttcaactttcaatccaaatatatacatatttatacaaataaataaataaccttgttgggtactatgaatttcaagggatactttgaatagcagcttgtaactgttgactttcctccaactttctcaaccactactcttcccgtttccatctctcccaactccaggcacccaagaaggacccccaaaaataaaagaaggaaacgtgcgtttgcggcttaacaattcggtcgggtcgggtcggcgcaggaaatctgcttctaccatcgcaacccgacccactaaagttggaaaggtcactttgaattcactaagaccatcctattcctcaatggtattctctatattaaattggtataaaatcttttacttttttttatttgagaaaatgatatgtatcttattctgaccagacaaatcatctaccaaaatagcttgaaaagtagtaggaacaaactcccccaccatagcaacgaccttggaaagaaaaagccacagtcgctaactaattagctgccttattcgcaaatcgtttaacaaaaacacaagaaatattgttaagatcagacattaaagtatgacaatcaaaaataactaaactaaaaggagacaataaagaagtcgaattatatagagcatcaataatgcttttacaatctgactcaacaacaatttgatctaggccccgttctttaatctagctcaacgcttccttcaacccaattgccttgccaaaagaagagagacacgaccaagtaattgtttggaccaatgataaataacagctccatgatgatcatggaccaactctccaatcccgaaataaaaaggcatagaagtgacagaggcatctatattgactttaatcaaattaatactgagaaccgaccaatgctccacatgaacacaaggacttgaatccattgtgtttgtagaattttcgtgagcaatcttctattgattaaagtaagacaacgcagcagccaccacccccatctgcagcagaagttttactaggccaaacaagcccatttcttgctttccaaagagactaacaaatcactgcaacatgacaaaccaaagtcttcggaaatgctatgaccagttgataaaactatcctaaaaaatctgtggctgaaaggttgcaaatggccccatcaacccacaagctttgactaaaggacattcaaccaaaatatgaaggattgattcattcataccttgacacaccaagcaaataacgaccacatcaacatgctgaccttttaactaggtcagtgttggtaaatacccaaaacatgccctcataagtaagcttttaaccttaggaggaattttaaatttccataatgccgtccaaaggcccaaattattatctttgaccacttgccatgaagcacctggagaagctcgtaagcactcttcaccgaataaacccctaaagtctctttaaaccaatgccaatgatccaacctaagattatcattcaacacaatactctaaattaacgatcaggagcattaaacaaatcttcaagaatttcatcatcccacacctgggccctcccactgtaatctgattgaccttcgccccctccaaactaggatggaaagaagtaatcttagattgctcctcacacggaagccacgattggcccagaaagttaatagaagaaccatcaacaacacaccatttggaactagcttttcaataactcttgagaagtaagaatacttctccaaacgtcactaggatttgaccttaactccgcagacaaaaacaatccacgaggataataccgcgcttaaaatatacgaccaataagcaaaccagaacgacttaaaagccaccacccttgcttccctaacatagctagattaaaatcatgtaaactttgaaaccccagcccgccattatccttatgaaccaccagcttctcccacgacaaccaatgaatattgggccattactacttaaataattacacatggtttgctccattttagaacaaagtttaagcgaaagcagaaaaatactcataacgtaactagggagagattgagcgacagatttcaaaaggacttcctttcctgacatagagaaccactttttgtcccaactcactcacgtatgcattttatctttgaggaaacctaaagtaacattcttattcttgcccataatattaggaagacccaaatagaaactttgatcacctccaacctacatcacccaaatttctgaactcaagcacattttatctctaaggtattagtgataaaaaagatagaagatttagcaatattcatct

SEQ ID NO: 36680 - DNA, 2611 bp, Cannabis sativa
tgtgcaggtgaaattgtgcactgcccatatatcatcggtttgagcttaacttctttgattcaaaggtgtgttgagtatagtgtaaggcatcttttaattattttttgttatgctctagatcttaaaggagtgattgctcagtttgtttgtgaaagttttaaacgtagagttatatagtcatacttctccaaatttctcatactacttcatatacttgttagttacttatctatgcatttttaacacaagaagaaaaaaaaaaataatcccataacataacaagctcagctgtgtcgtttcatgcattcttacagttttcactttcaaagaaaaaccattttcgaccaagcagatttcttatccatctcttttatgatcttcatggtctgtagaactattgatgctaggatctttttacagtcattgtgctatggaagaactgagttaaatcaaactgagaaggaccctttacttagttgaaaccatttaaactcaacactctccatctaattatgccaatagtaagttcttttgaaaccctggaaaatggactgaacaaacataaatctctttagtgtatatttcaaaaagataatattttcatttgttgaccttaaacaagttttttaaatcccatgtcagaattcagcagatgtaaacactatgaatctcactctactaaaccctccattaattttctttagcttcctcttaccactcactattaatatcaagtgttgtactgataactcatcagagcttgtgagcatattaggagtcagcatattttcaatctaaaccttttgactgtcatattttggtaatgtgttaagaacagaagcactaacaataaagtaaagtgtttatacacatgggatccatgagtttcaaaagaaggtaactttcctatatagtagtttttaactatcttagttagcatattataaggtgtcattttgactaacttttagtcaaaatctatattctatctcaagttctcactaccctaaatttcgattatcggtctatataatcttctttttgaaaatgggcaccttgcctaatcctacaatatttgaagaacaacaagctatagcaattgctatataggaaccgaacccggaaaagactcaaacatcatatcttgttgttaagtgtttgtcgttgtcttcgagtttattcttagtacctacatagtaattgttataattttttcggtttccaaatattatagagtttaggcagggaagggatcctataatttccacatattatgaacatatgagaattcaagctgtaaaagctacaaaaaactcatcaccatttttctactgatttaacatatttgttgtttttttaaaggagaagtattactttgtctttgacttgtgagaatgacatttaaggcttcaagttttggttccttgtactctatctattctataatttttcactttttttcttgtcggcaaggaagaagtttctctttggttttccttattgtagcagtcaccacagttttttaccattaatgtcagtccttacaaggtacataattctggctttttcaccaaccccttactgtcgtaacaatacatacatattaacatcaactaaagattcccaagtctcatttctagtgcatatattatatattatatatattcatataataccagtactatatatatatatatatgcagtaagaattatcacttaccttggattccttcttccctttgctcattaagttttaccaaaagactttatgaatattaataatgtgattaaaagacattactatcttagtagctggatttctctttcgttgtagctttgtctccttatcaagttcaaaaaaaataaaaaaaataatgactgattttgaagaaccccacttcatcaaaatcttgacttgtttctctaattatgtcaataatggttggcgttatcgtttatatgtatacacacacataaatatacaaagtaatttcttacgttacaagtgaaagaaaagagtcaaaattgaatggaaattgcaataaaaacggaataaacagtaatgaactttctcgtgaaagaatcaaagattatgatacaaaaattctaccacaaaggcttcacgtgaatttttttttttttttcatttataatcaagattggattttatgatacaagtcattatctatataatttttttttttcaaagcatatgtatatatatatttatttagagaatttataagaggaggtcacggagtgacaaccggtttaccaactattaaaggcaagagtagctcaatgaatatgctcctatttggaatttagcactatatttatatagagagaagatttaccacttatagcttagtacaagtagtgcactagccactaaactaggtctatgatttttattcttgttagggatagggtctaaaatcaggaccacaaccggccttggaggttaatattttttgttgaaataaagataggtctccatgagagagagatagactataatgaaattattcctgttgtgacaaatttgaaaggattatttcatattgcaccaatgttggaaaagattgtacgattcttccctactgagaca

SEQ ID NO: 36681 - DNA, 6801 bp, Cannabis sativa
  modified_base (6752)..(6758): a, c, t, g, unknown or other
ggttctttaccttccatatagcttatagctttatttgctttgtactgctctatgctttttaataaagcctctatgttttttaataaagcacaagttctttcaaaaaaaaaaaaatttttcttctaaaaaaaatctaacacattataatttcataaataacaaaaagaaaaaaatagtataaaatatgagaaaccactcacaacgatctttttataaatattgaagaaagtacgtaagtagcagtcaatgtctatgacagttctgtaataagagaaaaagggtttctactcggatttgccacgtggcacctttccaagacctattcgtggtatcgtaagtcaacatcaatagatatatttaccagacttttgtcataaaatgacatttatttatttaccgaggtataagaaacacacaattaatttcattacgggtataagtaattaatgtaaacaattaattaatggtaatgaattaatgaaggaaagatgaaaagggtggtgttgttccaaacaattaaacaaagaataacatgcaccctggccaagcttgtaaaaatggaaatacgttttcttacgtttaattttcttaattaattatttatttatttaatgcgattctttgccttctaatacgtccctgtcttcatgactctctctctctctctccacatatatctttccaataatcaatagtgacaacaactagtttttgtagttttccgataaatatttatttgttatttaatttaatattatctttaattatttatatttggttttaaactcgctagtgatctgagagatcgagggattcgcaaaaatgggacattcagaacgtttctgaaagaagaagaagaaaagcttgatttaaaattgtgcttcgctcttttaggattggaagttggattcgagatgggttttttcagtactgtgttgggtttttgtggatttggagttgggatttctatcggtctcgttgctgggtattttctcttcatatatttccaacccagcgatgttaaggttcttattctttctctattttataggcctttgtttggaatgttaaatttgtttgaaccaaatagaacggtttcaagaaacgaaaaggctgtgatttgattttttttcttgattatattattgtgaaaattggcctttttcacaaggaattatatgtttaagaagctctgagataacttggaataaaatgttaacgagggagccttgttggctattttgttatctatgcgtatacatgttttgttccttatgttgctttcaacatgaatttggttttgagagaaagttagtatttatttgttgtcttttaagtttttagtttggtaatttggacaatgcatataggaacctagaaagaagcacatggccaacgaaaaacatggtacagtttaggatttcaaaagaaacgtatactgtttctatcagaacaaggaatgtagtatatttgtatgaattttttataggaattaaggtgtagagatatggaactaggacatttgcaattttggaaacctatgaccaaagacaattgaatattgtagaagagaattgaaaaaggaatgtcaattctgctgcaatatgcagatatttgacgatcgcatatttgtttgtctgcattgtctttcgaagtgtaactaattccatttggactggtcaggatcctgtacttcgtcctttggttgagcaagattcagagacattgcagcgcatgttccctgagattccactctgggtgaaaaatccagactatgatcgagtatgctgcttctttttgctgcaacattatcttagttttgttagcattttttacattctctcatatcctttcttgttgttgctttggttttgggtgaaggttgactggctaaacaagttcattgaatatatgtggccttatcttgacaaggtatttttctatttcttgctattttgtaaaattatttctacattttatcttttcatatcatttaatgagctttgtgtcaacaatttgttctgttttcttatgcaggccatttgcaagactgcaatgactattgcaaagcccataattgctgagcaaattcctaaatacaagattgagtctgttgaatttgaaacactcactctagggtcgttaccaccaacttttcaaggttagaaaatatgctgagcatctttgtaaagtttgtatagtttatctgtgtatccttgatttgatttgtttatagtatatggctggaaataagagcttcataaatgtatttggattatggaaacctcttgacttttttctttttcaaaatgtacattctccaggtatgaaagtgtataccactgaggaaaaggagttgattatggaaccttcaataaaatgggctggaaaccctaatatcactcttgctgttaaggcttttgggttaaaagcaactgttcaggttattgatttatcctactattcagcaccatgcttctgttaattttacttttgagtgcatgacagtggggtagagttgctgcatgttaacattttgttctttcatttcaggtggtagatttgcaagtctttgcctctccacgcataactctgaagcccttggttccaagctttccttgttttgcgaatatatacgtgtctcttatggataaggttgtattgtatgtatttaaaaagtttagctcaggtttttcttgtttagatatttttagacataaaagtgttccaaactaaataattcaagactcacaagttcacaatttttaaatacctttaatcattaaattttttaattggattgattcagttcttagagcaccattaaaggccaagatacttcttctaacagctttttctgtcatttttatcagccgcatgttgattttgggttaaagcttgcaggggctgatctgatgtcaatacccggcctttacagatttgtccaggtgccatacttttaacttgtttgtgcctaaaaattgtattctcattgatttgtccactgttttctttcctcacatttttcctttttgatccatgagtagtttggatataggtatggtgtttgcttcagtcattatgtttcttagatgttataggaagttttgcttcactagttagtgatgtgatcaatgattgcggttttctctgcaggaactcattaaggatcaagttgcaaacatgtacctgtggcccaaaacccttgatgtgccaattgttgacccagcaaagtaggtttctgaattatcctgatattttgtttgtggcaaatgatttatctgatgtgaataattgatgcgattgttgcagggcatcaaagaggcctgttggaattctaaccgtgaaggttgtaagggcaatgaagctgaaaaagaaagatctccttggtgcatcagacccttatgtcaaatttaagctcactgaagataagctaccatcaaagaagactaccgtcaagcaaaagaacttgaaccctgaatggaatgaggagtttaatttggttgtgaaagacccacaaacccaggtgttagagtttactgtttatgactgggagcaggtactactttatcttgatgtacctctaaacaattatgttgttgttttctattttccttgtctaactcccttttctgttttttaaggttggaaaacatgacaaaatgggtatgaatgtagttccattgaaagaacttcaacctgaagagacaaaagttcttactcttgacctcctgaaaactatggagttgaatgatgttcaaaatgagaaatcacgtggacagcttgttctggaattaacatataaacctttcaaggaagatgagatgccacaaggctatgaagatactcagacagtacagaatgctcctgatggaactcctactggtggaggactacttgttgtcacagttcatgaagctgaagaggttgagggaaaacaccatactaatccacatgtccgacttctgtttagaggggaggagaaaaggaccaaggtacaatcacatctgccattttaactttcccttctaatatctataaaaagatttcttgtaataaacttgtgataggtagttctatatctactttagtgtaaatgtggataaactgttagtactctaaaatctgaatttacagaaaacaatgttatatgctcaacaaatagtgtgcaagcatatcatggtaatgttttaatgattctttcaaacttcttcgatgatgtcacagcctatgaagaaaaatagagatccaaggtgggatgaagagttccagttcatggttgatgagcctcctactaatgacaaattgcatgtagaagtagtcagtacctcatcaagaatgggcctactacatccaaaggttagtgtgtgcagacacacatatttaattatatatttatataaattttttcagtgaagtttctagaaaatggatcatgggcatgaattctattctactcgtcttataatgggttgcatcaaaacgctgttaagagaatcaaatgctagttaacttccaatatgcatatgttcattctttctgttttttttctctttttcttccagaagtgtaatttgcatgacaatattgttaattgaaagatagggaactattaagttctcttattgatctaattcggacacaaagcattcaggaacgagttcagctgttgggtgtggattttaggcagtgaaatgactttttttttttgtctttgttctcgtgaatcaggaatgtctgggatatgttgatattagtctttcagatgttgtttccaacaaaagaattaatgagagatatcatctcatagattcaaagaatggtcgaatccagattgagctgcaatggagaacatcgtcatgaagtcagttaatttgttttcagtgttgtaatggtccatccatagtgttgtgtctgaagatggtgatagacaaggctcagtcttattttcatgtttgatcttttttcaatacatacacgttagtttatttgtgatattcgtgttcatatgtacatgatgataatgatgatgttgaggagtttggtagctaattgcaacagtaaacatttaaaactgttgatgatgatgatgatgatgatgatgaattgattatgatgctattgagatggaaaagaaaacgggttattcgtatgaaaccgaacttcctgaatgtgtatggattccattagttctattttgagcaggtggtgtttggttagaggtaatgaaatggaatgggatggaaaagaaataatttttattctattcttttgtttggttgcattttaaagtattggaattgattgtagtatattaaattttattaattagacttttattttgttttatacttttattcctatttaataggaataatcatgtttttattatgatagtggtattattttaaatatatatttatggtaatatataattttctaactttattgcatttaattttattataaatatgaatattaataatatttatgacgttttccttttacatcttttacgtaataccgaatatatttttaaataggtttttataatggcaatttattttttgatactttattattatatattatcttttggctgttttttcttaaatgtttattttttggtacaattattttagctaattttaatatgtgattaagtttcgttccttttaggtttttcttcatagatttatatcttactttcatggttgttatactattttcttataaatttattacttgctattaatttattaagttaatttttcggtatttaattggtattatcagctattaatatatttaattttgagttttttttgttaattaattttgtaaactcattaaatatgttattgcctcattaaaattggattacattcataattattattgttgttagtttgaggcttatttttatagtttgtgctattttttttggctactttataccattttatttggttttttttgtgtcatattatttggctattttaccgtatattgttggctcgtttgatggtgaatataacatcaaagagtgctactataaattttcacagataaattttaaattttacttttaattatatttgataattttgaggaattttctttcttttattttatatcattatttttatcattttttgctagctaatagaatttgttatcttgtttggcaaaatagttaattttagttgagatttgatttattaaatttgattaatctctcaaatcttatgtatggtgcagatttaattgactagtatatttataccttacaagactttgctctaatagttggacataacaaattagtttctatataatggtgacatgctgagtgaaaaaagacttcaaagaaaagttctctcgttaaaataataattgtgttttatacgtaatttaaaaatttacattattatcgttgtataatgtgctaatccacatttttatatctatttattttgtaagtagttttggtctaattggttgtttatatcagatgcctcttgaaggtgttctaaagttattttgtctaaatttatgagataacttggtcttatataagttgatttgtgtggagtgactcatattctgactttgtatatctttggcttgacaattagcttgttgattggaagctcctccgcgtcgatgattgtcatagtttgattcaaatcactcccaaaaaaaaaaaaatattggaatgacattctaatggaatgctctttccaccattnnnnnnnaatgactattccattttaaaaaggaaggaaagaccattccaat

SEQ ID NO: 36682 - DNA, 17555 bp, Cannabis sativa
  modified_base (27)..(37): a, c, t, g, unknown or other
  modified_base (1210)..(1214): a, c, t, g, unknown or other
tcgttcttctctctctctctctctctnnnnnnnnnnntctctctctctctctctgtgtttcctactcttccggaagtttcttcttttgtttagatcccaaatggagaagtgttgtattagttaccgcttttcatggttttggtcaattgggccgagtaagcattagttgactttagttaggctgagtatgctcactagttgggccttttgggctttggattatgaaaaataatggagataaattgaaaaatactttttttatatctattaattaaaaatactctcatattatatttaattaaaatatacctacttttatgagtgggttgccgaatctacccctactctctacgtaagtctagcatataatttacatcaacttaagggatctaatagggacatcatctataaaagtgagtatattttaaagaatataaaaataaaggtaaaaatcaaaacaagtaaagtaaagtggatatataatgtaatttcctcaaaatattgtcatacgagttttttttaaaaaataatgtcttttgataaaataaccgtacaaaacagaacaattaaaaattactaaaaaatagaagtaaaacaacataagaaacttaacaaagtataaaaaatatatagtatttttgaaagaagaaaaatacaaaattttttgaaaacaattccacatcacagtacaatagaaaagacaagaaaaattcaatacgtggtataaaaattccaaaactcaaactcatactacacattagggcagcaagaacatggctcgaaactctaatgaaataaatgagtttggattttgttagtatttagccatttctatttatttttggcagttaactgctaattggttgttgtgtgtacatagaatattatccacatgaatacacacatcgcacaatatcattagaacatgcaaatatttattgtgtcacgtgtacaaattttatgtacacatggacagttaatgtgtcagttaattgctaaaaatacatagaaatgactaaatgctaacaaaatgcaaggattttattgtcaaaaattaagtttttatgattaattgctaataaaataaaagtattaagagttatgccgcagttaactcaaatagataaaaataagttatacgagtataaataagttgggtttgggttatagttttcaacacgattaataaaggattatttacaccacatannnnnatttctaatttttttacttttttactatgggacagaattttttttcaaaaatactgtgtaagttttatactgtatactgtgttaagttttcactgttcttctacagttattttttagttgttccactgttgtttttagttgttatgttttgtgtttcactgttattttataaaaatacattgtttttgaaaaaaattcttgtgtggcagtatttttgtaaaagctaacctaaattctagtatttttgtaagtttctcaatattttttgataattgggccgaatgagcccaaactagaggaccttttggatttagtcaaagtcaaaccccaacgacgtcgtttcgaaagcaaagtgaaaaaaaataataatatatttatcacataattaacgtggggagttagttagttagttatttttgattatcaccttaattaaaggttttgcttaggtttcgaaaaatggctatggctgactctgaaatggaagaagaagaagaagaagaagaagaagaagtggtcaacggccatggctacacagtagacgaaggtctttcttcagtaggtttcggcaaattccaaatcagaatgctttgttacgcaggtctaggctacttcgccgacgcctcagaattaatgctcctctcattcataggtccagctcttcaatctcaatggttactttcctcatctcaacagactctcttatcaaccgtcgtattcgccggaatgcttgtcggagcatctttctggggtcttgtttcagaccaattcggaaggagggtttcgtttttaggcatttcgattcttattactctttcttcatttttaagctctttttctcctaattacacggttttgttgattcttcgtactctcgttggcgctggcttgggcggtgctcctgtgttctcgtgttggtttttggagtttgttcctgtttcggatcgagggaaatggatggttgtcttctcaactttttggacttttggtaccatttttgaggctgcgctggcttgggtaagaaatattagaattctataagattttatcgttttaattctcagtgattagaattttttggagtatttagaattggagaaagtagtgagtttgttaaaggagttttcttttctcttagcaatggccaaaagaaatattcttagaatggattaattgtcattgattagaattgaaatttcataagattttacaattgaaatattagagttttgtaagattttttcgttttaattctcagtgattagaatttttggagtatttagaagtagagaaagtggtaagtttgtgaaaagagctttcttttagcaatggccaagagaaatattcttagaatggattaatttcttagaaaagtgattgagattgatgaaattgtcttattttctctctgtttattactaattagccaatcaaattgtgctactgcttattattttgaagtttctgttaagatttatcatttgtaattcaaatgaacaactgtataattcttagaatttggagtttttagaagttgagaaagtaatgaccttgtgaaaagagcttgctttatcaatgaccaaacgaagtattcttaatagagattgatgagatagtcttctttttaactactatcattaaccaatcaaactaaaatgatgagattattatatctttttcattacaacaccataattcttagaatttagaatccttttaagtagagaaagtaataagcttgtgaaaagagcttgctttatcaatggccaaacgaaatattcttaatagagattgatgagtgttaaggccaagtgttagttagttagttgagcagagtgttaggttgtcagttaatagttacaagtctttactgttattctgttaattggtttgttactactgttaacagctaagaattacagcttgtgtactctatacaaaacactcttgtatcatttgctccactgaaatcattcaattcattcactttctctctctaagactgaatcatcacaatgagaaagtcttctttttcattactataattaacgaccaatcaatcaaattgatcttattattgttatgttacagattgtgatgccgagactgaattggagatggcttcttgctctatcttccttaccatcattcggattagttctgttctacccactaattccagagtctccaagatatttgtgtgcaaaacacagacttgctgatgcacaacatataatggagaatatagcttcgctcaaccaagcaaaactccctcctggaaccttgattaccgacttacaacaacacatagtccacgggaatgaagaagcagaagtagaagatggaattgaaagcaaagttgattatgcaaattccaacacaaccccattactcaaaaataaagaaccaccacaaccgccatcctccttgtctctccttttctcccaaaaatatattagaaccacaatcctgctctgggtcttgtactttgggaattcattttcctactatggcattatattgctgacttcagagctaagtgctggccaaatcaaatgtcaccactcggtctcgatttcgagttcagaaagtgaaagtggtagtggtggtgacggttcttcttctagcctgtatgttgatgtattcatcacaagcttagctgaagttccagggattgttttgtcagccatcattgttgacagaattggacgaaaggtgtcaatgattatcatgttcttcatggctagtgttttcctcttaccaatggcattcaacttcaacttcaactctgctaatttattaacaaccgggttgttatttggagctcgaatgtgcactctagggaccttcacagtagcttgtatatacgctccagaggtacctccatcatcatcattgttcagttcttcctttctttcttgtttataacaaatcattattattcattatgatatctgttatgttatgtagttgtatccaactccaatgagggcaactgggagcggagtggctagcgcaatggggcgaataggaggaatagtatgtcctatggtggcagtgggacttgtggcgggttgccaccaaacggctgccgtagttctgtttttgctggtattacttatctctgcgctctctgttatgctctttccatatgaaactaagggccaaagtttacaagacacactctctgcctctgcctctagttctagctctaccattccctagatccctctatcactttgctattttttacacaccctatcttgttttgcaattcaactcatacttattttaatttaaactaaaatagatgagagttgatattgaattgcacaactaataatatgctaaactaaagataaggttacaagaagcttaatttgtgcctttgttgcatataatcataaaacgttttctattttcggtaagtgaagaaataataatttaattttcttaaatgacaacgtacattatagttatagcatacatttggatagtttgcaatttgaataatttatattatcaaaaatataattcaaaacaattagttttgtttatttatttattttatatgcatcgaactaactattttttaattttgtttttgacagtataaattatttagaattttttgcaaactaactaaatgcatgctataactatagtatactttgtcatataaaaaaattaaattataatttcttcacttgccaaatagaaaacgtccaccctagttaggaaatttttatgattatatgcaacaaacaagctattattattatacaaattttatatttaaagtagatgtattatttgttttgttgtaaagaaattaaattatccatcttgtattgtgatgaataaaaacttcatagataatttttatttttaagattttgtgctttattaaattcttgcaactcaactaataagaaatcatagtagattgtaataaaaatgaatgaagtgtgtgtaagtgaataatttaagttgcaaactaagtagacaaaatccatgtaaacactcgagtggtgtttgttgcttagtgattacataaaggcatttcctttagttgcattgtaagaattctaactgagcaaaaatgttagtgttttttcctttttagctggaaattgcaaagtgacactaatttgggaaatatgagctctttcacttcacttcatccaacccaatttccatctctacaaacaccacaactcttgcaggctgcagctgctgatgaaactgttactgaatccaaatatattatcatccaaatccaattggatatttcgtcttcgattaaaaccaactaattgatttttggcttcggtcgtcttggccttaacaagatatataggactcctaagacaactagaaaagcaggaattgtcgtcgtatcaaacactacttcaacttttctttcttttgtgcagtgaatagggtggagaagagctttagtttgatttactagaccgtagaatctgcatgcaaataaccgaacgaaccataataatagtaattagatttaagtttgtttctgtataaatttctcaggcccagttttgattactaaccctttggatgcgtcttcaagggtatgtaaaagtcttatggcatccacataatgcaattctcccgaaacagttgaaatctgaagaagaagaaaaaaaaaaacaaccacaatatcaaattgaaagttaaaacagttagaagcgtgaaagaaagaattagtttactcactcttctccataggctaacaacataattgtacttgttaactagctcgcgctcttgagacaagaagagcttgaaggatttttcggctggctcagttaagtcttccaacaatatgtaaaatcacagaaagagaaaagaaaatacagataattcacaatatatgcagaagtgtatgtgtgaattaaaaaggtaaagaagtggaagacttgtcaacttcaccaattatatgagcaattacttcattttatgtatgtgttcagctgcttggaattgaatgcataaaaaaaatgaaataattgaatggtcacagtatggggaaggatacttgtacgttccatgataagaagatggatggctgaattgaccatctctatagactcttcgagagttgttatgatgtaactacgagcaattgtatcggattgaaattgcgaaatgtgccagccttgagaagtgatggagtaaggattgcatcccaccgaccacatccaatcctgtcattattataccagatgatattccatatgatacaaagataaagtatacacgtgcaagaaaagaaaacagtggtagagaaagactgccgaccccaaaattctatattggaattttgtttgtatagctcaaaaggtgccattgttaggaaaataatcaaaagttaattctcatatcaaaattttgtctttttctatcaattagaaatctgaacacaggaagctcgtaaatcgagaccaataataggagaattcggattctaggttacttacctccattgcagtttcgtgggcttgactgtaaacaagatgtagaggtataagaccagccaaatgttcagaagcagcagccagtgcagcttttattggcctcctatataaggggacagtgaaaaaaaatcaatttcatgattcgagatgcttttcctaagtgcttataaagtgttacagaaagatataacatcccaaagcaacatcaaaaacgttatttttaaacaccaatttcaaagagtcagtgaaaaagaaaattaaatgtgtttgcaatatcattccacccataaccaatagaacattcctgataaaaaaggtcaattaatatatatatatatatatatttatataattagcttttggaaaacagggccaccgaatgaaatgaaaataattgaagattgcttaccttagatccatcaaaagtgaacgcccattacactgcagatggctttcccaggttgaggtctctgactgggcaacaataatcatgtctgaaagtgccttagcctggtaatgtttgtcaacaaacaatggctcaccgtggatgaaccaaaagattggaacctcgagtgtggacctgctatgagcatgcatacctgcacagtccagaaagtgtgcgagtgttactatgcaaaacgaaaaaaaccttaacttcaaacatctaagttcatctataacaataataataataaatactagaaatagcaaccagccaaccattgcattactaatctcatatccccatgtgtgcttagatctaaagattcgaagttattacataacagtttattggtaattgctaggcatcaatacaattagttctcttgatgttggcctgccaaaggaaataaagttcacacacaagaatagataggatgcaaaaagaaaagaaagtgaagaacctttgagagagccatgatcgttcaacctctgtagttgatactgaagaatggaggaatcaagatatgtgtgaatattttttctatatgttccattaacaagcaatagtgggacagcagctgctcgccgtgccacagaaaatgccattgccaaagcaggatcctctgaaagtggtaacctaacaaaataatgttacagcatttatctaataattgatattaatcgacaaaacaaaagaaggataatgattgcatacatatggggactgaaagacaacttctgagaagatagcaacaaagactggagccctatcttcagagcgtcaagatccactggtaattgatcaaaacgcttgaatttctgcaggaattagcagtatgtacttggtaatatggcacgaattataataataataattaaattacaattcagctgcgtgctgaagattctctatctaatatattattgcatacctcttgtgtgatgaaaaataactgaaatgatatcttttcataataatgaaatgccccctcagcaatggaaggtgatatgatgtgtcgcattgacccccataacgttgcacccaaatctgctagaaaagtatcacgagccactgtgtaattttggtgctcctgcacatgatcaaacaatcagcacagacaaaataaatgaaataaaaaaatgactaaagataaaataatcaataatatttttcttaaagaagcatattcttctgtggttatagacatagtttgatggttgtacacttcttataaatatgagattcaagttcgaatcctcgtctcccaatataaaaaaaatgtaaaacatgttttcgtaaacatagaaatagcagacaaggcatgcaaattatcattacaccaatcacaaacctcatgagtatcactaaacaagttccaattctccattcgtttcaatgcctctatggcttttgttttatgggcttcatcatattcttcaccttcaaatgactgtagctcatttttcaaatcccgcattctctcatcaagctctaaaaccaatgaataacaaaggtagaaaaattagctttaaaagtaaataacaatcacaaacagcataattctgatatgactatatggacctaacaaggacaaaggcatcaaaaccaaggactaacaagaaagaaaaaacatgatttattgctttgcttcccactaaaaacaatgaataagtaaataaaattgatggataatctaagataatttccccccgcaacaaaggtccaaagccaaccggaaggctaaaatggaaaaccaatccacctgttggcaacatacatacgaacaaatttaataattactattactaacgatctaagaatgcaatcaaataagagaaaaagaaagaaaaggattaccttcacaaagagccagcttaactctcctccccttgcaatgtttgaaagcaaaaagttcatatatatcaatctctgctaggagaatatcaattgcttgatgatctttctgcaattagtcaaggacattaaattaagccaagaaatgctcattttgacagtaacctcccctaaaggctaaagaaacactatccaaaccaaaaaaagcaaaaataatgagtaatcattggtttcataaatgattgctaaccccataaaaaaaatatatttctttaaatagcaagactcggttttcctttactccttttcaaatgtaacagagaaaggagaaaaagtgttctataattgacaataatatataaaagcacatacatccccaaaaacagcaaacttttcctgaatagcttcttgcaagcgatcttcagcttcatcttctgaaagctctgcacaataacaataaagatcacaatcataagaaaaatgtaaaagaaacttacaaaaccctacacacaaaaaaattaactttaatgaaacaagtgcaagagcatgcaagtgcagcggcatcatctcgttaactagaatcttcagcaattttaatttttccaatatgtaattcactctaaacatgtatgtatctgagacaatatcatccacttatattctaaaaaaaattaacggtaaatgaaaatcactacatcataactgaggagaagacagcaagagtacctgaaactgagccaattgttttctctacatttggtaaactcagttctgtccgcacaccttctccaccaactgctgggccccatgagaaaggacccgcactcaaatcaataaaggcccatctgaaaacagaacataaagcatcaaatcaatggtgctatagtatctgtgatatcaattttgtgcataaaagaaagagctcttacctgtcttttccaatccacgtatctgtaagacattctgcttgagcactaaaatctccagatcttaattccttttcaaaaacaagcttcatatcttcattcttccctttcaataacttggattttggaaaaaaaaaaacaagaggagggaaacaaattatgtttgttgaaagcattagtttgataaatctgaatctagtaaacaagatatatatacctgcaacactttgttctgaatggtggaagcagtatccttcccatgagataacttgtcaatgttattcagggcttccaggcacatattgtaccactctacctagaaacgatgattgaacataacctttttagttagattactaactaataaaattgatactcttatacttccaattaagtagatttacggactagcaaatgtcagatgtttagtagaaacaattaaatatactataatactagcacacacaatttttacagtcaaataagagattataaaagatggtcatcttctttgttgatttttttgaaaacaaagctgtcaaaaatctttatagctcccatcataaaaaaggggctttatgaatgtatctctcttccaagttccaaaatagcagacaaccttgtctcgtctcatccaaaaagacattaggtgcgtgttaaattatttcctttgcaaatatttctttcactatatttgaacatcaaggtatgttcgattctgtgtcagcgtaaacatattaagacagttgttttaaacaaggctcatcatcgactattacccacataagaaaggtatggtgtactaaccgtctcactgtcttcagctatcctcaaagagaactctaccccaggatgtttttcgtacacaggcttcttaatcttatccaatgctgtaaacattatatttttagaaattagagttttccaaattcagaggccacattattttgtctccaaaggaaactgaaagtgaataaattacaattgaaagatctctttgatgtaaaacaaaacaaaatacgaacagaaatcttcctcatgaaatacagctaacgaatgaggaaaacataccaagaacagcttcaggagtgcctcctgactgacgaatcattgtttgtaaggtcttgttctatacaaaataaacctatcagtacgtattcattttcaacattaacaaggcaacataaaatctaaaaaaaagaagcaaaagctaatctgtttgcaaagatttgtgctgttcaataacataaaaaatatgacaaatagcaatagttttagcttttattaatactattaataggttacaaaacaaagggagtgaagaaatccccagaaaaaacaacatcaaattttatttttctaaaaacaaataactggtctagtctaacagttcccaagtccttagtgacagaaaagggaaaaaacacaacaactccttatttcctcctctaaagaaatcacattttcaaagatacattagttttttaaaaaaagaaaaaaaaaaagaaaaaaaagatacattagttttatatcccaacagccaacaaaattcttgttctatacaaaataaaacactcagaataatagaagacttggtatttactacgtattaacaaataaaatagcaaacattaatcatcctaagatgcagaatatatattgaagaaataggaaaaggaacacagaatccaataataaaataaacgtacctctttgagaaaacttaattcggaatctgataaacctcttctgcagaatatttatagcagtaactcaagacgttaaattcataatgcaagcaacttaaaatatctagcaaagtaggtcctttgcagtatggctttactgctatactagtatctctaatagcttaaaatcttttagcttgtcagggatttccaatgctaaaaagtacgtacctgtatccatatttaggtcgctttgcatcacgctttggattcaaaatgaaaacattatatgtattttcaagttgaagatattcaacaaggctagtgaaaatgacttccatagcatctaaatctacttgaaaaaatgcatccacattatccctggaaaagacagaaagtatgaataagtaatatggagaaaagtttttaatttgtttcttgtgtggtttctattccacattttcactcattattacaaattttgttcttataaaaaaatgaagtagagaatgaaccaaacaagtatcatggagtctaaattatgattgctttgtgtacatattaaaaggaaatgtaacaaataaataaatctgaaatcatatcttctttcctacagaaacaaagatattccacttcaccccagccaaatgtactacaattcttatccaaataaatattttttagtaacttcactggaattttatggcaactttaatgaactgcattatgggtaatgaattataaatctcaagaaccagaagttatagaaaataagagctaaatgaaactagaaaatggcaaactgcaaagactccaaaaataagaaattttgtgaataatgcaacataccctttagcagcagaaacatcatcatcgcgagataaaacacgtaatgcttgctcaaatatggacgtaaccttttctcccatcactattgcatgaacagaaaagctgcaaaaggcacaatgatgagctgagtgttttcatatgtagaaaaaagtaaacttccattccaactaatgaagtgggaaagtgaattgattacttgtaatttacatggctgactatcggaagatggtgacgcagttctttttcaacactaatcttgtaaaatgggtccaaaacttgtccaatttggggaatccgagcatgttcaaatatgtgatcaatttttgtgaaccaacgctcaagttcttcggattcaagcttaaattctatgaagaaaaagacaagtgttaaggataacagagagatgattaggaagataaaacagaaaatgaatgatatatatttaccttgatttcctttgccttcaaatcctacgaagatgaaattgacaggaacttgaaggtaaatagagtcaacttcgagtagctttaaataattcgcaatgttgcctggaatttaatgaaaatttcaattaaaattcaaatcttattcaaaatttagagaaaaaatgagtgagattggcgcaatttgtacaatttcactcacctgccttagtgtagttgagaagaccaagcttagaggtggaagtttccaaatcatcaaattctgagaaagtaaaaaacgaacaagaatgattgaaattgaaactcaaactgaaactgaaatcaatattgcagcgattagagataagagaatgaagtagatataccaccggaacgaataacagactcgctccagaatttgctcctctgtttgagattaaacaaggagaaaaccgaagatgtacgagtttgaggtcgagctcttccaccgggagacgaagatccatgagagttgatcggcaacaacaataactgaaaattatcgtaattgttagtaacaaaataatcgataaagagagaaataggttaagtgagtagcaacagtaaccagtaagagagcaaataagaggaagaatggagattgaatagatcttagtgttggtgttgttgaaggtctgttaatggattccatggagtccaaaccagtcttcttctccaaaatcttcactcttctcattttcattttctatggaattgcagtgattttattattctttttagttttattttaggacaaattcaatgtgccacgtggacatgacgtgtaatcattctattggctcttctcttgaaaatgtgccacctggacatgacatgtaaccactcttgaaaactatgatggggtgtaattttttgttaggacaaaattaaatccttctttaggaaaaagaattataatctccttccaaatttcaggaaaaatggtattttaagaatattttggtttattagagaggctgaggaaaatagcaaatatcttgggctcccaagctttattggcagaaataagactgcagcgttcagttatgtggtggataaggtgcaaaagaggattcagacttgggataataaatttatctcaagagctggaaaggaaatcctaatcaaagcggttgttcaagctttgccggcgtatactatgaatatgttcttactcccgttgggaatttgccatcaggtggaaagtgctattagtagattttggtggaagtctaataactccaacgtaatacattggttgagttgggataaacttgcttctcataagtttgatggtgggatgggatttcgggactttcgtgatttcaatctttcattgttagcaaaacaaggttggaggttactaatgggggggatgggggggataatttggctttcaagatataggctggttgggaatgggtcaaatattgctatacttcataaaccttggcttatggatgaggctaatccttttatagaaactgaccacccgagtcttgaagggagaatggtcaactctctgatgaaagttgacaaaatcgaatgggatagtgaggttatttctgatgtcttaaatgatagagatcaagcgcttgtttggaagattcctttatctgaggcaagctcacatgatgattggttttggttgaaagatagcaaaggtatgtttactgtgaagagtgcttatagattgcaacatgggcaaagtggacagcctatccataatttttcttctgatctgtggaagaagttgtggacattaaatctgccccctaaagtacttaattttttatggcgtgtgtgcaccaattgtcttccaaccaaatttatgctgtccacaaaacatgtgcaaatagatacaagctaccctttgtgctctgctgcaccagaaacggcactgcacctgctggtgcgatgtagctttgctaaaagctgctggcagcagacatgtgttccaattgtggctcctgctgcaatgacctttggtagctggtttgaggaagggttctcaaggtggagtgaggttgtttgtgtggaggcggcaatgactctttgggcgttatggaaggttcgtaatgaggtggtgtgaaattcagtttccccttcatttgatgaggtaattcacacggcaaaagtaaattactcggactggtgcaatgcacagcggttcgagtttgagtctcatatagagcttcacaatggttggccggagaaatggtgtcccccaaactttcctagcatcaaagtaaatgtcgacgacgcgctctttgctttggagggtcgttttggggtgggattggtggctcgggatgctgcgggtttggtcattcaggctgctactttgctgaaaatgggttcgcttcagccacatgaagttgaggctattggaatcaaagaagccttgagttggatcaagaccaatggatggaatggggtaattttggaatcggattgtttacgggttatttctgatattcaatgtaataaaaatatggtctctccttatggccatataatttcagagtgtaaggctttctgtgccaagattggtaacatctctcttagttttgtgaagcgatccgcgaatagggttgcgcatagtttggcgcgatcctctctacttgaggttgatcgtacgtttaatagttttactttaccttttgtaacttcttcgttggttttggatgatttaaagtaatgaagttgcatttttattcaaaaaaaaagaatattttggtttagaaaatactcatatatgttaaaatattgtacataaagtcacaaaatgtattgatataaattcacttaattttgttaactaatgtaagaatcattattactaaggttttgaatttgattgttataaactacttgaggctagctcaagtgaccataagtgggtgtgtgagtgttggaggtcctggttcgagtcccagataaaacatgttataaaatatataaacgcttaaatcaaaagaaagaatttgattgttataaataacttttatatataactcaatgattatataaaaggctaattaaaatttttgtattttaaattttaacatgtatcaaattatatttcttaaattattttggctgttaaaaatttcttatgaattattaaaattgttagatttaagaatttttgtccaattacatgaatttttactaattcagtgatgatttatatactaaattatactcccctgacttagatatctatcaaaccatgtctcttgaactttgacatgtactaaattatatcccttgattagaattttcttactaaaattagataaaaattcttaaatccaacaatctcaatagttcaagagaaatttttaacaatcttaaaagttcagagggcataactttatacttatcaatgttaagggacaaaaattctaattagcctatatacaaagttcatccgataccacattatttgaatttacctgacttaatttgcctctaatgttaagtcacataaaagtacaaacattaattacacatgtttttgtatattgatatgttatcaaatatgtgtctcttacaaaactaaagatgcataggtgtaggttacttcttaaattgaatctcaaatcttaagtgtcttttcttgaatttatatgcatttattaggattaaactcacttaatctgtcaaagtcagcaggtccatcttttcacttaaaggaagaatctaaagaaagttgttagttataacagttagctttgtcaccaacttaaagagaatctcaccaacatctataaatagaagtgcatctactctctcaagataatctccaatgctcataattcagattttaaagagagagaaagtccaagatcagtgtgagtgtgtgggtggagggatgtaatgggagtatcactcttgaggtgatttttctcattataagacgtttctttgtaattgttcattgtgttaagttgtattcttggacatatttcattgcgtgctactgattattcaatcaataaatatccataatttattcattctcgagcaaagtttattcttgtctaatttcatataagttctagttttttattttgtgattggttctagtttgaattgtgttttcttgaatattattactactataacaatcgggttttgagggtgatcattcacaataaatggtatcacagctcaggatttagaattcaataatcacattcaaccaatcaagattcatctttaatatttcaagaatcaaactcaaactttcaagaattagattcaagcaataaaaaacctagtttgaatggctagttcaaatgatttcaacctatggagaatcaaatgaaggcttatctcgttatccaataaatctatgagacacttgatgttgaagccatggaattgattgaagataggagaagaaacttgagattgaagccaaggcacgcagtgccattctcctcagtcttggtgatgagattttgagagaagtttcatatgaggacaaggccttatgtaatacccgggattaagaaaagaattagcaaaaccctaactagataattatgagttaattgaggaattatattattatatagttcaacatatgtgaaattatatgaa

SEQ ID NO: 36683 - DNA, 7755 bp, Cannabis sativa
ttaaaataacaatttgggccttttcttaaggctcgaatagcccaattcacttttaaaatttaagacgcatgtctcttatgtctagcgcctcacccattaaggtgtcctctcttctcctcagcaaggtgcagacattggtgcactctttaaacaccttaacttgatgctcaaaaacgcatttttaaacattgtattagataaatgtcacatcaaaaccttgaggaatggggatagtcatatagtcggactaaggcccaaacaaagtaggcctgatactgttcataccatacccatcatcatgggagaaggggagagagatatctcgttcgtaaggcatatcagaaaaggacaaacaagcaaacaaagcttgtctttccaattgaaccgctaactaatataatatttctattaagctttgacgaagcaactcaaaactatttttcataggttaaaagttacaacatcacagattcaaatttcacagttaagtattaagatctagtactaaaaggactgtttcctcaatcaaatccttgtgttgagtttgagttaatttgatgaaccgcgtaaaatgaaaatcctacaacgcaaatgaagccacaatattttcggtagctactcatctaatttggctcttgcaaatgcaatgacatgttgaaaagaagtcagctatgacatcagataggtcagctgtctgtttatattttgtaataatatttattaataatatatctgaatacaggtgagcgtgaaggaaagcaaagcagcatgcattcagaatgatcatgtattatgacacatttagcccaatgtgttttggtgagtttttcaaaaagaaaagtacataaatatactcgtcatattgaaaaatttaattaacagaaatgatccataaaatgttacttattatatacatagtctttaatttgattaaaatacttgattaattaggaaattgagaagatgaatctatttaattaatcatactaaacaaaatatttatcccattacaaaaatattatgttgggattaagaggtggaagaaattgtgaagatgaatcttgaatgaaaatagtaaaataaacttaggaaacaataaaaaatagatgagagggggccacctcagtcctcactcctattctaatttgtaatccatgtggatggcatgaattaatgaggaagagggagtaagattctcattctggtgatggggaaaaggatgttgaacagttcctttcatgaatgtgtataggagattagtgggtgtattcagttgcagaatttctgcctgagcttttgcaggcccatgagaaaaggatgtttccaatagttccaatttttgtttttgtcctttcctttcaaaataaaaaataaaaaagtgaaccctaatcccgactcaacccaaccaattaaccccatctctcctcattttatttttctatctactttgtttgtaccctgtcacacttttttttttttatctgattgatgtttaaatgtggactctcactttccctcttcctctacttcagctaattatatgattttgagaacacatgttcaccacgaaaattgaaagaaaactcatcagtacaatcattctatgtgaaaaatatgagaagaaagtgtaaaattatctacccactcaataatcactttatgattaacaagagttgctatagctcacttctactgaagaactaaacaaaacagaaaagtaaaaccccttttgcttatatattagattgaaagacataaaaaaaaaacatatactttaaattataactgatttatttgttcacctttttcgacagaatctcatgtgatatgggaacttacaaaagaaaaagaaaataaaagattgcaaggggggtcatgataggtgaaaggtaggttgttgttgtttgaagtagttttttttaggtcctggaaaaactaaaacattaacaaacactttttctttacccctaatggttccttagttttgttggaccacaaccacattgaggcccttttgatgattaatatgtggaagttaaacactttttctcaggtcttgttttttttttcattctgggtctccaagttgggatactgtcatgtggctcctaccccaagaaaatctataaacgacggtggactaatactaatcttctgaaaatggctggtggcgttttgctcagcggtgcttgaggatgagcgctgatcaccaactgagacttgggaagttgaagccgttgagttggagaagctctcatgatgcatgttttggtagtttgagttatgatgatgaaggccaccggttcgtgttagtgtttcgtcaatcttagacctcatgtgctcccaacttgtatgtttagcgcctgtaaaaaacataactaatggatcaacacttaagggaaagtatatgaactgatcgatctagaggccgaaaaaagaatagtcttagttatcattttaacattgatgaccagtgaatagagccaatgaaagtactagaaggaaaaggatcacacgtatagtgaagaaggtagactaagcgaataataaaaatgggaatcaatgtggaaagcgccaaaacccgaaaactgaacttcataaagatgaaaataaaaaactatacacatcatttagtgagtgaatagtagggatggaaagtggtgaaaaatgaaaaagacactcaccagggaagaattcaaaaggagtgtcttgggggcagaatccaccataattaggagaatgaacatttgtgttggacattaatgcttctccacaaatggtcatttgaggtgagcaagtcaggccataagaaaccccaccaacaccaccactactgctgctaacattattaccatgaaaagctccaaaagggtaaatagacagattcccaaatccaccattggtgagattattattattattattattattattgtgaagactagtgcagtaagataatggttgttgatctgatctcgggattgcttctccacagacaacaaagttggagttctcctctattcttctgtaaatactttggctcagcttcctcctcctgtaagcactggattgttctctatacttccttgccattatcacatgccaatggtttttcactgcattatcagttcttccaggaaaaagtctggcgatcatggcccacttgttcccatagattctatgagcttgcattagcctctcctcttcctcctcagtaaatgctcttctattaatccttggatccaactggttaaaccatcttagcctgcaactcttaccttttaacggaataaaattaatagacgtgcataagttgagaaattaatcaataagattacataaattaaaaaggaaaaccaattttgatgataattctacctgatcttccttctaacttctctgctattagattccagttctgagggccataaagagcaacaagctccttaagcttggcatcttcagcaggtctccaatggcctctggtacagagttttgactggccattactatcatgagtctccttctcagtcacattctcactcagattttcatcttctaataagttgatgctattacggacatcacaccctttgctaccctccattaaagggaaaccccaaaaagctcttccattattattatgattattattattattttccacttcagaacacttggacatgttatagctatcgtgggaagaagtagaagaagaaactactcccaggttgggagtaagagagagagatcccatatctgcataaaccattcgcactgaagaagagtaacaactgagggtaccactactactgctactaccactactaccgttttggttttcttctctactataaataacacgatggttggccatgccttcatttcttcctctgacactatccacggatgataaatatggcactactgtttccaagtcatcttctcatatagccggaaaaaagagatggtgaaaataatgcattattatccaaaaataaataaataaagaaagaaagaaaggaagaggtaagagatgtgatgaagtaagaaaagctagaaaaacaggaaattaacaatagtgctcagaaaactcagagcctttgtagtgtataagtctctgactccataagagggagagaaagagagagtatgcttttaagtagttaacaaccctgactgacgttaaggatggcttttttttttttttttaatttgaacaagtttgatcctccattattcagtattaaatattagtagttgtccttatttctcttctctttgacaagaaatcctacatcagtcgcacgtgtgaaaatgagaggctacttttacaccactctactgcttcttcatatctctctctttccatttttatattttcttttcgttgggtttgaaagtcttaggctgtctctctatatattgacaagaaagacctcaatgcaaagtgtgctagcttggagttgtgcagggctggacacctttcttttcaatgacacagtgagaagttataagtagatgagaggtgttttgacacaacagctcttgtcgggtatatcagtaaaattaataagcttcatcatgattattcagatcttctctttttttcatcctttatttttcaataattaattacttcaacataatagtgtttttaattcaattttagagacctaatattgttctttttttttgtattttttaatttagtttaacataaagttaggttgatccaacaactaaaaccatttttgggggcttgatctccttgtcatttctctcttttcactcttccataactaaaaaagagtaatacccctataaaagttcatccaaccctcaaaaggaacacatttcttctttttaattttcttttttctatttatgcaaaaggaatattagtcttcggaaagtcaaaagagtcttcagctttattaatatcctaggtcagtaaatgagaaattctgcatcttaatatacctgcggtggtctatgactctatgtgtgcattaatggtagcacaaacaattttttaatataatactatactatatatgttatacaaaattaatttgatcaagaatttcttatggcattaaccaagtttatgattaaagacatgatcaacttatatatatattgcctatgataggggactacatatatacgtaacgtattgaaatcaaatctgtaaatagatataaaaataatgtaataaattaactttagttgtggttagtttactgttttcacatattggaaatccaattgcagacgtttcatttattattgctgcagtgtaagtcgatacagaaatgtactatacccttctgtgcgaaactgaccagtttagggtcaaaaactttgaacgattattaccttgctatatatcttctttatattatacactccaaaccatgcaatatatattgcaaccgaacagactcccagcattaaaatattaataaaagtaataattggtgttaaaatgaatatataacatttattaataatcagatatgggtttacttaacaagaaattttttgagcaaatacgaattaaaaagacattcataattaacccatgtagatacttttttctgtcacaaaatctaactaataatagcagttagagatgatggttcataattaatagtagggcagagatatagattatgatgaacctataacaagatccctaagatgtatacatttataggagaaatgcacgcttttctgcaacctctctcatacatactctctctctctctctctctctctacttgaaaacccattttagagactatgacacctactgtactcattacaccacccatgtagcatcatctataactctgcaatgtacacgccatggtatcaacacgtatccttctaaaatcagtttcaatttagaattgaggatgattttaattgtatactggtagtgtccaacactttttataattggcgtcttacaattagttagcgatatttattaaaagttattttttaaaattatattagacccgatactttattacactaataatattatgacatcaatgagatgctagcaatatttctctttggaattattatttttatcttttaattaataagtttatattttattttgagcaattagttatatttattttattttatagtattagaattattaattatattaattctaattatttttattaaacttatatttagtttaattaacaaaatattttaaatatgatcaacattatttagttgctgatttcatttgatttagttgtccaaattatatttttttattaattatcaaaatattttgacaaataattgtaggagagatttcgatgaaatgtctcacttatataaatatagaataccaatttcagagctcactactcattttgtgaaatacaataaatctatctaaagagaatagagagagtttagaagcccgaatactcacactaattagttttcttttctgcagatttaaaacttgtgtgggattgaagctcaaaaaattaattgttagagatattttaatcctttattcgtaatgcatatatgttgaatttattccgcaattcatacatgaaaatatatatgcttcatgttttgcttataagtttttaacaattggtatcaaagagaatgatatacgttttttattttcaattttatttcatagtatatagatacgtttgtatatgtatatctctttgtatatcgctatcatatacggaagatggtttgttaaattttattgtctattattttaatgcatattaaggataaattgtttaatctattaatcttatgtataaatattatgcactaaaatgaattttgtcttttatatatagatacatatatatttatactatttattttttacatgtatatttgtatataatttttattgtgttaacgtggttttttatcaattaatctaagaagatcgtaaaaataaagaggactgtgatgaattaatttgactaaataaaactgcaataattaaaataaacactagagatttatagtagttcactctcatctcctgatggtaatagggctaaatctattttgaatttattaatgagatctaacacacaagagttatgttttcaagagtgcataaaaaataatacaaaaatagatttctaggtgaaatctatatcgaaacttatgaatataaggctcttggggaccactgtcacctgtcgaggccagcaagtggtagtggttggtcatggcttataggatgtcttagatggtgttccttgcttatttcaatcatatggatactataaaaccactttggtcacattggttcttagccaattagttaagagaatctttttggccaaaaagatggtagtggtcgcatgagggttatggacccttggatgacttttctcacttttatttaatatatggatgttggaaacccatgctttggccaaagaaactcctcattttatgtggtggtcgaccactaccaccatttgtgccagaaatgtggcaatggttcggcaagtggtttctataccacatggtggcttttctcacttagttttgacatgttattgatgaaaaagtatttttggcaaaaaatcttgtccccattcaatttggtcaactactgccacaatttgtgccacaaagatggcagtggtcgactaggcttgtcttttagtgagaaatggtttctttcacttgtgttgcactccttggtgttaaggg

SEQ ID NO: 36684 - DNA, 4345 bp, Cannabis sativa
  modified_base (30)..(31): a, c, t, g, unknown or other
acgtgcctcgcacgtaattttttgctagtnnatatatatatatatattaatggacttgttttttttttactttaagttaatgggctttgttttttattattgaaaaaaaaatatgcttaaaaaacacatatatcattttaaaaatgaaaaaaaaaataatataatagaatttattataaaaaattatattatgttcataagattgtgtgttagcaggtacaatttattacatttggctaaactgaaatttgtgtataaataagaaaagtatatgcatccatgttgtatagaatagcattgaagagagattcaaaagtagaattaatcttgtacaggaaatgaaattgtcttgcatattaaattgttcttgaaaatataaaagagttataagtttctattttgaagggtaatttctccttgtggaagtaattggttcggtttaattaatagaaattatgttttttgataagaaaaattaataaagtaaataatttaaaagataattacagcaaaactatgtatttaaacaaattcgtagcaaaaatacttaagtaatcaactttgttatagtttacttttatactgaaaggtagaatttttttcaaaaatattgtatttttttcataaatactgtgtaagtttcatactgtgtactgtgttaaattttcactattgttttacgatttttttttagttgttctactgttatttttaatcgttctgttttgtagttttactgatattttataaaaagacagtattcgtgtaaaaaattccgtctcacattaaaattgtaaattttaacccaaaatttaatatttttttttttttgtaaaaatcccaaaaaactttccaatgctaaaagtcatatatatggaagagagagagagttgggcggaattaggattagaaagggtaggtaggtaggtagggttgaagcacttagtagacttttgttattttatatttatttaatttgtgtagatatggaaggaagggtatagtattagtgtccctcttttaggggtggacagaaactagaaagggtttaaaaggcggctttagtgggaaggaatcctgaagtgggttttaacttttagctacttcaattcaacccatatataaagtaataaagcaataccaatatatcaaatattaaaataccaatgccccctcaccatcaaatgctgcctcaataatatatttttaattaggatgtattaacacattagaaataaaagaaaattacaaaatttaaaaaaaaaatatatctaaaaaaaaaaaagaaaaaggacaaccaaaatatataatcttattcagattactaagatataatcttattcagattgaaaaaaatataaaaagaacaaatattataagaaaaaaatacaaattactaaaatataattttatttagtttgagaaaaatataaaaagagcaaggattataagaaaaaaaaaatacaaattactaaaatataatcttatttagtttgagaaaaccataaaaagcacaaggacaatgggaaaaaaaattcaaattactaagataatcttattcaatttaaatatataaatatatatatatatatatatatataaaacatggactataagaaacaaaagagcaagaagtttgacacatgcacatatttttttaaggaaaccctttttttaaagaaccaaaacaactgttacagacgaatacagaaaacgatatgtccaaatatttgcacctacaccactagtaacagaagtagctagtgtgtgagaacgccattcgcgaaatacaaaatagtattacaagaactactactaccaccacctaataaacaaacaaatctcataaataatagactgataaaaaacattaagattcaggttattaacccaactaacaacaactgttgaatcacagtcaacccgtaacaaactaaaaccaaaccgaagagccatttccaagtcaagccgtacagctagcagctctgccactaggaccgcaaaatcaccaacagcgccgacaacccacgaagcccacaaaaccccagatccatctcgaacaacaccacccaaattaacaaaacctgtacctggaaccaccgcagcatccgtggccaatgcaaagccagccaacggtggcagccacctagaagaactttgcaaaatagtctctatagccacctgaaagaagcatatctccctatgatcttggaactccgacagtgcatcaaatgcaagctcaggcagaatatcaactcgcaaaagtgtacccccaaacaacattgaatttcttcaaaccaaacccaccaaaacaacatcaaagctcgctcaaaattgccacgagaaagcacctcagacaagacccttaatacctctgaaactagaccaccaagacacttatgtaagctcgaccaaaggcccacccgcacccacatctgcactaaactagaacaaacaaatagagcatgttctggtgtctctgaatcatcaccacacctcaaacaaatcagcgacaaaagaatctttcaaaatcatagttgggaagccaccggtaaagctaagttaaaaaggtgccaaacaaagatcttcactttaggcgatatattcaaattctaaacaatattccaccatcgagtcataggagtggtatcagccaccccgtcctcacattgtagtgaccacgctaaagaatagccacttttaacactatacacaccatctctatcatagtgctaacaccatgtatcactccttgatccccttgccaaaggtatactcagaataacctccacatccatagaaataaagaaacgtcgtaacttcaaaacatcccaagacctatcttgagtaataaactcactaacccgattgtcatcatcgcctcattgcataatagttttgaaagtctgaggtctagggatccaaggatcaagaaacgcttagacttgtgttctgtcgctaattgattatctaattcccttatttaacaacttaagcccccaaataaggctagaccataagtcaaaatataatttttagtgagtgagtgacttgtcttgtctagcattgatgtgacttgtgaagaataagtcgccttgtttagtgagatttccgaaaatcaattatttgttagagctaaagaataataatttaaagacaaagagaacaagaataaccagaatttttacgtcgttggagcattaacgagctttagtccacgagtcattattattattatcatgaggctagaaaaatcttaggacaagaagatatgaactctctattttgcatgagaaaagtaaataataaaattctaacccttttgcatgtagggttcgttgcatatttatagtgcgtagagatcatattagttactattttttttttctctaatggggtgtttacaaataatatattaactttggacttatctggtgaagcctggcccatgaggcgccttgtgtatgctgacgtggagccacatcacaataccaattgttaaaacttattttatcttcgtgggaattaatgacacattaactacttgattgccaattactatctttgcttattttgcaagatatgatcttcctttggagattcttggaaagccatcccgaatcttgtgcgatttggtagtaaataaaaaactatgcctggcttctagatacttgctagaggcttcttccggccacgcagttttatgtcttccatacgctgaccattctagatggaatctcgcctagacgaatcagtcattcctcatcccattaggatggtcacttatggatccagctagtttttttttatttaggccaactattgggtctgtaatatttaagttgtatttattaaaggttgggttgctccttactgtgtggatggatgggtggagtgtaaagctaaaactttcaagaattccagattaccttcatctatagttgacaactttctatttttttttaaattaatgctacacatggcatcacattattgatctgtagagttaacttttcaacatcatatttcaacacatggcatcacattattgatccataatctaaagtcattcgtaccagtttacttttcaacatcgtatttcgcgacagccatgattacaaaccttgctctgatacaagtttgttgtgcgaaacggaaacaatcaataattacgatttagtttacaataccaacaaacacgcaatacaatcaagaaataataaatcaagagatctcaagaataacagaaaagaataacaccggtgtaacgccctgtccaacagggacgccacgtgtgtgcactttatttaaaataccaataattatataagatgtaattatacta

SEQ ID NO: 36685 - DNA, 8403 bp, Cannabis sativa
  modified_base (4644)..(4646): a, c, t, g, unknown or other
  modified_base (8285)..(8304): a, c, t, g, unknown or other
  modified_base (8354)..(8358): a, c, t, g, unknown or other
ttattcataattatctaattagggttttgctaatccacttcttaattctaaggtattacagacccaattagccatccattcttggtcttttttaatggccatccatgcttcattagcaacaatctctataattagttatttaagctctgaagggtcaccgtgaagtaggtctttgacatgaaaggcatcgatgctctgatagggagccagcaaaccaactttcctaagcttggacatagtgacaatattttccactcgtaagtcctcaagtgaaaaactttggtataaaatttgtctaagctccatgaaaggagtagttggcggacgtgtaattgtatctagaggtaaaaaaaggaagaaatgtcataattagaacctatacctagaagatgaagagagaatcaaaatagagacatttgacatcacttacttgcaatactaaaatctaaagagagggttggacgcctcttcaatcgaaagcctggggcaaagaaccaatattctcaaaaatcattagtatgctgcaccgagctgactggacagatcaaggacctagaatacctctcaagatagcagaatcctatcttgatatacctactaccatgtcaaattctatgaagtagcttctgagcagaagatgcattcccatttccacgtgggcccaactttagatgctgaaaccaccatctgcgcatttgtagggtgattctccctagacagaaaatctattccaaaataagctttgaacactttcaaggccacaattcatctcatacttttggaggtttttgtaattttggaatttgttttgatacttgtccatctcctagtgggaagcgttatacactatcctagtatctgtaacttcctcctccataacttcgatttcctcatgatagtctacatccaccatgataggatctaaaaaagaataagaaagaaaatcaccaagcaattagataccaatactaaagaagatagtagggacacgagagagtcctctcctataactgcttggaaaggtccccaccggaccttacatcgggaatcaaagactctcaaagagcatccaacctgaactatcaaattgggaacataaaaggccaattgaaaggaaaataaatataatcctaaaccataagggttcccaacaaaggaaataaatttatccaatcttactactaaaatttggctatttttaccaaaaatcagaaagggtctaattttcacagtcttagaatctactcaatagtaaagatacaatgtaagctccctattctacaagacaatcaatatcagcccaaggcctaaatcccatttattaacaaaacacaggaaacatgcaatcttcaataacaagaacactagtttcaaacattaaccaagattcaagaaatgtgaaatgaataaactttcttggtgaagaactggctagcgatgaagaatttgaaggaaatagaggccttagagaataaatactgacgtcaaacgagggcgttagagaaatatttgatatgaatggtcaatcaagaaaagcaaccctagtttgaagggcatgaacttgattaataagttcatcaatctcagcgttgatatctagtattctcaatgatagaaaaaaaatcagcaatcaggactgcgtggtggtgcacttggatcctctcgctcacaaatttgaagaagaatatgaattcaataatcaatgtaacgctccaaaattgtcttgtttgtcaccgtctcttcattgcaagtttgaacttaagttgaagtttgggtaaaagtgacaaacggacctatttgcctcatatttatgcatacagatggcgattcgtgtgattcaagatcaacgaccaatgttatgcttgaggaaaaacaaaatggaaccaatagttttgaaaaattgatagtcgggcatataatgtagtgtttcaaattgagaatatccaaatgatgatatttttcttaagacttgcactgatggaaccaactaccatttcaccaaatctcaccacacgcgcttcctcattaaaagttatctctacaatccgataagacaagggcacatgtcactgtatttcaaaaaatgaaaagttgttaaccacaaacaatatcaatacgaaattcctaaaggtttcatctttagcctccacttatccatccgagtggaaaggagcaagctttcgtaaccccttgagttcaaaaagcttccagggtaaatgttatccgtgttctagataggaacgcgttgaatgcctataacaaaaatagtctaaatacttaagacccaatagtgggcccaagtgagatactacactggacccataggcagtcagtccttccggataagtaggcaagagacccatacacagtggcatacgtctggaagacattagggagcgcatttgcgagaagtgaacagctagtatctggatgtccagcttagaagtatcctcattaattatgatatctcgagtatcaagaattagctcccaaggatctcgtctaaagattgtatcttcctaaatatgaaaagataatagttagcaattaagcatctaatgtatctttaattctccacaaagataggacacgattttgacaactatcaatatgatgtggcatccatatcaacatgcttcatgcacctcatgaatcgagcttcactaaataagcccaaagtcaatatgtaactccagtagtggaaaaaaaggtaacgagtatgaaccctacacactataaatacatgaagaaccctttctgcaaagggttagaaactcattcctcaattccttaggaaaaaaatagagttcataaattcttgtaaactttaaggattttttagctttaaagtaacaatattgactcgtggactaaggctcatgaacgccctaaccacttaaaaatcctaatttttgttttctttatctttgattaatttcttttgctttcacatacaataaataagtctataactaaacacaactgattgatccaatcataattggattggatcagatgtaaattttaaaaatctaattggattagatcgattgttgaatgagatatttgatccaatatttaacaactgaaccaaactgatcaaattatcatccaattatatatttatatatttgtaaaatataattgttaattttatatatttatttattttgtttaaaataaatatacaaattaattttattcttaatattgacctgcacacatgagatcacataaaaaatcctaaatttaaaatattacatattatttttctaaaagatagctcaagagtgatttattgtataatttagatgatatttgtatttaatgtattgaaattgtttattaagacttatgcttagattagatttgtattgtgttgttatattttgattatggcatcatgataattaggtaagactaaattaactaatatttataatgtatgttaggtttgtgttttactactatgataattaagttttaaataatgtttatgtataaattcgggcgcgagaagtcgtcaggctttggtatggaccctattttcaaacattcatatctccttcattttttatcgaaatcgaattccgtaaaaactgaaattgctttatttttcacaaggaatccaaataaattattttcataatgaaaataaaattaatctaatccaattaaaaaaactagttaaggcatctaatggttagaaccaattcaattcaatgcatccattgaatgtaattagatcagttgattcaaattgattatattagataagtagacaaaatctaacagctaataactagtttgattgaatcaattagatttgaatttattaaatgtgattcaatgaacacccctaattaacttaaataaatataaaattgaaatctaataaataaaactggctaatctgattgctactttgattggatgatgatttttaaaattcaaatgctaattcgattagattatatagaatacaaatgttaaatgacatcagataaccaccctaattattagacatagatttttcttcctaaataatttttatttattttggtaagaaataattagtacatcttaactttcaaaaagggaaagttatcccttccgagtctccaactcactgtgttagctggtgccctccttctcaagactggcgcaagttgaattgtgatgtaaaagtagggatcgaatatatgtgtattacagttgtagctagaaactacctgagtgaggtagtttgggtgaacacgataaaattacaattttcagatgcattttgttgtgaagttgtcgttgcttgcttggctctagaagtggcgaagaataaaggcagcaagtttatcttggttgaaagtgattctaaggtagtgatctcaattctatcaacggcatggaacctaggtgaaaaattgagaactattccttattttgtcaaagaatcagttcctcttttgttaggagtttattttgtaatactctaagaagttataattttatggtccataatatggttataagtgggcttttgtccacaatcggtttgggcgattatttattttgactattcttgaagatatattttgtaatgaccgcgaagtctaactctttatattatttatatttttttttttaaannnaaaaaagaaaaaaaaaaactttcaaaagggaagatgttctcaaattaaattgtggatatatatatcgtactgagatataataagcatctggactgtgcttcttagatgtctctgcttgccgcatactggccagtttgacattaatttatattcttctttgagccattcccattttttttaatattacattacaaacactataattaagttataacatttaatgtgacacttgaaacctcttcaaaaacccacacaaaaattaattaatgtacaaaactaataaagccactcaaactaccaagaatcgatgtcgttttcgacaggtaggcctcaacacaccaagccgaaaacacattgtgaattaatactcaacccaacccatatatcaatgcaacaataaatggaaaatgtattggcattatagcttaggcgttgagttaggtgaaaataataatactaataaatatgaattacatataaaggtttcttcaggaatttggtcatttagcttgttatgtatggtagataaaaaaaaaaaaaaactggtcataaatcttttagggttttgctatacattttaagttgaatgaacattgataatgttaaagggcgctctgtcgaacatgtcattattaagtgattgtgtttcctagagattatttttcttgttggctaaatgttaccgtaaaattatatatattttttaagtgtcttttttaaaagatatatatatctataatttttttaaaaagattacatatataattgcattcctttctatataccattaaactaataagtttggaaaaagatgagagaattggtgcagtataggagaaatgatgaaaggtactagtggtgtttagtacttttttatgggttaatattattattggatcaattaagtatcgagtctcatataatttaatgtaataacttttaaagaatattattagccaatcgcaaggaaagatatctagaaatactaaacactacgagcgcctaataacaatgttctgcagtatagagcaataaagaaatatttaaaatttcatttaatggagttcatgagccaacaccaaccccaaatgagatgaataatattaataatagggagatttcaaaatatttaatattggtttgttggcactggtaagttacctagcttatttattaaaagcaaaatccctacttttacaattaacacacattttcttttttaataaatattcacacataccttttcaaagcaaatattcacacatatttattgtacaaaatgcatttttcaaatttagttagtaaaataataaaagctacccgtagtgtctaatactatttaagatgttatatcattattagtataattaagtatcaagtctgtataattactataataacttttatgaaatatcatcaaccaattataaagtattacatataagtagtgctgaccacttgtgcctcattgcaatgcccatttaattatttatgaaatgtaagagaagtgtcaagagaattgagcaaaaaaaaaaaagtgtcaagatatatacatatattgttagagatgttacacatttatatcaagaaattacaattctaatgtaaaatagtataaaaataaaataaaaagaataattaataaatgttacaatacatatacattctatactatatataagaaatgttaaagatgaaaattacaacacaatatattgtataacatatatagtaaataatatatgaagaagatgataaacactcactcacaaccttagcgtagattagtgagatcaccatgacatgaacaagttattatcacttgtttaaaaatttatttctcatatctctaagtactaaagggaattctctaaaaaataactttgagaattatcaagtcttgtattttttagcaagtgcttgttaatagaaaacttttttatctcaatatcagtatttaggatgtatatcactatttgaaaatttaactcataatctctcatagatgtcatggactcaattaactaaatataaaactcattttccaacaactacaactcttataacattaggaattttaagttaaaatctgtaacacttttttacacatcgtatcaagtaactccaccataagtaataaaatattgataacttgtacttattagtttgttgcacatatttaatctataaattatattatttacaaataatataataattttttagtagattaaatattgtctctttagtaacaaacttgcaattttataatatttatttaatcaattaaaaatagtatatcataatataagattcatccactttgattgaataaatatacaattttatagaaatcttgcttaggtgcattaggtaaaatgtctttcaaattgaattgtaccttaatgtagttactacaaaatttgataaaattttagttaccgtagtattgagctactattcctttagtacaaactggtgatgacacacacacacacccttgttaatgctcacttaagaccacatgtctcgcttatgcaccgttaatggccatgtacaaaatttcaattaatggactctttatagaataactctcaattcttataaaaggcagcaccacctctagtctatataggttgtattttagtgtctcacctctttttagacacttcttaaagtttaagtgagttttcttaagcttaagctccattaaaaaatctttaaattttaacccttaatttttatcgcatgaactcatccgtagatagaaacattgagtgccacattcactatattgacttgttattatatattgaacttaagattatatttttactagtattaagatagattaccatcaatgcatgagaaaaatactaggggagtttaagtcccatccctcaaaaattcatgctttaattctaattgaagatttagagaaagaaagcctttgcatggcaaaagggggagtcaaagtcatagtcacagcaaaggaccaagtaaaggatacatcaacaacaaagggagacctaatccagaagggtcacaagacatagaaggatatttaattgtgggaagcctagacatttcaagaaggattgctatttcctaaacaagaacagaaaaagctagttcaatggacaaagagacaactacaactcagaatccaaaatccctaaacatagaacagatcaccaaaatgcaaatttgagtgactattattaagatggagaagtttatgctgttggatcatctttagagatgattggatattagactctaattgtacttttcatatgactaataacagatccattttgactgattttaggaactcaaaaggtaaagggatactaggaaatcaccaaagttgtgatatcaaaggagcaggaacagtggcattcaagatgcatgatggggtcactagataactaactggagtaagctatgtccttgacctatccaaaaacttattttcactaagtgtgcttgattatttgaaaatagagatcaagatcaaggatggacaaataagatttgcatggggtcaatgacaatcatcaaaggaattaagaaggaaggtctatactatctagtgggagaacctatagatagaagcaactgttgggttttgtgccnnnnnnnnnnnnnnnnnnnntataatcaaatttactaataaagaacagaaatcacattttatgttgcatnnnnnacatgatttatttcatggttatatttaatgattataaattctatt

SEQ ID NO: 36686 - DNA, 4412 bp, Cannabis sativa
acatctcaagaatgaaaaacataatgaactgtatcccctaaattaaagtgtacaagtatgagagtaatgtaaagaagaaaaaaaattatgaagtgagtgatgctgtagtagtaactccaggcaatgctggtgtagcagttgcattgtctgtccaattcttctcaccccaatgccacaacatgctctcccagaaacagaattcctcgaaacacgctttcaaacgcgtgtccttgatcttaatcttccagtgaccgtctgtgtaatttgctttctcggcctgccttcgatcccactccaacgctgctttctgcttcgaccgaagtaagcagtacttgtgcaagttttctggcatggcgtcgtgaactttccaccatgttttgtgtgcaacatcgctcgcgaactcctgtagaatgtcaacgttccagttgcagtcatagtctcggaaacaaatccacggcttgtttcccagatagtgtatgacataaagaattggtggatcagcaccgaagagtcgagtttttgtttcctttttctcgggctcatcgccttcccagtagtgttttaagaagttcatgtgttttgggatcctgtgccaccatgtaaagatctcattaaggtatccttggtccccaccattgtaggacacaatttcattgatgtgatccattaacagctgaaatgtacaatttgatggttcaataaccataacacctgagttaaatagagtagcattgtttccaatggctgatatttcgggcatctcaaacaagaaatcaatgttcctaagaataagcaagtcagcatcaatgaaaataatcttgtcataatccgtcaactgccaaaggcgaaacttgctgtagttccactcgttgtatgcctctggttcagctttcgggttcctaatcctttggattgtgtgaatcttccaaccggctgcctctaaccctcctcggtgatagtcactaattgtatcatcaacaagtatcacaagatctcgggttgaaccagccattcgaatactctgtgctgcaacaatggctccacaaacatacacatgggcggagtgaaggattgtagcatatgcttctcggggcgctctttccgaatgaaagttctctgcttacaactacttggttagttttccaaaagaaattatcaaagaaacaaatttacaataaagagtaaatggctgaagtctaacctttagtattaagaggaactgaaagttcacatgacccaactgggagctgaaccttatccctcaatttattacgatctggttcatacagccaggcattcccttctcgtgtgactagatctttacaagtaaacagattcgggattggaaagcattcggtcacaaaaagcacatgaaccggatgataccctttggccgatgaagcaagccttgctgcttctagttgcaaatgcaaacgagccacatctctcgaccacctccctgacttgtcgcaagggagcttgacagcgataagatcaagcctaggctttccaggaacttggatcctggggacataaggacaagtgggaaagtcaaaatcttcttcttcatcgatccattcggggtacaaagactcccatgttgtgttgcgtgaaacatggtcgagatgcagaactacatgctcagcatcaggtatcagctcattccattgcacaatctcacttttattaaagttcaaaaggccaattcccttgtatgtatctcgttcagtcagcttctctaagacatctgaaatttgatcccaattgatgtctaatgatgaaacataacgtaaatctgcagcattgctctctccaacccatctctctatgtaattaggcctgcattaagtattagactttatgtttcagcattcaataaggaaaatcaaacataacatacaacattctcgacgacagaaggctattccctccaacaactaaaccaaaaaccgaagctaactagaaacgaaaacaagatgagtatgcagatttatcataccgggacagtgaatgtgatagatgttctgtgttataaactgcaggagcaaggaaaagcgtcacaaaagttccgagcagtatgatgacaagtacaactttcaatgtaggtttgtagttcaaattcctatcttgtacaggaattcggaatgctttctcaaaatgtccaaaaactctatttctttggggtctttttttgtttgtgtcttcactgtaaaaagcaattatgtccacatgagaaactttctggcaagtaaaagaatgttcagacagagactataacaaaaataaaatcaaagagtcaaaaacctagcacattaaagattaaattcaaaggttttatcttgaatggcttattcaccactatataataagttttctggctttctaaatagaactgtggaaaactccaacttgctgataaaaacagataaccccaaaaagaagtctcttgtagaaaaaattcccaattcaccaaacacaatatgacaatatataaaaagaaataagaaaacattcacccatttccttgaatatcattcttgtattgtgaaaaatacagatttataaaacatttatgcccaattaataatttttctaccaaaaaccaagtcaacaacaacctaagtatatagaaatctacgtgagtgaatacatatcaaaatgcacataaattccaacaacctaataaagtaaccttgttgagctgcctaaaagagaatagaagaagagaaaaaagaaaaaagtcaaacgcttcaaacaacaggatcagaaagtgaaatgattgatagatacataacaaaaaccaagacaaaaagtaaaatttcagaaaacccaagtaaataaatactcaaagtagaaatcacccagaaaaacaaaaatcccagaactataaagatctgtctatcagtattaagtacattcataaaactgaaattatcatattccataatcaaattaagacaaaacccagaaaaagaaagagagaaagagaaagacttgtatgaagcagacaaacgaagtctgggctcaacaggattggaagaagtgcctctcatgtttatgggttgagtagaagaagaagaagaagaagaagaagaagaagaagggtgatctcatctcatatttagctcctgaaattgagaaacacagaaaacaattccccaaaacattaattaatgtatggaaatggaattttgaaaaacacaaaaacaggaaagacataaaatgaaataaaggagaaagaaagagggaagtgactaactactgagcagcgttgttgtgatctgtgactgcctatgttgttgtttgttttagtttagtagtgtttagtttaggacacaacacaaaacacaactcaatcaaactcttgcttttgtttcaactcataaaaataaaaatcatttgctttgctttggtgaaagtaaaggacaacacttctatctatttcaatttaatctagatttaccaaatggtccttgtaactttttaatttattaattgcactttgactcaagtaatcacctttgactatatttttattgatggtaaatgttaaatgctaatagggtggcgcattgtttagcgcgatcctctcttcatgaggctgattgtatttttaatatttcttctttaccttttgtaatttcttctctggttttggatgatttaagttaatgaagttttcattattattcaaaaaaaaaaactagaaaaaacgtagataaagtaatatctttaatatcatatcattgtactaaaaaaattatattctaattgattgatattattaggagtatgcatcagatctaatttaatttatttctcaatatctgatctaattcaattagtaattggatttgaaaaataatcatctgatccaatccaattaaactttacaatccaatccaattactaattgaattggatcgaatatctaattacacacctaaattttaatttaatataaaaatatgaaaaaaaatacgtaaagattaaatatctcatccataaatataccatcattacaatataatgtaactaaaagtttcaaattattaaaataacaacatttttaagtaataaaatagaacaaaatattataaaaataaatacacaaaacaaccaaatgttacaaattcaacataaaaaaatccaataaaaacataattaatataaattacatttttttattacatatataaatataaataattttttaacatatataaatataattagaaaatttacatgtactaatttttatcatttttctacaaaaataccgcgaggcggtattttttacttttttactatatttttttataagtttcacactgcagtatactgtgttaagttttcactggtattctactagtgtttttttagatattctaatgttgttttgagttgttctg

SEQ ID NO: 36687 - DNA, 4314 bp, Cannabis sativa
gatgatgatgatgatgaaggaggatatgcattcatttgaatatgtggctatggcaatgtccacttccaaattgcctttgattgggttatatatattttttgagccactacttcataccaccaacaaattcatgatttattgcgatatatggcaattataaggctcaacgagctagaccccattaagaataaaaatatatattaattgttatatcaattatgtatcataaaatgttgcagtctaattaattattggtctgactataattgaaaaagtagtagaaaatagaagatttgtatctcgggtagccaaattagttaaaccaattacaataattaatcatgtggttctaatctctttctatcgatcgatcgcttggctaataatatagtttcaactatatatattagtgaatgagacaagttccagccttgtcatactcatgcatcggctctgaataagaactcaatttattaagactgactcatcaattaatgtacatatcaataatttaaactagaaattaataagacttacaaagctagactcttaatttaattagctcaaaaaaaaaaaaatacagaatttactaaataactcatgaaattataaacggaccaaaatgaagatgcactaactacgttgccatctcgatgattattggccaattagtactcaaaataataatctgataataatgctatatagcttaattattgaattgagtttgacacgaaggatgatatgaacacatgtggaaatcattttcattttctttattaattatataaataggaaagtgagtgaaaccaagttttgcaaataatattaattatatttcattacgtgcaacaacaaccctcaatcagcttaatttcatgttaataagattgtcccaacattttatcctacaatattacgtgcatgtcacatattaatatatattcattaaaatatactcaatttgttcaaacctatagtgctacatatatatgaaataattcactgattgaagaagaaacgtttgagtctatcttcctttgagttggcataatacaattaattgttaagccttttcttgttattggttggcttaattaatcaattaattaattatctgaataatcaaccacatttaattacgtattataaaaactcaactaatctaatttaataattggagcagccactacatgacatccatgagtcaccccatatccccactcctttaaatttcaatgtttacaaatgtctaaaagctagtaggcactccaattttttggccaagaaacaaatattgtggagacaaattaatttgacatgctttttaattagatgttaacattttaaagtaagataacaatcttttaaatatgttgattaaatttagtcaattcactgccaaatcattcgagcataatttttggttaaaaagcttatttattaaaaaacattaaatataaataaaatattaaataaatcaattggggttctatggtgtagtggttagcactctggactttgaatccagcgacctgggttcgactcccggtaggacctctttaattttttaaatttaaaaccaattattactattttaatatttttgtgacccttatatatagggctgaatcttcttatccaatttttccttccctttcttttctgccccaaatttccgaaatggagacttacaaaagcctagaaattatacagaacaaggaagattcatcggtatttcacctcttactcaatcgaccatcgaaacgcaacgctctctcaccggaattattctccgaatttcccagagccctctcgtctctcgaccataaccctaacgtcaacgtcgtcgtcctttccggagccggagacaacttttgcggtggaatcgatcttagtgagctaaaggcctccgaacgtttcctttctggcgaccgaggtcgtggcggggagaggatccgacgacacatcaagggtttgcaagattccataacagcgatcgaacggtgccgaaaaccggtcattgccagtatcgagggtgcatgtatcggcggcggaattgatattgtgacggcatgtgaccttaggtattgcacaaaagacgcatacttctcggtaaaggaggtcgatttagccatcgttgccgaccttgggacgctccagaggttgccaagcatcgttgggtacggaaacgccgttgaattggcattgacgggccggagattttcgggtccggaggcgaagcaattgggtttggtttctaaagtattcaattccaagcaagaactagaagagggagtgaggatggtagccgaaggttagttagtatttttagacattgtctcattcagtttaccaaaatgatctgattttaacattcattgatcattagtttaaatggatcaattataatttaaaagacaaattttgagtattgggtctgtgaaaaatggcaggaattgcttcaaaatctcctttagctgtgactgggacaaaggcagtgttacttaaaagtagggacctgaatttggaacaagggttagactatgttgctacttggaattcgtctatgatgttatctgatgatttaaaagaggctatctctgctcaattccagaaaagaaaaccaaaatttgccaagctttgatgagttaaagctctcactttggtacgtaacaacatgttctcttcaatcttacagctctttttagcttggttttggtgtgttgtattaaatgacacttgtaattttgttgtaattaagcaatgccaatactcacgcagaatggtctgaaacttagttaattttccaataagagaaagaagagggtttcagttagtacttttttctcattcttacaatatgaaggtgagagaataccggaacttatacttaagaattcaatgattcaaatggctatgatgagcttaaatgagcccccaataattgattgaagttggacagtttgtgggaaagactaattcgttaacgtcaagatattgtcgttttttaaaactgtagtttgttttatgacattgtcgtatattcatatgacgtccttttcttctccctttgtcgttttttcttcaagaagtccacgcgttcatatgatatgaatgaagattgaaagtcaccccctcatatgttgtcgttttttcagggtgttgctgatttcatagatgttgtcgttttgtagtgctgttcaaattgtcgttttttgtgggttattgtcttggccagattaagtttcaaatcccctaatatgcggtagtcgtttatcgtttctacggttttacgtactctatcggtctatccttacacatactagaatattaatttatttttttattttacatcacatttttatatggtacactatatagttaaaatatttaaagaataaataaaacatttgaagaaaataaaaatgctttagaagagtttatatcatttgttagaaggtctttttgcttctttgttctttaaatttttaaataatctttattttaaagaatttattgggagtgcttaacctctttttctgtacctctgctctgtccatcgttactttgtacctcccaggatacaaacaaatttaagatttagaatgattataattattgaaaaagaaatgatattaaaaaaaaagttgcaggaaaatatctctctacttctatttcctactcctttctcgtgccatagtgtgttgttgtgttttcatgtgtagttatatgcttaaatgatgtctttcagtgttcttttacctctaaatcaagtccgagagaactactcgaggctagctcaagtggctatagagggtgtgtgtaagtcctgagttcgagtaccgattatgcattgtgtaatatataaacgtttaaataaaaaaaaatgttgtggagtcaattatagccatgattgtatcaaaacttggccaaaaatcatttgagttaaataggcaaagtgaatttaaagaaaaaaaaaaaattgaccctgcttatatataatcgaaatcgatagttaataattttatctatttgcaagatttctacatttagaccacaaacatgtcaaaatttagcaaactcatatcagattcagacctttatgaatcacttgtacgtaaataaagataagtttcaattagatagtccatcaatagtcacgtataagtgaaactttatgaaaatatgttgccacattacttggctagattttaagacataaattataaaggaaataatcatcaaatttcaaatacatatatatttttataacaagccacaaaattgttattattatttgcacacataatc

SEQ ID NO: 36688 - DNA, 3519 bp, Cannabis sativa
aaataaaacaaatattccgtgcctcggcacgtaacatctacctagtgtgtagaaaagtcgtggagccagccgcacttttcagtggggcaaaaaaaatttcctttgttaaaggagtataaatgaaaaatataagttgtataaacataaaaaataaaaatatgtgaatatataaatatatgaaaactgcaaacttaataggaataaaaataaatttatgtgagatgaaaattaaattatatgggataaaaaatataaatttgatgggaataaaagaaaaatatgtgaagagtataaatgaaaaatattaattttaccgggcaaaaactaaatatttaaaaatatataaacataaaaattaatttataagaaattgagggaccccgtaataataataataataagtaggtataatttcctttgaatatttactaaaatttggtagtggttatacaagaatttgtgtcaagcaagattattgattaaaattatttgtgtcaatataatatatatatgaattctatcttaaaataaattagttttgagagcagtagctcacatatcttattatatttttaagctttcacataaattttccttgagagctcactaattttagacaatataatcacaaacaattctttttggcttgtgatttccgaattacaagtaattttgccaagaactcgtgaatcatggattcatttataaaatgtctatcaacctttaatatagtcaaatttgataggtaatccttcttttgctattaattagtgtatattggttagtacacatctgactatcttcaaagttaattcaaattttaattagtgcatctataggttaatacctatattttttttatactgatataataattatgcagccccgctcctattaaatatttggaacaacataaccataaatttgaaagaaaggcaatattgactattcgagtctagaaggaaataagtacagtgtcagtaaattgacacttaattagttcagtaccaaatttatcagctaaacacaatcttcatagtactactagttgttcttaaaggagattacaacccaagaaaacccataaattgccttacattttttttaaagcaaaacttttctttctgggaaattttgcatcaagcgtaaatgcacttaccataacctgcaaaatcatcaatacaataattcgttttagtaaaaacaaaagtaaataaacaaccaaataataacaggataataattcaggacaattacacagcaccaccgaccaaattatatgactttttttttttttttgagaaaataataaaaacgtttaaaaactcattttgtagggcatagtactgtctcataacccataaaatagaattaaatactatgaaattaattaataatttatgaatacaaacaacttgttatcatcacatttcaaaatcaggcacagaaattgttgtaaaagaagttgccatatgtaattgaataatagatatattttggcgttattgcttacttgggtcggttacaacgacaagagcagagtttctgaaaatacaattccagcggtttcttccattggcttggtagtagagattcatggctatggaggcacggttaatgaggttgtctggtaaggaacaagggcaccccttttccatgatactgcaatccacttgtgaacatgcatagtctaaaattccttgaagtgctgctgcttctgttgatggttttgccacacaccaagttttctgttcctatatcatcaaattataattattatatattcaaccaacaatatgcaacatattcttcaaaattaatgtatgtatacctgtccatgcaccattagcagagtttctgcaaaaaggaagaccaaagttaaatcagagacatatattgcatgataaggcaataattatgatgatgttgtgcccattttgaaaggaccccacttgaggctaaatcattttaattaagaaaagaaagcaacccttaaatgatgaaagaaaaactgtaccaaatttaattgaatcaaacaatgcagagggcacatgataagattaagatatccaataattatatcccaccaataaattaaaatatttgaccctaagttccaaaatagtagccaaagttaaattgaaaaaagatgctatgtttggatgcgagagtttagtacaaaaacattttactagagtaaacaatagtgaaaagtatggggaaaacattttcctaaaattttgtaataagcttcattttatcatttctctttctgatttgatataagattttatttaaattagaaaaaaaaatctatttttctaagaatataatctctcatttttcttaaaactccaaacaaaagaaaatgaaatgctttggaattaattcatttgttttccccctgaaatctgagttccaaactggttaaaaaactgaaactaaaaaaatggctcatataataaaatcaattaaaacatcagtccaaataaaggtaaccctgagaaaatttatctttataggagtcataactcctatggtgaacaaacaaacctgaagtgaaggataaaaggaggagccaaagggggagagccaaagctgctttattagccattgatttgtactatgatgactttgaagactactctagcaagtatatatagctgtttaagacaaacagagaatgttagaagtatggagtgaaaatgatgaatgaaaaaagctacttttaatggttgggttttggttacttgagtataccaaaagttgaggcttttaaactgaaatcaaaaggtgtcaaatgggctaataacggctatatttatggatatgagctgttatatatagcctaaacggggattaagaaataagaatcattttgatctcagagaaaatggaacaagtggaaaaggtgagctaagaagtgattggttgggcgtgaactttatgactttgattagcttaattctcttttctctcgtaccattgtcctttcaaattctctttttgcaattggacttggacctctcatcttatgctccttggatttaccaaaagttaaataagctttagtcttttggctttctcaaaaaattaaataaaaagctttggccaacattttaaaacgaaaagaaaggctcacatttctgtgattaattatattcctggattagtttatgttgagatgaatttgatagttttagcaatggaaaaatgttatgtgctcagtttacactagatcatgttcgtacccggcttgtaacgaacgtttgtaatttggacaaatatattgtaatattttaaggtagttgcaaactagaaatgcaatccccaaattccaagcattaaaaatgttgagaaaaataacaataatagtaataataataaaattgtgacattccatttcatttttcaatgttattgttttgtttattgggaagtaaggagttattgttgtgtggattgtgatgatgcagtcttcaaacttcaaactttaacctttttcttttttgatgggat

SEQ ID NO: 36689 - DNA, 3928 bp, Cannabis sativa
aaataaaatcccgaaaagcataactgccaaaattcttattcttattcttatttttattcctacaatgatgaggactatccctataccgaataggaataggataattccacctataaataatctcacaacgcaccatttcatttcattttcaacttcgaatacttctctctccaaacaaaccgaatacatttctctctctaaatcaaacccacacattccttcgtcttcaacctttttcaatttcgtaactttcagagttacctaaagctactactacttcacaagctctaatggccgatcgccgagtcgaaccggccgacccttttctcgtcaagtaccaaccttcagagttaaaaatcgcttccgagtttctcacaacttggcttccttttctctctagagatctttgcagtagttgcaccgacgtcctctctgatcgaattcgctctcttgaattaggtatttacccaattttgtgttaattaattattattagtatgtcgaaagttttgttttttttttcttggtttcaaagctttgaccttattgatctagaatgtttagtaatttctctattagaatttgaatttgtgttcttttggattttttagggttttcttttttggattgttgaacaagtatttttttttattaaatgttgcagaggttggcggtgattcagaattattacaatcggataatttgaaattgatggaaaagactagtgataatcaaacggaaaattttgatgggaattcaatagggagtgggaaagataaggaggatactaattcattgggtagttggaaagatggggagaatggattatcaagggaagggactagtgagccttcttcttctagggagactcatagtcctcgaatgtcttgggctgacatggcacaagaggatgaacttgaagaagatggtggggaagatgatgattgtgatgttgaaggagaggatgatcaagaatcgagtagtaagcgagtggttaatgttaattcttcaactggaaatctgaggatatctaaggtgattgaaaagcccaagctgtctagggagcagagggagtacattaggttcacgagtgtacagaggaagaaggattttatctgtttggagaggatcaaaggaaaattagttaacattgttgatgggcttgaactccactctgggattttcagtgctgcagaacaaaagaggatagtaaattatgtttacatgcttgaggagaaaggcagaaggggagaactcagaggttagtattacttactactacatgcctttcctttttttgatgcttaccattgctttatgttataaccacttaggtagaatttactcctaaaagactagtatattagaggaacccagcccaactagttactagttataaaccaccaaccaaggtagaaattccatatttgtggaatcctaacaaaacaatacacctcctgttatagccactctgttgtggtccactctaggctttgcatgtcgcccattttgcgacatcggtcccacttgagtgggtgcatggctttgataccatttgtgataaccattagataaaactcactctcaatacataatttaagagggtgcccaaatacttataagctaacaactaatgacattttctccaagtcaaaaattctccttccaatatctatgtttttactatgcagactgaagggtaatatgaagccattttaccctggttgtttttattgcttgttaagcttattcttttatatattgaatcattggggatcaatatcattcgattattgaaatgtctcaaattaggaactctgatgatgagaaattttgataaaatcttggtcaacagggaagaactaaaaataaaacctgactccttccaagatttgatgccaaatataaatattagcgtgctcaccttgattgtgtaattaagtatttttgaagaatatattgttaaatacttgttaacttgttcttttttttgttttgtttggagattataattgtgtcctcagtcccttaattccttatgtcaaccttattatcatgtgtgtagaagaagtaggtttattgaaaagatttaactgtttgttgtctctgaacttcatgcagagcgtacttttactgctcctcaaaagtggatgaggggaaagggacgtgtcaccattcagtttgggtgctgctacaactatgcaacggtgtggttttctactgttattattatcttttgttttttgcagtatcaatataattttaagaagacctttagtgacaataatttcctgctaacaatttcacttttggctagcaggatagaaagggtaatcctcctgggattctctcaaatgaaaatgtagatccactacctgatcttttcaaggtcattataaggaggctagtgaagtggcatgtacttcccccaacttgtgtacctgacagttgcattgtgaacatctacgacgagggggactgcatacctcctcatattgacaatcatgactttgttcgaccgttctgtacagtatcatttcttagtgaatggaagatgatttttggatcaaacttgaaaattgctggtcccggtgagtttgatgggccatattcaattcctctgccgatggggtaagttagtatgctgtgcatatatatattgttatcgttggttgccttaagtcttgtcattttatttggtggctcattctggaataaaaaactttaaatcttatcatcacatttattcttacagatctgttcttgttctgaatggaaatggagccgatgttgctaagcattgtgtgcctgcagtaccagcaaagaggtaagagttgaatctgttacaaattacagtatccttgttcggtttaaatttgttgcaccgatgtttatcttccacaccttttgtttgaaattatcaggatatctataacatttagaagaatggatgaatcaaaacgaccaaatgactatgccccggaacctgatttggaaggaattgtcccattgccttatgatgttgctgccgagaagacaaatggtcctaaagtagtggaccaccccagaaagagatattcagacagaagaggaaatcacaataacatggctgcaagggggtctgctgggagaggcgatgtatcccaacattcggattatcaccacccaattcggggtcaacgaggaccagcaaattggcgaaggtcaggttgaatattcacaaccggtgcatacccgcaccgccattataattcttagatagctgattatgcttgtttgaggctgtggttttcttatgacgagagaggtgtgtgtccaagggggttatattacaagtgagtgaggctccaaaatgatctgaaagcaggcgtgattgggttttgcatctttgtacatttatcgaataggtctaccatattttgttttgtcttagatattttttagctgaccaatatctataaatgattacacatagagagagaaagagaaactattattcatttttattttattttttatccctttgccttttttctttctgttttcctccatttaggaatttttaattgtaaaagtgagtcttatctttaagcttaaaaatgtctggatttcatttgatgagtattctcttgtattgatattgattattatatgctttgtcatgtgttatgttgtggttgaattaaacaccttattgggtattgaattaatgttcattttccccaatcaacaagtattttatgataaactcatgtgtgttggttatgaacattccatctatagagttctttttctaaacaaaagagaattacttggtgttgattccttcccaaatctttgggtttaggacaattgtgaacttgggtcattggtagatttttcatcttattaaggatggactacttatgcaaactagcttcttataaaa

SEQ ID NO: 36690 - DNA, 9002 bp, Cannabis sativa
ttcgaatatagcgtgcctaattatttagggcgatacaagtgtcttccagaccaatcctcaattctacaagataagtgtgggcttataggattaaattgagggatgaattttttgtcacagtgtgtactcaactcatgagacactgtgacatgagatagatggaactcaccacctccaatatgagaatggcatgagagagagagagagagagctgagattacgactaaggtttagagttttagaattgtgtcactcaattctctatcaactatatcttatgtgtatcatatatatatatcatatgtatatataaatgtatttttacaaaccctataaattaatccaatacacttcccatgcacaatgtggtatagaggttatatatttcaaagctccaataaactctagactactattgaactcgtcaataaaataaccttttttattaattctattattactccgctataaatatgaaattacactctctgacaatataggattatatttacataatttttctatttgttcattgatataatcaatataagtagttcgtcctctaattattaattcataattagagctagtcaaaattactattttatgcctctaattatctcttgaatttcttatgtgccattaattcaaggtgaatagttaatctataaatcccattatatatttggatccaagtatagttactcctagaactaacactataaggaactaatatttgatcctttcggaaagcttgaatttcatgattgacctagtcattcatgttattaagttctcaaaatagaaattgtaagaatcatcttctttgagaaactttaatgagtgaattaaagaacctaatgaatacaaacttgagttcatgaatactcaagattcagactgatctactaatgattataattgtgacataaataattcttttaagataaatgaaacattgacaaaagatgctaattcatatcggcccagtaatgcattatcaatttatataaaatacttttactaaatgtctatccacatatgtgatccaaataaatatcacatgccactaaataatatttcttaataaatcgtacttggtaattctatcttaaagattccatactttaatacactaccaacttattttattcatatagtataatcttacttctcttgtacttccttacaatatcatacctactctttatcattttggttttcaaatatttattaattatatgtctataagtaacatattcatttatcttatactagtattttctatattctctaatatattatccattaagtacttattgttagggtatacactctaaaaatctctcacttggattaaaagtaagtgcaacatcttctacaactcttatagatgttattctttattaaactattcaagctaagtcttagaaacaaggctctccacataatgtagttacagatcctagagacaaccacactatcattggataaaaatacaaaattgattttttgtatattttttttttatttattcttttatttcattcaggttcacttctcttggttcataattaaatattatagaattactaaatattcaattccttttcaaaatttgaaattgaaactgttatcccaaattttatctacctgacatggcatgtccacataagttaagactgaggacacgtggaacacagcttattaatagtatggcaaagtctccttacaaggcatagcaaaatcatcaagcaacaagaaaaaggagtaaagcaagttgtcaagaagctacacaaccatgtctagatgaccaaggggagtacaggtcagccaaaggaagcttgtatggctcgccatggtttgagcacaagatagccgactaataaggtgattttcaaacaaagaagggcttgttagaccaaggaagcctgaccttgcataaagttgtataaggaagctactaaggttggccaatacctactaagtttggccaacacatactaaggctggctaacacataataaggctgaccaacacatcccaaggctggcaggcacatggaaaagctagcaggcacaaagaaagctaggcccatcccgaggatgtaggagcaatatttggctggccatggtgcataggtcagccagccagcctccagcaaatggtaggatagccaactcctcttctagcagacacttttggtgtgtttgtgtctttcaacctagacaaacactctcaactatgaatggacttcaacaactcgcaagtatagggatttaacatcagttattaacctattttttagaaacaactaataggttattttctatatatttaatattcaaataagaggcgatatctccttattttaagagagattaacctactttgaactagatctattgtaagccctgcactatataaaggccttatctctctcaaaacctaagtcatcctaagttgggctaagtccttttaagtcattccatttcctgaaaagcctttcttaagcctcatacacgtgctcctctctcactccctctctcatgtctcatatctcatctatgcctcctagacactaagtcttctcttctttaatccttcataagaactcatcagttcttggtctgcctagcattgttctcactattgtactattcaaagagagccatagctagaatcataaggttctcacctatgatctacatggtattatctctagaatcaatacaactaaaagaggagtatgtcattatccgctaaacaagggggctaaatctctataaatctccatgttacttttatcatttattgttcttatttatatgaggtgattgtctatcataaatacaactctgctattggttgaccgaattctgagtcaatagttcggtgctttaattgagagcctttctctaattaatttgagtgaaatcaataaatttaagaaagtagataaaaattgtaaaaattaagaaggaagataaattagaatagaactcatagaaggtgccatgtcaccaccctatgtttctcttttatatggatatatagatatatagattattttaaacattgttaagaattttagatatttattaaattaaaaaaaaaacataatttaaaaaatagaaataactgaaatttaataaaatatttttgtttgttaaaaataattaaagaaagtttaaatatttgaaaaaatttgaaaaatccaagaatttatgttgcatttatctaaaaaaaatgatagctaattaagcaaaatccccctcgaatcctcctcaggatgccatgatagtaaatctaaatgctaatgttcatcccaccatagagggacctaccaatctagataacaccatcaatctggccaatcatgtgaatcctattgatcacgccattgctccaaggctgggagtcgacaagatctcacatagaagagctggtcaacatggaacaacctccatagaacacaactatgggtattccacagtgttacgcagaagaaacacgtgcttctagttgcgatgctttttcccaacagagacgtgaattcctatgaggacgaaaagaatgatgtgttgctggttgtgatgctttttctcagtagagacatgaatacctaaagtggattgatgaccaggagtacattctctatgcctgccatgcagaattaaactgccgtaatgataaggcaggttcaatgagagaacaggctagaagaggttaggacttgataaaagatcctttataagggaggctcatatacagaacaggcagggtctacatgtatttagacaattgataaacagtccaaccaaattccttgaacacgaggatagaacctttcttgcctcatgacggtcaagtacaaccaaatagaacggatggcacaagcagccagttcctgccaccaggtgacattagaagatgataaagcaacctcagagaaggagtgttacatgctggtcaggctctggctggcccccattatgatcttctctcctaggatatccaagaacaagttgttccaaggcgtagagaccctgttcttgacagacaaagtcctaggataaccaacaacaatccagacaataataactcaaggagcgagaactaaaacgacttttttcaaccacagaataatagtttaaggctggtggatcaaacaaactcaagaagttgggatgatcaacctcccatcaactcgtagactggcttggccgactaggaaaatctcattggtctggccagccaaggaagtaaaactagccaaaggctggccagccattgcccattaattaacaaaaggctggctggccaagacttattgtccagccagaggctagcagccatgggccaatgatcatccagggctaaccggccaaggctcctttttcagcgaagagttggccaaccaaacatacctctcaaagatatgaagacattagagtggacccatctgtgcaagcagagctagatcaattcaaagacatgatcaaagatctgtttggtccaaagttgtctgacctagatcatcaaaagacaaggggatcaccatttacaacattcattaatgcacttccccttccaaagttcaagatcccaacttggaagatgtgcatagggaaagaagatcccctagcacatataaaatactttgagatgataatcgatatctaaaaagtagttggagatgtgcaatgccaaatctttctagcaactatggctaaaatagcccaaaaatgttattttaagctagccccaggcaagttcaactcttgggatgaattctctcaagaattctcaagaattctatgctcagttctatgcctcaatacaaatatcttcacaactggaagatcttatcgaagtaaagcaaagataagatgagcctttgaaagattactttcaaaagttcatggtcgaggtcatcaaggtcaaaggccaaacagaaaaaggtcgatatacgaccatacttggaggcatcttgctgttgagtgaattttagaaagatatcagaagtatctcaatgagaaacatgaaggaattccttgagcgagcaggcttcttaaagttaaaagaagttgtccgataagcccaaataagagggtagatcgatgttgagtaaacatagggcatcatacttccccaagtgttgtttgacatcaagctcctagccatggcgataggtgtcacaaaaacctaaagcacctagccgaccactcaaatgggccatcaagctcggccaatataaggtgacttatcaacctagcttggccataaaaggccaggctctcacaaccttcatggttaaatttacaagcatatctccccagatctctcaagatttgggagaaaatcaagagccagagaagaagcgagagcaagagcaaggcaattcaacctagaaggtacactgactacatgactagtgtaggcaaggcactcaggacacctgggggcaatggctgcacgaggcattaaaggtcgatttcaaagtggtatcccaaattttgtcctcatgacatggcatgcttacgtggacagaaccagtaccatatggaagtacagctcactaaaaggaaggccaagtcaagacatgagcaaacaaacaccccaacactcaaacagagatcaagcgatagaccagctccctcttaggagcttgccggccagccttgggacagtaccatggctggccaaggtggccatcacaggggcctgaccagcaaaaggagtgcactacatgctttgctggaaagttttgcacatggaaaacagatatgggctacgaattgggacctaaaagcccaacagaatggctgaataatatctaaattcaagggcactttagtcttttgtaatatctagcatactatgtaaataattaggatttaaacttgtaatctaggctttaggtgtcctatataaaggccttaaccctagcctagaaacctaagtcacttagcctcgaaatagctctaagtctgaaagtcgtactctctcccctctctctctctttctctgctacacgctcctaagggctctccctctcttctattgatcactttcacatgcctcgaaaaggtggttactgggttgtatgatgccagtttctatcatatctttcatgaattgtccaattattgacttctaaaattgtgggtattgatagggtcgctcactcacctgagatgcatctagttttaaattgatggcatgttcatggttcggaactggtggtaagccactagtttgagcaaaaaccccttcatgtttgagcaaaatcagttaaaggaactccggagtatcactggttgtttggctctcctctaggcccctaaaattgaattcaattaaaagaccatttcctcaacgtacattgttttagacatggtcctaagcgatacaaggcttctctcaagaaggatctccttatatagtaacttattggctgccaatttagaattacatcgtttgaagtttccaatctgtgtgtgtcatccctagagttgccagcaattgaagtcccaaaataacataagcactccctaactttaagggtaggaaatcatcaaaaaaaaaaaattaccccttggaagtgtaggtggacatttttttatatcccttcattgcacatggaatctccattctaattgtataaccatattgactggtcttaataataggaagcttgagtttatccaccaacactttagagatgaaattatgtgtggcgtcgggatcaattaagatgaccacttcacattgttcgatcaacccctttaatttcatagtcttatttgaagaaagacctgctactgattgagagaaaccttcactgtacccttgagttttgccatttcaaaacaagccacagcctcgtgagcctttttcaaaccttgttctagattaatatctttaattttatcagcgataattaccatatttatctctttttgtttgcagcgatgtcctgttgaccatttatcatcgcggtgaaagcaaaggcccttatctcgtttatattgaatatgactgttagtatatttttgtgttttggcagctagttttttgtatgtgcctctcatatgccctgagataaaggaagtatgaagtggtggtgtcgtagtgcagctgaaaccaaaaacttttggtatatagggggtgtttgcattcacctcttcctcaatgtcttgggcaatttctattgcctcgttaatatttcttggtcgttgcacacgaatttttgcacagatagtgggacgaaggccattaatgaaagtactaagttgtatttcaaatgagacattatccagaggagccagaagtcgaataaactgcctcttgaactcgattaatgtaccctcttgccttaccgccacaaattgatcatataaagaaccagcatgtgtatctctgaagtgcctcaacaccaatcgtttcatctcctcccaactcaagattacccattttttattctcaaactaataccaaaggagtgtatcacccgaaaataagataagcgctgcctcgaccttttcttcctcgctataatggcaacaagcaaaaaagcactctacttgcataatccacccgtcgggattttccccttcaaaaggtggcatcttgagcttacggagtcactaatcatttcaatgatggggattgtaataattttattctattggggcatccactattatgggatttttgccactgttgaagatgcgggaagcaccaggactcttgtccttagatgcatctcgagtgttggatcggcggaaggcttctcccacatgatcttggacgcttcttgattgtctgggatcatttcttggtcgttcttggtcgttcttagacctttcttgactgttcttgagcctccaaaataagccataattgctgctgcaatttggcgattcatttcactcgccgagtcattagtaattgtcttgacggaatttgtgacagtttccgtggccaattccagaattgattcttggaccgattgcatcgttgacttcaaagcatcctcttcaatggtggattctgattgactcttttttggtgatttttttggcattgttcgcagctcaccgcaccaaatttatacaatttcttatattagaaatctgctatcaagtattagaataccctaaatgaaatccctcaaagaattttctttattcgtgaataatgatcaatttacacctaacttttgagaggctagtctctttaagtacacaacctttgaagagggctgctctctcccaaaatacttctctcaatacttaattctctatcttctttaataagttctagtctcttgtatatataatcagcttgccacatcagcagttttaattaaacccaattgaccaatacgaaaagacaactcaggccttccttaaaataatttgaataaaactcaactaaaagacttaagtgtggcctttaggccctctttttctatggtaaacaaatctgactaggggcttatcacataaacggccaagcaagggagaggagaagttgaactgatgctaccaaaagagaaggagtagggtgctccattattgtttggtcacatcattaaataccagacctaaatcaatcgctggaactagcaatcgtcagagagagagaagaaaggatgcattggctgagagagaaacaagttagaatgaattagagtttgactgaaaataatacaacaaaaaataaaatatgatatttaaaattaataataacaaaaatatgacataataaataccataaaagaaaactaaagcccataaaaaattggacaaatgaagtgtaattttctctttgcaaaatgaatgtctaagccaccttttatcaaaaactccactaataaatactaaataaataaatgttactatagaattttttttcttttctaatttttacatagtggaacgtgtccttaaatttcttgtcttaaaatctaaaatttaaaataataataataa

SEQ ID NO: 36691 - DNA, 4194 bp, Cannabis sativa
ataagccacataatctaaacagaacagttttagtatcgggctcatttgcgtataacatgtactcagactccgcaagacactgaaatttctttcaatgatcttcataaatgccatttgagtattcttctcctgtaagactagacgttccattggataaccgggacgtgcttggggttgaattcgaataggaagagtatgcagaagcagggctgtttcttgaatgccggctctgtgcagctgtgctgcttcttgtcaccttttgacgagcttttctaccctgttgaggtaaataagaaaaggaaacacatgttgatgaggagcttctaaagaaactcaaccaattgaaatgaagtaccaaatgttggaccacatcaaaagatattggcattgtagaactatctaaccatacataaagaaaagattacctttcccatgcatttctctaaatgaggtgcaaatctcccagccatgattgatcgaccgcagttcatgcaatcaaatatttcactggctacaggagggtgggtttgtccaaaaatgtcgacaatgtactttccattggcttcactgctattacttggatctgcaacccttacccgtgcttgagctgataatcttatttcttcctcttcttcttctaaattgcgatcaagtcccaatcttgctattcgatgacactcagatgcaacgtcgacaataattgaatcaaggaaatcttcgaaaaaatgagatgaaagctacaataacaatccagcaaaacaaattagcaaaaagacataacaaaaaaggattgttctcttttggatcaagttcattataaccattcctgaagaacaagaaaatcaaggtcctctaacatagtagtcagtttactcccatgatttttttttacatgatagtcaacaaaatcaaaatgatgttccaaatttctgagttactagtttcttcctcttacaaaagggtttgtttccttaatcaaaacacaacatttaatgttatagccagttcaatctgtaatgaactgtagaagaacaatagcagagacactatgataagacaaactgccaaactatagtgtaatgaaattcaataaattgatagaataacacactccattattaaaatgccacacaaccaaaacggcagagaccaaatagaagtagaactacaatgacaatttgaggcttgaacttttttttttttttgaagctaaagttttcagtcaatatcatctcactgcattgcacatagctccaattgaaaataaataaatacaaagatacctggtcatgggaagactgattatcttcattggccattacacaagaatttatcctcggataaaaaattgaatgcgccaagaaggtgcgtagccctgaaacaagaaaaaactaaatagagaaaaatgagattctaacttaacttcacatactcgcatacaaagcttattgggggcaaaaaaaaaaagaaataaaatttattaaaaattacaacgtttaacagccatgaaaattgaagaaaactaatataaagcatatactcacatcaaaattttagttttacagatccatcgtagttataattaagcattttcttgggtctgaaagagagaagagattgagaaatcaccgattgatgaaacgaccaagaacaaggtgatctggatctttatatattttctaaaaatcagaagaaaggagttaagagtaatagtgaggtttttcctaaagctctggtctatggcaacccggagaaggagatgattggaattcggaagtgggtagagaaagatccagtgcctttgcgcctattttctttttcgaacaaaaccatttatattttgacatgtgtcaattaagaattagaaatgaaaaaaaaaaattccgttgccgggaatcgaacccgggtctcctgggtgaaagccagatatcctaaccgctggacgacaacggaaccatgttgaattgtttccaaatgtattacataacgatttaatgttgaactttaataataaatgtttttttatttgttttttttttttggctatgcatgtaaatcatacaagtttttttttttttttttttgtaaatgtaaatcagacaagttgaccactaaagacgtgtgaatctgaatcattggaaagtttccaaatctgaaatagataaaaaagagtagtgaggatccaaatgctttttctaatcgttagtttcggtttgaagcttggcggactagagactttcggagctcttttgtggttgaccatgcatgaaattttttgtcttacgattgggctcttggtagagtttttaaaaaagttggcggtactaggctggcactgagcaagtggaacaaggaacagtatggtaacctagacacttgtataggcttattggaacaccaacttggggatatccagaagctgcctactggctttgagatgctgggctagagaggtggatgcgaggagcgccctgaacgaggctttaaaaagaaaggctctctactggcaacagagatcttggacttcttgtacaaagggtgacgatacaaaattaagtgatcaattatgttatgggtatcaaaagggtatcaaaagggtatcaaattgtcatggaaataatgtgtagataatataagttaatttataatttgttaatgggccaaattataaatatccgagactcattctataatgagcctataaataggtagcggttccaagaatgtattctctcccttcccatcagagaatattttagagaaatagtagtgtatttttggaacatcataatcttttgtgcaatccccaacaatagattcaagttaatgtttccgctcatcttattatcaccatcttcttctttttacttaatttagcaaatgttctataaaatgagatttaggattttctatattaaagcacttttgaaataggtttggatctattattatttgtatttattaagtgttttataaattctaacactattgccacctgacttattcttgaatcaccacgtattttaggaaaaattctagataacagattgaatttgaattattatgtaaattagattggattcaaaatataaaatttaaatttagtacagattggatgcattatgagcatagtgtgaattggattagataaatactcctaaatgactaatactaggtggtatctcaccattagtttttgatattttttaaaaattattttattaagttattaattacagcgattaaaatacgacaacttagaggaccagtaattctctcaaagatattgtcccgtcacaatacgtccttatttccagttctttacgttcacagggacggcctttttcggagcctacgaagttctcatattcttctccttcttcgtaagcttcatttactgccaacgctgataatcgaagaagaataaagaaatcaaagcaacgatttgttcagcaaattagggtttctgaaagagaaaaaaaaacaataataactgatctatgaaactagtaggtgtttgttggaaccagtgggaccttgggaccatgctatcatatttaaaacacttaaattaatatgggtatccagtagcagaggacattcgagagaataggctagcccttaccagtaagagttgacaatttggggtaaaatcagttaaaggagtgttgttggaatgagattgggtggagttgggctgtactcttcttcttcttctttttcttcctctgtgtttgtctttgaccattatcatcacttggctccaaaacccttctctgcttatacttcttctaagaagcctttcctcactaccttcacacctaaacgttgctctactatgaccttaccctccgccgctttgttctcccaaaaccctgtcgtttctgatgtcgttgccactgccttgtccggctctgtcgccttctctttgctccaattgttgaaagagaccgccacacgtggtattttcgaccaggttcgaactttacaaacctttctcttttttacgtttcaagtttatatatgtgacaactggttccatctttcgatgggaattaatgggtttctattcattttcggggaaatatctgaattttactgtgttgaagtgaagggtttagtgtgttttgtttctgatattgttttggaatcgaaatcttttaccaaactggctttggtcaatgctcggaaagc

SEQ ID NO: 36692 - DNA, 5139 bp, Cannabis sativa
  modified_base (42)..(43): a, c, t, g, unknown or other
  modified_base (3925)..(3940): a, c, t, g, unknown or other
tggggtgagagaggctcgaactctcgacctcaggatcactcnnagctatgagacctacgcgctagccaactgcgccaccacccctgttcgatgtgatagattaggttttctataagaaccttacgtttcttgatcatttaattcgagacttcattaatttcatcctattgcactctcagtataggcaaacttggggttgaatttattaggctctcgaagaaaatggttaactcaccaaatgaaatatcacacactttcatgaatgaaaactctagtctctagtgcaacatctgtggtatctcattacgtttatgtcaatagagaaaagggaaggtgagaaaatacccctagtcatcagcaaccatatccacgagtgtaccaaaaaaactcaagttgcattgcatatgactcaaaactatcatacataaatatgtactcttcaattttcatataaaataatgcagactatagaagctgccaaaacaccacagtgcctcttttcactgcctctgaagattaagtctagcctctgagtgaaaaaattagatgaaggttgaaagcagcaacttgttgaaaaaaaaaattgaagatcattttatgacaataattgttcaatgcaaacagcttcgttctggaattggtgttacacagaggtgttaaaattgtgcagaagaaaaggaatcgttaatgggcgtttactgcacttaagattctactacatgcaatgaagaaatgtctaagaccttcatttaaattagcattctttcatttttctcaatccaagattttgatgcaattcaatcgtgtaatgtactttaatgtttactaattacatatgtaaggttgagcttgagctgatgctattttgggagatatatttgaatttgtctacttttaaatggcgtgctgttgaatcatccatccaaactgcaagcatagttgaaagtgtaattaattgggttatattaagagttccttaagacgcaacattcctggtatgagaattctaaaaaacacttaagaattcttcaggttgacaatataaatatataattgaggtatgcatttttgtagaatggcaagagtcaaaaagggatttgaccatatatagccctgaaccatcattgattgtaagttaaaagactatattggcaattgaagttttgacaagaagatagaaaattacacatcaaatgtcctaaaatcataaagttttcaactccagctttgtgtgataaaaaacttcatcaaatgtgcactgaaacaggtcaatacacatctacttgtgggtgactttgagatcactgtttcaccccaaaacaagaagagtaaatcaacgaccaggagcatgacaaatatatcgccgtaaaattcaacaaatcagattgttcaataatctctagacagaaatgaactgataataatatcactaaccttttagtgctactgtgttggatgagaagacatacaaatcaatgatgtaaaccgcagaagacggaaattcccagacctgcagaagacaagctttaattagagttcaactttgagcttaaacttggtactattttagataagtgttcgactaggaaggatgagagatcgtcaaaccataccatcatagctaagagagacaacttgaagtaacttgagatgagaattgcaagcaaaatgtctttgtaactgctgaaacaatagatcaaattatacaatgcaggtggctgaataagtatgtgcaactaagaacggtccctttaatgccctctttcatcaccattcccgctatataactgaataatgcttaataatgaaaactatactttccattgaaagatatatcagccctcaattatacctaagaaaaattcctgctgctatttttggacatgatttttgtatataagctttgaagaaattttacctgagggatccaaaccatgtacccaaaaaaatcctcatggcaagtacaaaggtagaaaaaaacatgaggtttccaagaaatacatccaacaatatctacaacgagcagaaggaaaagagttcacataatctgttcatttatacattctttaatatgaagaagatgaaaacataagaaatcataaaacttaattgcaatcaaaataaaaagtcacaaccttttgacatgtccaaatgaaagaatcaatgcttgtggacaaactccattcttctttgcttctacatattaacaaactcctatcttcaggggtgttaaggcacttatttatattcatatattatgtactgtatcacattaaaaaagtaaataaaaaaatcaggagaggaatggatacaagcatccaatagaagaaaaccaaaactgcatttccacaataaaccctgaaagacatcagagttagacacactctaattgatcggtcaagcaaaagaatttgaagcagaaactaactatacctgcaaattgagagcctgtgggtctaacacattgtagagtaaatgtctataagctttgggcttgtgaagaatcaaatcaataacaacaatctgccaagcctccaccaataaaaggaaaacttaaaaatgttgaacttcaaaatttgactaagaaagcgaaatgggtgtatttaaattaccatgatttcgcattcaatgtattcatccccaactgctttacaattctcctggtaaaaagaaaaatataattacttcaaaataaagaataataataatgaagaagaaagaaaagggtttagttcaatttactaacgcatttcatgagtctgatattgccgggagagtattgaacgaagagggatttcattccattgccgcactccacacatctatacttcattcctaattctgaaattgaattattcttccttctccttctgaatatactagctctgaatagtgtatatgtttatgaattgatcggagtgaaatcatcagataaaaaaaataaaaagaaaaagaaagaaattgcaagggtaatattagagaaccagttggagttggaggaggccggtggccagtgggggacctgacaaaagttgggccttgttttattctaaaagcccataatttcatggattgggccgatttaaagtgttttttctgggataagttgaaatatacatttttttttattcattaatcaaaaatatctttatattattttttcattaaaatatacttacttttttttaagtagattgcttaatatactttcactctctacttaagtttagcatataatttacataacctaaggggtctaatggagatatcatccataaaagtagatatatctaaaaaaaaatatgaaaatagaggtaaaaaaaattaaaacaaatgggtgtacaatgtaatttcctcattttttcttctaaattattattaatattattattagaggaaattacactgtgaaattttaaaagttcttatattaaatatggtaattttaagtttgaccaatttatatggtattttttgttgttaaaagttcttatattaatttcctccttgttttattctaaagaggaaattacactctataccctttttatattgtcctattttatttttaccctttttttaaaatctatcatttttacctctatttttaaacattttaccaattttgcccctgtcacttcaagatactctccatgtgattctcttatgttggggtattttgagtacaacacatataaaaagagatatgtttcaattaaatataaaattagaggtaaatttaattaattgatcaataaaagtggtatttttcatgtattgggccgatttaaagtgttttttatgcgataagttgaaaaatacatcttttttgtattcattaattaaaaataccttcatattattttttcattaaaatatatctattttttaagtggattgcctaatataccctcactctctactnnnnnnnnnnnnnnnntttacataacctaaagggtctaatggaaacatcatctataaagtgggtatattcaaaaaaatatgaaaatgaaggtaaaaattaaaacaagtgagtataaaatgtaatttcctcgttttttcttctaaattattattattattattagaggaaattacactctgaaattataaaagtttttatattaaatatggtacttttaaatttgaccaatttatatagtatttttttttaggtttttttatggtatttgatatgccatatatatgtcaattaggttttcaaatctcatatttaatgtttttatttgtttggatagttttatttatcactggtgccagaaaagtcattggagtttgctgctagtgtcagaaaaatcactggagtagctgtcggtgtcagaaaagtcatcaaagttgctgccaatgccaaaaaattcgtcgaaattgacatcgttgccggaaaaatcactgaaaaaatcaccaaaaaattggtttcttgatgaagaaaccacttttttggtaatttttctggtgacaatgctaattttgacgactttcctgacactggcagctactctggcgacttttccagcaccgacagcaaacttcggaaaagtcatcgaaattggcatagtcaccgaaaaaattaccaagaaactcttggtgattttcctagtatattttttgacgaaaatgtcaattctgacgacttttatggtgtcggcagcaactccgacgattttttcgacaccagtagctactctagagacttttccggtacagacagcaaactccaaaaaattcatcaaaattggcattgtcaccaataatgccaatactgattattgttctggcattggcagcaactccggagactttcccggtgttggcagcaactccgacgacttctttcggtaccgttagcaacttcggtgacttttctggcgctggcagggactccagcaactttttcggcgctgacaacaaactccggtgccttttccgacaccggtgacaactctggcgatcactgtagtttcatttgttttattttttaaaaaaaaatatgaagggaatttttatatcttttatcgtaattcaatcccatatatgttaaatttttattttaaataccatatttttttcctattaaattttcttactatatttgtctaaactagctttattttttccata

SEQ ID NO: 36693 - DNA, 4129 bp, Cannabis sativa
ggacaaaaaatctgattataatagtaaacgttagaaagtttaaaacggtgacggagtaaaagaattaaagagagtgatgacgaaccagatagaattgttttagcaaaggcatccaacaatggataaacccttctcagcaaacaaccattgataaaccctaagcttccaaaaccactcatctatggctatgtcgtcatttcacttacttcctctatcttttgctttagcccaccacaaaatatcttctcggttactattccagaacaattttcaactcttcgacccacattcttcacttcagttcttcaattcacacaagttaaacccacctagagcttccaccagtgatgacactaatggagccattcaaaccaaacaaccctctcgccgaggcagaaagaagggatccacttcttcttcagagtcttctacaaagaagacaaggcgttcgagaaaaagccaagctgagaaggaccaagtttcagactctgagcttgaggattacgacgatggcatggatatcctgtacgacgatcctcctttgatctgctgtttcggtgcagtacagaaggagttcgtgccgacggttcgtgtttccgataacccaatggacccggatatttactcagagtggaaaatgctccaatgggacccgccggagtttgtcagggccccaggtgggccaccgtcaaatgtggcgatttcccacgtgaggctcggtggccgggcggcgtttatggggaaagtcggggaggacgattttggggaagagcttgttttgatgatgaatcaggagaaggttcaaacacgggctgtgaagtttgattcgaaggcaaggactgcttcttcttacatgaagattaagtttgaggatgggaaaatgaaggctgaggttgtcaaagagtctgccgaggattctctgcttacctccgaattgaacctttctgtgttaaaagaggtaatataaatggtggttttggttcttcaagttcacaaagttttattttttgacagcacaaaacttatagtcttatatcatcatcacacatttgctgaagttgtatgcaagaatggttcagtttggtttgtttgcttgaatttagtaacaaactagctaattgttctgtattgcccatgacattcattaaaaagttctcattgttagtattgggtcacccattgtaatgcaggctagaatattccactttaattcagaagtcctaacatctttgcccatgcaacggactcttttcaaagcaatttcatattccaagaagtttgggggccttgtgttttttgatccaaatttgcctttgcctctatggagttcacgcgatgagacatgggaattcattaagagagcctggaatgaagcaaacataattgaggtctcgaggcaagagttggagtttcttctagatgaagagtattatgagagaaagagaaattacaggcctcaatattattctgaaaactttgagcaaaccaagaaccggaaagatcaccaccattatactcgtgaagaaatatctcccctatggcatgatggactcaagtttttgtttgtgacagatgggacgcttcgaatccattattactcaccaacattcgatggtgtcatagctggaacagaagatgttctcattaccccattcacttgtgataggacgggttctggggacgctgttgtagctgcaattatgagaaagctaacaacttgcccggagatgtatgaaaatgaagatacattggagagggagctgaggtttgcagttgcagcagggattatatcacagtggactattggtgctgtgagaggtttccccacagagagtgccacacagaatctcaaggagcaagtttatgttccttcgatgtggtgaactgaattacattgcggttctgaaaatggtatgtgttttgtccagttgttgtgatacaaaacaaagtagtggtgagatttgtaaaattttgatgattttattttatccaaccaaagattgtttatctgattcagtaaatatatcttcttccaactccaatgatatttttgtactcacatctctcagaaatgcactctacgttggatactctaattgtttattatttagataattgaccttgttaaatgaaagtcaattttgagaataaattaacataattagagcttgctgtttgttacttgcaatttagagatatcaagatctttcatgcctccacgttttcatcagcaaggtcgttgtagtgctcaaagaatataatcactgttttgtcgaatggatatatatataattaaacataacaggtcaatgttgagatagaggaactcttttagcaatttataattatatctattcgacttatttttgtgtcagttgtgtcttctcttcttttcaggtaaagaaatacaattagaaggaggaaaatgtataacctgatttgtattatgaaacaattctcaagtatatgagcttttgattcaacaaccattggagctcaatttgactattggctctgacaatcaaatcaaaagaagaaaaagaaaaataacgaattaacgaatttatacctcaatatctgacagggatgctgcatctgtaccatagaaactatcttgaatttccttttaaaaaaaatgtaaaccaaccatcttctgtgcttctaaaaaaaattcacaggtaaagacagaggccctcatatgttgggacaccaaaactcttaaaactttgtatgttcaaaccatcacgagggaatactcaacttcttcgaccttgtatagatgtagtgtatgttgtgagctgcagtcttccaatgaatagcagctaccactaaaagcaataacattataagttgtatattcaactttgtgctctcatcactcactttagtcactctcttcgagctgtggtcgtcttcaaacttcgtctatgtgtctgtacaaactttgagtttgtaactggttcttgagacttgttacatatgcaaccaggaaaagggtttgcataaaagttctcctctaaccttggtgactctccaatctgtctcagatatggtgcaccaagtctgtatgaatgtagactcttaacctcagacgaaaactcgtcccatgataaattatgctcatctaactgatcaatcagtttaacaaaactttgcctggagaaaggaaaagagtacagaagaacatgttaaggaggaggttagaatgttcaacaacaggttcatacaacttcaaactatgcttaatatgaatgctagtagtgttttattacctatcagggttgatagtcttcttaaatccatcgaatctcctatggccctgaaccgcctttgccatgtttccatcataggtgtaaacaaagacatcactatcaagtgccacgatatagtccaatgcagcaagtcgattttggtaaggcttgaaaggctctaactcttcttctgttgcaagagtggagtgagagaagacattagggtactctgcccgaaaggctgccatgctattgctgccatagatctctcctgcaacaatgtagatggttgtggtggaaggatatcccatggctttgaggaacatggctgcttctcttggtgacatgggacatcctccttggagtctccgttctatgctgtcaatctctttctctttccaatgcttgacattatacctcatagcccgaagctcttcaccttcgtctgaggtaaggttatggctgcagcctgtgaatgctagcatgtctttctcgtatctgcaacaaagatatgtatgctttgattaaaccgacaatgcatggaccagaaaaggaaacattcagccatggaaagaaaattaccttaaatgcacagcaacgtattgctcgctgttgttcctaagcctatcaaccaaaactttccccagatcctcaatatccttcgagtaccgaagcgcctcataattggcacgacatctaagcctttgaattgaggatgcaaggccattgttagcaaggcgggaatcagtatgagtgaactttaccactttgtaacgcttaagcaatggaatcatttcgttcctgtaatagctaggctgcatttttttaaaagcatcttagatacaattcaagggaaaagattatgttgtttagttaaa

SEQ ID NO: 36694 - DNA, 9949 bp, Cannabis sativa
  modified_base (65)..(67): a, c, t, g, unknown or other
  modified_base (4334)..(4350): a, c, t, g, unknown or other
  modified_base (4443)..(4444): a, c, t, g, unknown or other
ctgctaatttctaaatttaaactatgcggtctttacaactatcccccttaaaaggatttcgtccnnnaaatctaacctgaacaactccggatactggattctgatatcatatctgattctaattcccaggtggcttcctccaccttgatgtttctccagagtaccttgaccaaagctatggtcttattagtcataatattttatattttagtgacaaattttgttctgattaaaagtaaaatttttgtaataattatttttcggacatatatagttaacgatatttaataataaatgttaaattgtatgtcaccaatagcaatatttcattttagcgtttctgttacgaatggtacactattttttactttacatgcaatcgaatctattttacttcatattaatggagaatatctaattaattatagttaacttaatggcatcttttaaaaaggcataagggatatatatatcctgatacatacaatcttaaaaaggtgatcatacatacaattttttcaaaatcaataaaatctgccgtactcattcgattggagtactccctaatcgtgaattatttttttaattattaagtttgtaacaaccagtcaaaaacggtgtgaacaattatgagcaacccaaaatgtgatatgactcactcttgaattaagatcattaatatattttataatttattgagacccctagtgacaaaaactgttcacgttcatgatctaaaataaataaaatatatttgtattttttcacatctttgtgtaaattgtaataaataataagctgtcttttcagaaaattaataattaattaattaaaaatatttgtacatcatacataataagatgatgagaggggtctcatgatcattatatagtagttctttatttaccacatgtaatatcttttaattaaagtaatagatacatataaaaacttttatatatatatggcatatttacgatttaataaaaacatagagtagtggacgttctcgattgcaaagaaatttatatattaatatttaatagttaagaccaaataaaggaaggggacccttctgatcaatatatatgagctgcatgcccaaacaataaagtcagccgttgcatcctcccatatattgaatattattaatttctaattcattaattatgaatataattaattatatgttgaaaagtatatacatgtatagtataaatataataaaaataattcaacttatgatcaccatcagtaatagttagctatataggggtcctatgaataaaattaagaagaagacaaagccataacagttgaaaaagtttatagaaatggtataaccccaaaatgatcaaatgacccaataccaagctgtgagctgactgaataattaaatttaatttattatgtcaacggtatttttcaaaaccgaagccggttttaatcaaaacttgctactgtttcattctgttctatagctaccttcaattcctccacaccactatatatatacatatatatatccacaataaactacccaaattatcaactcaacttgctcattcttttccctctttttagtccaagattattattccccaccaccccttttattatctctctctgtcttttatttcaggcaagtatttatacatgcatatatatatatatattatttatataaatatatatttgatatatatgtgaaataataacatgtgttggttttaaactagctacttattccataatttcaggcgcctagctactattattactatgtctccagcaatagcaatgcccaagactactgctgccactcatgatgatgatgaagtgggagaacaacgatcactaaagtactaccagaaaggagtgaagcatctctacgaaagtggcataactaaagtacctcacaagtacattttaccacttgaagaacgacccaacattttcacacacaaaaatcatcataatcaaccaattacaagtactccaactccaactactactacttctcccaaagacactaagaatcttattaagttgcctgtcattgatttctctgaacttatggaaagttccaagagaccccaagtcctaaaatccctcgaaaacgcttgtcaacaatatggtttctttcaggtacatatataccaaatttggtcctatatctatattaactattccaatacatatatgtatgtatatgggtttgattaattattattgtatgatgaattaatgtaggttgtaaaccataacattccaaaagaagtgattagagaaatgatggaagtaagcacaaaattctttgagcttccacatgaggagagagctaagtacatgtcctctgatatgaaagctaaagtgcgatatggaacaagctttaaccaaactaaagacaaagtcttttgttggagggattttctcaagcttgtttgcaatcccatatctgatgttcttcctcactggccttcttcaccagtagactttaggtacctacttatttttctttattattattaataatttatttatatatctctctcttcttctttccaccttcttggaattctgtctctgtttttttttttgaaatacaaatattaataatttaactttcaaattgaaggccacctttcattaattataccaaaattaaacacattaattaattaattttggggtttattattttaactttaaacagaaatttggcggctacctacgcaaaagaaaccaaaagcttattcctaatattaatggaggcaattgtggaaagcttaggaattgtgggaaccaccacaaccaatgaaactacaaaagatgatgaattattattacataatgatatgtacaataacaagaagaaagaacaagaaatagaaaaggacaagaaggacatcatggagaaatttaaagatggaagccagctaatggttgtgaattgctatccaccttgtccacaacctgatctaaccctaggaatgcctccacactccgactatggttttctcactcttttgcttcaagatgaagttgaaggccttcaagttcacttcaaagatcaatggctcaccgttgatccaatccctggctctttcgttgtcaacgtaggcgatcatcttgaggtatatatatatataaatattatatatattttttgagcattcctattaggcaccagtgctgcttagcaccttctcgacaagtcgcgttacgattggctagtaatactccgacccaatactaagttgtaccaatagcgatatcgattcataggaggctgctaggaagcgctggtgccttttagtttttctcatattttttatatggttgacttataatatttataattattaaattttaattattgttaaatgttacagatatttagcaatggaaaatacaagagtgttcttcatagggttcttgtaaactcaatgagaggtaggatttcagtagcatcattgcacagtctctcattcatggacatggtttcaccttcaccaaaactcatcaatgagaccagtccaaagcgttataaagacactgatttttcaagcttcatggagtacatttcttctcgtgagcctaagaagaaaaatttcctcgagtctaggaaaattgacttgatgaattttggaataagagaaaatattattaataacaataatcataatgatgatgatgacgatgaattaattgatattaatcaatcaaggtagtaagacatatataaaaaatattaataatatgaagcatgggagttgacttttttttgtacgtaccaaaattgtaacacattattaaattagttggattaaatatttcctcttttgtttggggccggggtttttagaatgaaatagctggagatattgcaaaggctaattaatgagtcaaagcctataaaaacctcagctactcttctattaaacgaagactttggcagtcgtgtaattaataaaggcaaaaaatatactttgaagcaaaatatctagattgcattattagtatatgtaattgattattatttatttttttgtttatttcctctatatttatcaattatgtcctacattattctcaacgtacacatgaaaaatgagcctttttcttgtgaaggaaaagttaaattgattcaaattatatttagtagtatatataaggtaagttatttggcacaatttttagaaaaataaaagttgtttttcaaaaaagttaaaaaagttgtgataaaaaaatgtttggtcagtagttaaaaaatagcttatggaagaatttagggataatcacataaagcactattttttataaaaaaaaannnnnnnnnnnnnnnnntacgtttaaagaatttttttttatatatatttttacgattttctataaaaacaatatgaaaataacaataaaattacataaaagtaacatgannataacatctaaataacatcaaaattacaacaaaaaataacatacaaacaaaaaatcaacaataaattaacaagagtacaacataaaccgtattttctttaaataaattaaaaaaatcataaaaatatttaaaatttcgtaaaaccgtaaaatttcgtaaaaccgtatttttgcattttaaaccgtatttttgcattttttttgtttttgtgtatttgtgaaataatcccaagaatttattgaaaaattatagctaaaagctaaagctgttacaacccaacttttaaaaaaagctattttgattaagagactctataataaattaatttttactaaaaatttattttattatatatatttctttgatgaatcaatgagtgttattacaaattaactatttttgtacaacctaaaagcaccatgacaatcatgccatagccttcaatcttctatacagtttacaaagaataaaaccactcttcctcttttttactaaccttcttaggccacactaatacaactctttgctttacattttcttttatacaattcactatactattccaattaggctctttaccttgccacatggcctcatttttgatcctccataggttgtacactaagctagcaagacaagcaaccatgatcttcttcttaaacttacatgcctttgatctttgtatcattctggtgacacgagtaagtgtggtatcaattgttttccatctcatccaagctgcaatctctccaaaacaccctcttattttgctgcaattaaagaacaggggttcatgtgtttcatcctccatgttgcagagaacacaggaagcattttcacagatgccaaacttgtgtaatctatcttttgtcctcaatcttctctgcatagcaatccacaaaataaagctatgtttgggggtgttaaacctcccccaaacttgctcactccacctctgcttttgctcaacagaacacaacagtttgtagccatctgatatttggtatttttctgttacaaacctgtgtgcatcaataagagattgccaaatcttatttttaagagctacaagttgcctccaataccagctaccttgaatagggatattatagctccaccagctctcttccttgatgtaaacactatgtatccactttacccatagattttcctttttttagccactgaccatatgtatttaatcattgcagcttggttccattctctaacattttaatccaatgtcccctgctgtctttgtttggcaaacattgtcccattaaatagctcctgctccttgaaacatggattgtcccctccacaaataagtcctacagatagcttcaatttctttaataactttcttaggcaatagcataacttggctccaataggcatggattgttaacaaaatagagtttattaacactgctgtgccagcaaaagagatatgcctagaactccaagttcttatgcgtgcagtcatcttttcagcaagtatggtgcactccttgctagaaatctttttagcacagattggaacacctaggtaagtgaaaggcagttgttgttgggtgaatccagatgcatcaagtactctagtaatatcctgtcttggcatgttactacaatacattgcagactttgatgcattaggaaatagttcagatgtttgagagaagagctttagacactgaagaagatatatcacacttttatattcaccattgcagaacaataaaacatcatcagtaaagttgagatggtttaaatgaagttggtcacatctgtcatggaattgaaagtctgatttcatacccactcttttcagtattcttgtcaaatattccattcccaatacaaaaagtaaaggggatatgggatctccttgccttagccctcttcttgaagaaaaaaagtccatgcattgagccattaaacatgatagagaatctaggggttttaatgcacttcataataagctttataaactggctgaggaatttaaatgcacttagaacctcttcaatgaactcacactcaactgtatcataagctttctgctggtctagttttatcatactgctaggcttattggatttccttccataatgcctaataaggtcctgacatatcataatgttgtgcccaatgtatcttcctttgatgaatcccccttggttttgagccacgagatcaagaagaacatgtttaagtttaacacatatcagctttgatgtaattttatataccacattacaacaagcaatgggtatgatatctttcactgtgttggggcatttcaatttagggaccaaagttatcacacttgaatttatttctttcaggatttcccctgtttccaaaaaagaaatgacagcttcacataccaaatcccccactgtgtcccaattatcttgataaaagaaactacagtagccatcggtacctggtgctttgatgcctggtatgtcaaaaactactttcttcacttcatctggagtgatttttgttgccagtaattcctcatgctgcattgttatctgaggccccaggtccatgacttttgttaagacatgccttctatcatgcatcttagttcccagtagctccttatagtagtcaataaatgcctctgagattttatccatttcattcactcgagtgccatcaagttgttcaattgacaggatacagttttgcctcctcctccccttgatgctggcatggaatagagctgtattttcatccccatttaggacccatgagagtttagccttctgctgcaacatagagaaataatctgcctgtttctacattagtgtgttcctcgcactgagcacctctgagtgcaactgagtgtttgatggatctgaatgaagggctttctgacatgtctccaagttttctctggctttgattgtttctgcagggagattgcagtaaccttccttgtttatctccttaaaaacctgcttaagactcttcaattttcacacgagttgatacatttttgttccatgatgctgtcgagtccacacttccttaattctttgttcaaaatctttgtgagatctccacattcaaaagtacctaaaaggctttttccctgtttggcattctggatgaatgtggagcagggcttgggagtgatcaaaggtgcccttagttgcaaaaagcacttcagcagtaggaaaagcattaagccatgcttgatttactaatactctgtctattttggaccagattcaatccccaccttgctgtttgttgctccatgtgaaaaaacaaccagtgtacttcacatcctctacattacaagcctcaatgcactcaatgaaatctctgccagcttgatatttaactcaatttccaattctttcctcctttgccaatgtatgattaaaatcacccattagcatccatttctcagttgtgtggtacccctgtatttccttcaacaataatttccttcctaatatatcattaaaagcatagactagggtgatgaaacaagaaaaagttccatcaactgattgaacaaccaagtgcatagtctggctggagcaagctattatatttacatgaaatacaatagggttccaagctagcactattctcccacctttatgccatggtaagtttgaagaaaaacaccatcctagaaacacatttgagtacaaagctccaagtttctgagctttgactcttgtttcgaggagcccaaccagacctacaccttgagccataataaaatgtttaatatggttctgtttgtgcaggctgttagcccctcgaacattccaacatagcattttatccattgacaagagagggccctccctcctctcctgtcttaacactttgaggcatagtactgcacccatcattgtgccttatgatctgcccagtattctcatcttcctctaaaacttgaaaattgtttccagtctgtgtcataaccacattagaggagtcttttgccttctagcccttagtaactttctggaacccttctgtatctattttaggaatcccctgttccattacttttcctcttttgtcatcttttacaacccactatttttttccttcacttttcttcctgcattcctctgtagagtgacccaaaccagtacaatgtttacatgttattggcttccattcataatggactccaacatgtgtattggacccattttcatctccgaaattgatcatatctagcaatggttggttcattttgacttcaataagtattctaggataactcgatctctctcttttcttggtcacattatcaaccatgacaggtttccaacctgaccaatgatcttgaagagagaacgttgcccccaatacttcagctccaaatcttttaagtgcacccaaataggtactgtatgaatatcctctttttcgaagttagtatttggatcccagggtttcatgattgtaggtcttttgttgaaaaatatgtatcccccattaagcacttcatcacgaaactcacagctctagaatctaattatgaatatgccatgtgataagagtttaactctgtcaattttcccattccataccctgtttgtaaagccttccagtatctacaaaggctgatttgaaccaagcacataacatataatcgagggtctccaaaatttgacttcatcttcaatgtcttccatggttattttaaccttggtagactttttagtactagtaaaagaagtctttagtctcctaatcacagttctggatcttaaaattggaggcttcggattcttaccttgcaacaaatcactgttacattggtcatttgcagcgagaaacctctcgaagtccttcctagcatcttcatgttgttcaattactcttagagatgattttggggataatggaggttggaagacatcaagaagcattggatcagatgctgaccccaaatgttcttgatgtgcttcgtcttcgtcatccgagaacaaagctgactctattctcagtaccttatccattgattttgttttccgtacatccctagcagagtctggccctttcttcctcactttcttaactccagattgctgttttcccaaccccttcgacctagtcttcgccatggcaggagcttcaaaagttgataggctagagagaaaaagcagaaaaaaaatctactcaaacattatttatttaattatatttattatatattacaaaaaaataaaaaaatatccttttaaaaaaattatttaaaataaataatatttaaatttctaattttttattttgttttaaaaaatatttaatatttatatttatttaatatttatatttatatttttattattaacaaacaatattaacctaagtttcttataaattacacttttttcttttacaagtattagaaatattaacaaattatttttatcaaatgcatataaatttatactatggaaaaaataattaaaaaaattatataacatattcttttatatatatata

SEQ ID NO: 36695 - DNA, 3215 bp, Cannabis sativa
  modified_base (1436)..(1464): a, c, t, g, unknown or other
tattcattcctctcaaccaaacgcctaagtgttaatcaccacttacacctagtaacatgctgtattgttaatccatttgatctttttcaatttgtttttgttgacttttgatcataaacatcatgattaattaggtctcaatactccattaccacaattgcttcttcttctaattgtatatatttatgtaaagtttatattatggacaatcatcattctttttcatgatcttaagtctctccattttagggttttctcttttttattatttttttccactaaagtttctactatgtctgtccaaataaatctttaaatgttacaaagtaatacaaaaaggaaaaaaaaaaacagagatttttccagacggaaaaatatatattttcgtcataaaaaataaaaatattttcctttcatttataataatattttttattctctcaactatatatatttataatacaatcacaagttatatattaaaaaatgtacatatatttgagataatattacaacataatattttattatatttttatttgataaaataataatatttttttgtgtacgtaatatataataattaataagattaatcctcctaatcaaatattaaaccaaaaaaaaagtcatactaaagctaactgctgcccatgtgagccaaatggctaacacaaaactcaaattaaaagtattaatattaatgtaaatcacctattattattattttctaatgaccattgttattaggtaccagtagtgcctaacactttctctacatgtcgcgattatattaaattatataggacccgatacgtagttagaccaatagggatattaacacataataatagtgtggtaggcaccactagtgccctttaacatttctctttctggatatatataagccggctttaattaatttacacctgttgtagtactagtcctctccaaaaataaaattattaaataaatataaatgaatcaaacacccatatagctatttatgattttattgaaagaaaaaaaaaagaaattaatttaaagacaatttattgattaacattataaagagtcaacccatctcattaatgatatcattatatcatataaactaacaaaatttatttatatgtttgacgctattcacttaatttagacaagacagatatttattaatctatctgaaaatgaaaatttggccagaatattcacaaaatttatattttaatatttagtttaatttttcttgactaatttttttcttgattttaaaattaaaattttttttgtttgtttgtttaatatatttagaattttaattgattttaaaattattgaaagtgttataaatttgtaaaacattttttttttaatttttttaagtgttacaaaaataaactatttatgaagtttcactattattattattattnnnnnnnnnnnnnnnnnnnnnnnnnnnnntattattattattattattttaaccaactcataccttatcctatatatcttcaatcgaatatacatgttcatatttgcagcttacttcaacaagtaaaactcaattttattccataaataataactcgatcgcactttattatgtctttttttttaatgacgaagaaacttcgttgatcactactattaattattaactaatcagataagctaaatggaacatgatcctaatcccaactaagaatacaatcaacatacaaacaagcagctttatctaataaaaagaaatatttaatttcgacttcaagtaataaaatatgaattatttaacaatagattttatcttaggtttataaaaatggaatataatccgtaaaagtaatgtttgttggatcgcatttaacatttataagtttatctaaattcggtctaattatatattagaggttgaatattttacaaccaaattcaattaatttttagttatttaaactgatccaacatctattcattgttagactagataaattccacctattgaatatttcatatatatatttattaaattagctcggatttacttaatattttagacttggattgaatccgtttaatattgtaaatcttctattcatcgtttcgtcaataaaaaaaagttaaattttaatcctaatttgtatatatattattttaagtataataatataaaatttaatcactattattcaaattaaataaaactactaattagttcaattatatattcaaatttaatatttaacgataaattattattaaatcaatcagttataattagatataaagaccattttgattttttactctgatcaaattttaagatactataaatttattttctaatgattcgaaaacattgtatcaacttaattattaatgttatgaagagaatctatgccctaaaattgatagaagaaagagaacaattaggataagagaaccatgtcgacttaaacaagatatattaatattatagattagacaatatttgatatttattcaccttcatcatattccaagttcaaacctcaccactaacttaaccctagttaaaacaaaatacaaaagaagaaccaaacacctcacttttaagtcttaaccatagttactaaccccaatgtgggcccaaagtgggcccaagcccacaccatataaacccaatgattcccccctctctttcctctaacctcacaatgttatctattccctcaaacacttcgtttctctctcctcccaacttttcgcccaaatctccttcgtcttcttcttcgtcgtctcctcctacttctccctcctccgtcagattcgccaccacacgcgccgccgcagcaacagcttcaacatcctacgcctcagcggagagcgaaaccaccacaagaacgacgtcgtatctcaacaacaacaccgctcgaagaaacgtcgcttcgtctctctacgagatcctcggaatccctaccgccgccacgtgtcaggagatcaaagccgcgtaccggagattagctagggtttgtcatcctgatgtagcgacgatcgatcggaaggattcttcggccgatgagtttatgaagatacacgctgcttattctactctttccgatccgactaaacgcgccgcttatgatcggagatttctgaggcgtccgagtccgcttactatggcttctggattttctggctactctcgtcgaaattgggagactgatcagtgttgg

SEQ ID NO: 36696 - DNA, 6799 bp, Cannabis sativa
  modified_base (6383)..(6392): a, c, t, g, unknown or other
taattaattataatatgttctatggttcctattacataattcttagtcatacatacatgtacaattattctcatgtttagttacatttgtcatatttttcaatgacttgaggataatgaatatatcatatatattttgaagtttgaacaattttagcttaagatatatttagtataatgtgaagagaaatacaagaagatgattttattttatttttatttttaattatgttgtggatatatagtgaggtgatgagtatgagctgatgtgtatatctgatcacaaagaaaatttggggaatggatgaatgaattttgaccaaggaaaatgaaattgcttcacattattcctttgctttgacaatgactcaaaaatggtctcatctttctctctttatatatcttttgtctcttttaaatttggtgtcttgtttcaattgattgcatagctatatagcttgattttcattacttgacattgaaagattttgtaaactagttagcacataatatagttacacttacacccactacatttttacaagttcttgattatttaaattattggattggaaaattctactttggataggcacttgtcatttttgttttattggtagaaatgttgcattttttttaatacttattcaaaaaaatttggaaaagtaagaacaaacttgatcctctttcgcatggatcccagatatagcatgtttcggttgtttttcttgttaattaaaaaaaattagctaccgatttaggtattagatgctatcaatactgtatggacaattaaacacctaatccatgattgcaaagacttaattgaaagagtggagctctactaactgagttatatcccccaaagccaagtggaacgtacatgtgaaggagtcaaatgtttattttatttttttcctcagcgcaactgagacatcttggatttgaattagagatctcgtatatgaaataaactatcatacttacgaaagttttagaaatatgattaaaatattattactgtcaaaaattaaatttaattatttatctgtaacctaatgttgaatttaagtatttattgatacattaaagttaaacttaagtatttacgctgtaattactcaaagaaaaaaacacaaaattattcactatgctctcatttgtttagctcattgctcaaaacaaagcccaagtaaatgtggttgttttttcagatttgggtcaccttcctcactttctcatttaagcccatgaagaagaaggaatttttaatattaatagtttttacggctaaagtttgcaaaaatatgactttgtaaaaaaagaatttattttataaataaaattaaaaaccaaaaaataaacatgaaaaagatacatatttttaattattatataaaagctcataaaatgtgcaatttctcaaaagaaaaaggaaaaaaatattcacttgtctcattagcttagttcatttcttattttctagcaaaactagctaaagatatggttgtatttttgagaagtttacacaacaaacctaaaacacattcttatttttacatacttttttatttacatttttatatattctttttttttccttacaaattttcactttttttttcagaaaaaaaaaattactttcatgttaatttcccgtagcatcaacgttaaaacaaaattattctgaaacaacaaaaaatatcactttatattattgtaaaaaaaagtcacattattttccataacaacaagcaacgcaaaaacagcattccgttgtaaaaacagcaacgcaactttttggcatttttgtaataagcccttgctaagatttgggctttctttcttattttaagcccatgaaaagaagcaagcccaggcccttaaataagtcttcttcatactttgatgaattctcgaatagcagaaagaaactgaggtgtggaggaaaatcggagtcagtcaccggactttctcaagttttgaactgtaagtcgtcgcctttctctttcctcgatcattgctttcaatcaatttttactcaaaaacctatcttactgatgttttctcctaatactgatcgtcaaatctaacaaagattttagctttattattagttatgatgttagttaataagtgagtatgaaaccctaatgtcgtatttatttcgaaatataatgaaagtgaagaataataaaatgaactgtatttttgggaatggaatttttaagattttatttatgttttctttaaaatattttttgggtgtcaacattcaggatttcaggattttttttttggctttaatttaggttttatcaatttgggcatgtaaattttgagattgttgcttagatgttttagtagtgagaagttgtaaatgggggggaaaggttatgaagattcatatacaagaattattttctgttgaaagttcttaggatgatcaataaattgacatttttaagctatgtcaagtcaagctagttttttctttttggtcgcgtttgatatgagatttagacttgataagaatgtgaaactaaattaaattttaataatcaagaggtttgtgtttcaaattaaatcctacattttaaattaaaatagtggtaatgtcaattcctttcaaacactaggtttcatattctctcaaactctagactctactttctctaagactctaactcagactcacataacaaacattccattaagtgacttttggttagaaagaatgaaaacatagttagaataagaatgacatttcaatactttaaaatagaataaaagttgtttcctttccattccattacctcaaaccaaacgctacttttgtgtcttaagtatcatattttcggattttctcctacttgaactgcctgctactgtgattgctttttatctaatgggatttatgtgacagttcagaattcctgtaaattcttgatcatggcttggaggactcgaattcctcaccaccctgacagttttagagaatttcatgatgatcgtcggcctattatgagccgaggacaagggtcgctgcctattcaccccactggtttagaagaagagcgtgagctacaacatagagatatgaggaggattatttctgagaatcgagttgtaattgatgataacaccctccttcaaagggatgtgactgctgtaaaagatgagatccgtagattgggtcaggttgtactacctcttcgcacagagaaggatgcacgggctagagatttaatggaaaaagtacgaaagctagaagctgatctcaaagcgactgagcctataaagacagaggttgtccagttaagagctgaaattcagcaattaaattctatgcggcaggatatgtctgctcaagtccagggcctcacaaaagttgttaatcgactgcaagctgagaatcagcaactagtttctctaaaaacagatgttgatctggttcgcaaagatgttttcgaggcaaggtttgattgttaaaccactcatcatattccttttactttctatacaattacattgttaatacttgtgtcttaattcctaggagggttcatgaatatgagaaatcaataaaccaagaacaggttgaacagaaccaagcaatggaaaagaacctcattttcatggctcgtgaaatagaaaaattacgtgaagagaagcaaaatgcagaaaggcaatactcagagcgaagagcacaagcacaagggctaggtaatctttatgtttctctaatctttaggactctaccttaagaaacaagtaaaatatgttgattttaagccgccttttgtaaaaatttaactactaataggtagctggggttacgacgcattgaatggaagccccgaaagaagatatgcaggcttggcatctggtgatcgctatgccagcagtttgagatattatgatcagcaagtcccacctcgacgatgaagcagttagtcggtcttcattagttttctacttaccgtatcttcgctgttattagtcgttagtaagtgtaatggattgggatttctgctcaaaatctggcaagaatttgtaaatctctgaaaaaaaatttctgacatgagttttgtgtgtatgtaattgttctcattaggctctttaactaattattttgtcatggaaattagtttaattagatgaaacttgccaaaaatatataaagtttccaatacagataagcaacacaagagtacactccatgattcaaataaataaatagatagatagataaagataaacaaatcattagttattgtttgtttcttctaatcctttgttaatttggtaatctggaaaagaatgaagcagcctctttgaatcttcctcttcagctgtcttaaatgacaggtttgagttaatataattgtaattactaatcattagagcttttctttcaaagcctttgaaatggcttgaacggtggaaggtgtcgtccgacaacatcctccgattagtttagccccagaatcacgccatctcgttgcaaaacattcgaacttatcgtcgttaaaacacttcgaaggctgttaatacaaaccaagttcgaatcttttaatatgaacaaacacaactaattttaaaaagatgaaaactttacaataaacttaccagccatttcttatctctaccatcccacacctcaccactattcgggtaaacaacaatggctttgtctgttaactgagataacaagaaaattcaaaggtaaattccaaatcactcaaaaaaacttagtctaaacaaattaatctctttttaccttattgagtttcaaaatgagatcttcaataaattgaggaggagcacagttaattcccacagccttaactttatcacacttgtttataacattaagacattccttaaaactctctcctgatggggcattctctccatcaacagagctaaagcaaatccaagatggtattttgatgttttcttcttcaagcaattctacacaagcctacaccaaaaggttttcaaacaaaccaatcagatttcacaaaactctaaacttgacatatataaatatatcattaagacaaacctgagcctctaacttattgggaatggtctcaaaagccagcaagtcagggcctgcctcaacaagaatctgcaatctttttctatggaaatctttgagcttatccaaaccaacatttgatccataactcccactgaaaacaacattagtaagaaaatataaaaatgcagagtcaatacttgttatagagaaaagtgtaagacttttattttgaacctacattaatattttaattgttaccattaatgatttatagttaatgagcttatcatccatttggaacaatcaaaagacaataaaattagtgatctataattgaacttatctgcgggatctagagagaaagacttagtagtaccaatatatattagctcatatgttttttttttttacatcattgaataaaacaaataacatattaaataagatgatgatgatacctatattcagaaccatcagcaagataagctccataactaccaatggaggctgcaaccaaagctctgttataagcatgaccaccatgtttatttttcatggaatcccaaaaactatctctagcttctaaggccaattccacactccttctcaataatgattccccttcttcaatagaaagtcccctcgaaacaaatccaggaagtgtagcctataaaaacaataaaaatcacacctttaagctcaatcaaagataaccaacatcaaacatgttgtggggtattgtttaaatccccattaaagatgttacctggtatgaagaagtgaccaaaatgtcagcaccggcttcaagatattccttgtgaacctatatatttatatatatacattgaatgaatgattaaagatgaaaactttaaagagagaatgaatgaagattaatacttttttgattagatgagggtctttgatgagacagagagcactccaaagaggatcattaatgtcagcgccgtgtttttcaagttgggtggcgaaaccaccgtccaccaccgcacaacctccagctttttctataagatcttcaaacggtgtcgttttcccaattcccattttctcttttttgatgattgtgaatgtaagaaatgaatggaaaatgtttgggaatttagattggttttatttggaaggagaaggagttggtgtgtgtgtgtgtgtatgaagacgcaatatttatattaattcattttcattttctttctttggttttgctattctaattttgttcccatacctttatatatgtctatattcatattatccattaatttagccaacttctaaatttaatgctacctttcattattattattattatnnnnnnnnnnattattattattattattaaaggggccacgtgttgcagattttttctcttttttgataatttcagtaaccatgtgttagttataagggtcttatatctcaatcaattttaattgggttatcagaggatttccatttaaagatggcaccactacagtaaactttaaccttcaaggaccaacaaatccctttcattattattattatttaaagtccacaaattacctacttataaaaagagaaatgctaaaaggtaagtagtgcttagcactttatgcataaatattactattagtgtaattaagtatcgattttatataatttaatgtaataacttttaaacagtatcgctaactaattataaaatgacacgtttttaaagtacttatatatagattaataactcata

SEQ ID NO: 36697 - DNA, 3186 bp, Cannabis sativa
aattctacgcaggtcctcgtaaaagatctacttaggaaatatccacaatggagtcatgattgcattgcagttgttggaaatataagcagcaaaaatattcaagaacccaaggccaaggcagctctcatatggatgttgggagaatattcccaggacatgcaggatgcaccgtatgttttagagggtttaattgaaaattgggatgaagagcactctgctgaggtaaataaccaatttctggcctctttaaaactttgtggttacacttgacttacagttgctcattttcttttttgttttttaaactgttgttattaagttaccacaataaatttatttgacctttcaaagaacaaagttaaccatgaattggcttgaacgcttttctattgtgatgtggaaattcgttgattccctcatcttccccttgatgcctaaatctcacagaaggaaaagaataagaaagttaaaaaagggaaatagatgattttggtggttatcatttgtcacgcgaacaagattcctcgtccgatttttgggctatgttccaccttattatacatgacatgattgtttcattgtaatcgcacaggttcgcttacatcttctaacagcagtaatgaagtgctttttcaaaaggtcaccagagactcagaaagctttgggagctgcattggctgcagggcttgctgattttcaccaggtacatgttgctacatatcaagtcattttcatatcaggttattgatttatagacttccgattttattaactcatgttctgtggaagcattttgcctgggaattttcatcgaaagtttcagttggttgcaggatgttcatgatagagccgtattctactacaggcttttgcagcacaacataacagtagcagaacgtgtggtgaatcctccaaagcaagctgtttctgtatttgctgatacacagagcagtgaaataaaagatcgcatatttgatgaatttaacagtttgtctgttgtttaccagaaagtaagtttaattttcttcttttacatcatttaagattttggtaactaaatttcagcctttattggatagctggcctttcttctgaaacaaatttaaacttgtattaatataataatcagtacaagcaaacattaggataaaatcgtaacgagaaaactaaacaaaacaaaactacataaaatataggtagccattctctaaatatgtcgtcaagctccctaacattaaaaatccaaatcactacccaatgtctaatcctttcccataatttctttgcaccatcttcaaccccatcaaagattctcttgttcctttttctagccataatgcgaatagccacaaccctgtcctctattttttgttttttttgcctttgctagtgatttaataaagttgtttgtgatgcaccacggaaaattaatttctttaaagaatctgtaccatattcttattgagaatgtatgatccaagaatagatatttagtatctttttcttgcacatatcacactgtatggtcttttctgtgattaaataaatcaaacttctatatatttttaataaaataagtaaaagttaagtatagcttctagaagtgaaatttcatctgttgtttttggctaccgagtttttggaggttgcatcagtgaccttttggccaaaataatgttgaattttcttttttcattgtgacgttctcaatgaactagcaccttatagttcacggaagcggagtgtcttaatcaaataatgatattttcatttgatgtctatctgagtgtgtgaattagtcatttaagctttcgcattaatttactcttcactcatggagaagtttgataatcacttgaatacaaattagtctagacacctttaatctgctttagtcaacagatcacggacacttgaatgttctttgagctggttttgaataccaatagatttgttggaattgagatactaatggatatacatatattatatttatatatttgcagccatcgtatatgttcacggacagagaacacaggggtctatttgaggtttcagatgagcttggaaatctgtctattggaacagaacttacagataccggtgttccgggtcacagtgttgttgcaaatgacaaagaccttcttcttagtacctcagagaaggaagaaactagagctcctagtaataatgatacatttagcgccccggcatacgatagttcattgatctccattgccgcttcacaaggacaatcagacttgatgagttcaagcatcaccgtgtcaggaaatgcaacatccagtttcgcaattgatgacctcctcggcctaagtataacagcagcatctgaacctgcaccgacacctccaccaccttctctgaaactcaacccgaaagcttctcttgatccaagcacttttcagcagaagtggcgccaactgcctatatcgatatctcaggtacatacatacttgttctaattttaaatctcaactgaaatcatttgtattaacgtgcctaatatcttaatctggtttcaggagtattccttaagctctgaaggagttagagccttgacaacacctcaaacgcttcctcgacacatgcaaaacagttccatccactgcattgcatccggtggccaatccccgaacttgaagttcttcttctacgcacaaaaggctgaagaatcttctacattccttgtggagtgtttaatcaacacatcatcttccaaagctcaaatcaagatcaaagccgacgaccaaactgcatctcagcaattttcgtccttgttccaaacagcactctccaacttcggttcttaaactcggggataagcatccttcggtgttctttgatgattaatttcgaaaaatcaaatcgagtaaaaagaggcgcgtaaactgtagacacaacattttttcttttctttttcgattggatggctgtagattggtgtacaataagttcatgtagattagggttccttaatttttttttcctcacattataatttgtactcttctctctttcaacatccactgattcatcttcaaacatgaatcaactgtttaatttatcttcacttcactatagttttcggtacttcatgatcgcgaagatccggtggcgtgtgtgtgtttgtgttttttttagccctacttcccaagttggcaaggt

SEQ ID NO: 36698 - DNA, 3752 bp, Cannabis sativa
  modified_base (55)..(56): a, c, t, g, unknown or other
agaggtaaaaatgatagactttaaaaaagaaggtaaaaataaaagagaacaatannaaaagggtatagagtgtaatttcgtcaaagtcttttgccaggtcaataggttaatatggaaaattctacgatacagtctccgtgtattaatgcatatttatctatttttttagtctaatttttttttatagttatgtacattataattatttaaaatatcctgtaaaattttaaaaagattaatacacccaaaatatggttcaaactatttattgtatgcgtgactcattattatttttttaaaaaaattaatacacccaaaattttgttgttttttacattattaagtattctaaattgaaaaaaaaaaatagactaaattttttttaatgaataccgaaagaaataaaaatatatcggtaaaagcattctataattattgagaagatatatttttaaaaacaaaataaatcgaaaagacaaagaatctgggtggaggtgcggcgaatcgaaccccgtgcctcttgcatgcaaagcgaacgcttaccatatgagctagaccccaaatttagcgtcgtcaaaggcataacttaaatttaaaatatattttgtaaacttaattcaaaagctcacattccattgcagtaagcattaaatgctgttgattccccagtgtttcgcagaaaacacactactgaattagaaaagaacaataattgctctgtgtgagagagataataataatgagtaggctgataagcaagtccacatgccttccatatattaatttcaatctgccgcaattaagcattattgttccacattcaaaacacaacaactctaatgactctcttcttcatcgatttgtcttttctactttgaagctctctcctcctcctcctacttcttcttctctctaataacactcaaaaacaccgccttccaattgggttaattttgtctaagagaaggatatttgcttttttattaatattatttacattctcttttccttaactcacactttgcaatatgaagatctctggcttctggataatgttcttcgtagtttgggcagccttgacgttccttggcttttctaactgcaaaactggctctaccgttcaaggtattcatttatttattttagttttcccccttttcgctgattcttgtttgtttatttgccaacattttgttttgtctttatgaaatgttgtctttttctagctcatatttaacaatgttagattttgagtgtgaattaataggaaatactaccgaacataatgtttccaggatgaatataggatggtcttggtacttgctacttttaagatattatatatattactacatttttgaaccagacatacatatatattaatatagaattgaaatatctaatttttattgaacctattgactatggtttatttaccaataaaggacaatcacatatcatatgacaaaaaaaaaaaaaaaagaaaacaatacataaggcatggatttatcagtagaaacatatataattacataaagacgagtttcctaataactatcatatttagttgacatgcatgtccctgtaccacttttctattaatcaccataataaagctctcccttttaatgaaatcattgagttgaagggacaagcattcagctacttcttccatcgcacgagaaaatgatatgttattttgacagctgatataatcttagaataatatctttgttgagaatcatggcgttccaactcaaaaccaataggcaatgagtggagtagcccatgttcttatatatagctcaatacttttacatttaatccatgtgggacaatgttctccaataatcttcaaaacaaatttctttacctttcatccctcttgtcttggatattattatgttgtaatattagcatatacataaattagttttactttgtcgcttttcttctcaaagtcccttgggagcttgcagactttcctttcgcagttttaaatagttgtaatgtgttgatggcctaattggacctaacacaaaatgtacatttcagatagtatggggtaccaccatggtgatggctcaactgtgataccaataaaaagcagaaagctcaaggtataaaactcacttttgattgtattagctaggtacttgtatacctagattgtttataaaaatgttgtctccaggaaactagttataaaccaaaggcaaaggaaactgaagatgagcccactatagatctgcaagattaccacccaattgatccagttccaagctcaaagacttctataaaacatgggccaatccagcatgggactcctgtaatcccatatatcccaaagccttctccgcctgaccatcccaagcgtggtggtggtgggtctggttaacaaatcctgtgaaagatttggccacttggaagattaatggtatgccactttgttcatttgtacttcatgtgtttgcgttgactagtttgatgcactgctgctgatgactatgaacttatttgtctttatattatttatcaatgttctgtgtccaaaccttttaacatatttaatatagtaataatttgtggcagacatttactagtttaattatattactatatatatatataaataatttgcttgagtaatgagtggaatgtcatttttcacgaataattgttattcaaaaagttcaacattgaaccttaacatctttacttggctctggtattcgaatttagtattttttttttttctctttctttggaagttaaattttattcaggtaataagagaaatattaaaaaaaaaatgtgatgatcgaataaaaaataaagttgatttttcatatttggtataaaaaaacaattgattttcccatatttttttcacttttttctttgcccacaaaaatctaagttcaaaatatagcaataatacttctagaggtgtatggtgacgccatgtggtgggggagagaggattaaacatgaatagtacaacatttctgggtttcggcctactcaaacctaccttaccaaaaccaacaacaatacttattgaaatcatgataaaaaaaaaaggacaaaaaagtactttaaaaaagacagagagagatactctgttccggaaacgatggatcgtcataaaatataagcacacaacttaagcttttgatacattctatatggtattgtttgtagttgtgtgaattattagaatggtgtactgaactcagaaacaacatgaaataaataagtttggcagacacgtttaataatcatgtcgtgcttgtgtttaagttttgacacgtttaataatagtgtcgtgttcttgtttatcttaatcatattgtgttcgaaaaatttaatgatcgtgttgacactataacacaaattaatttcgtaagtttaattatttttttgaaaaaaaaattgtgtttatttggataatcataacataatcatgctatcgtgtcatatcgtgtttgtatttgagtttttgacacgttatatatgtttactttaattatgtcgtttcataaacgtgtaaacatgaaaacgcgataacacaaattgtcaatctagacttttggtggatatgatttgtgagcagaaaaatggaatagtttagcttttgcttcccttttttttttttttttttttttagccaacaccactactctgttcaatttgcaatatttccaacaatcaatccttagcacccaatctgtccaacactacaacaaagt

SEQ ID NO: 36699 - DNA, 7298 bp, Cannabis sativa
ttcaataaaaatgcaaaaaaaaactgttttaaagtgtaaaaatataaaagccccttcattattttatgtagatatattttctaaatacagaaattaaaaaatatataactaattataatttaaaaattatttttatttataattaactcaaactaaaacttaattttttatgataaattagaggatagatcaaattttgaattttgaatttaatttttcttttttgttgtgcaaaaagtaacaatacataccgttttaatttgtacacctaaatttaaaaatacggttgttgtgataatagaaaaagctgaaaaacatcattactagtttactactttattttgaaagatcttctagaaccactcaattatataaactttcaaaagaaattagcaagaaaaaaaaggttaataggattttttttttcaatatagatcttttcgttttacaatttaaaggccactgttgcagattgactaatacatggtaaatttggtttttcatggccatcccaaatcattaaaaaaagaaaagtttataataatatttattttttttatctaatttataataataaatttattattattattgacatgtcacgtgagttaaatttgacgtttctgacctttttgacgctttttgacgttttttttttttttaattttcttgcgtttttaaaagtaactttttaattactaatagtgttgataggaaactaattagttatctttatataaaaaattttatttttatattatataatttgagatatattttggttagtctctacaaacttctttgtatacattttaataactaattagctattttaagttatattatagtagattataatttaaaatacatttaagtaaccttaaaaaaattgaaactaatgagttgtcatatagtgtaacaagctactattttatataatgattattttatatacctttttattattttgaaagctaattaaatataatataattcaattagcttaattctaaataaatgttgttaactaaaatttaaaaaaattataaaacagtaactaattattatattagtgaccaaatgttttttttttctagaaataacaaaaaaaatatacttccacatcttgaaatgttcacattgaatattagatcgcaatggtatttttttaggctcatccgagtaacgacgtgattagaaattatttttgaagtttgaaagaagaaagaaaaataagaaaaagagaaagaagaacctgaaaaagaaagtaaggtaagagaaaggaaaaaaaaaagaagagagagaggtaaaacaagggtattcaaacataataaaacaaataaaattattattgaaacttgactaagtcatttttgataattagataaaaaaaaagtcatttttgacaatttctcttaaaaaaatgtgatatggcccaaagaaggggaaaatgctcactctcaccaaccgcctctctactctattctttaaaatacatcatcaatgtttttttttatttacatcacacttttacagtacacaactctaaaaaattgggttttctcaactgttttaaacagcccgaagtattgttgtcagtctctttaatcgttgcctattcgaccgttgtaaaactgggtagaataggtgacggttcaaaacaattggcgaaaaactttacacgatttaaaatcgtcagcaatagtgaacacaatagctgacgattttagcaatagtgaacaatatagtcgacagtttaaaaccgttacattaaaaacttcccaagaagaccccaggtgagtgcagatcgacaagagacacgagcgggttctgatgctctggccgagaaatcttggcctaacaccttgggtgtccgagtgtgagacatgggtggctgagatttctcggccatgcacccataggatgcgcatgcggcttaaggtgctggccgagaaatcttaatctcattgggctatttatgtgtgtgtctcagccagcaggcccttttgggcattttgggttagttttggttcaatttcgatcccgaataattatttttatgcaattatatacactaataaagaaatattgtatcaaagatacatataaaaaattcacataaaatcatcaattacaagctttaaatctgaaaatatccaaatcacatccataacattttaaatcattttaaaatatatttatgcattaaagtaaacattgtcaaggctctgaagttaattgttggagcttattttactatgattttatttactaccacgtatgttaattataatctaataatgtaacatcctatgttttttctaaaataatgatttaaacaaattaagattgggattcttacattgggaacgcaagagaatatattggctccttttatttaatcacttttaacctttgaattttttctgtagcaatatattatcaattattaattgatgaactaattagatcttcttctctttgaatttcaagcagatctctacagaatcctccacaattttctgagtatcacaattttattaactcggaattatcatctaaaacgaaaagaagtaaccaatttcagtatatgggattttttttcagtccatgaaaatgctttaaaaattcatatatatatatatatatatttatacaattgcgttggtattaatccaaaatgtacgtgtatggatgaaaatcatattgcagagagtatcgtttgagatagaaaaataattgatggtatcaattggacattttatgcgtttcgaacatttttgaagggtcaattagttggcactttctgtgaagattcgtgtttttgatagattagattcttcttctcctttctttttacagtttgtttattgtaaaaaaagatattaatgagcaatattgcccttaaaaacaatttgtttctaaaattaaaaaaaaaaatacttttataatgactatttacgaatgtactcctgagattttcatcattgatctatggaactatttatatattaagcatgttttgattagacatgctttatattggcataaaaagttattatatgcgcactactatatatatttcttttcaatttaatatttatatatatatacacggaaaattttatcatgaatagtattcgaatttggtatctcagcttatccatgcactcaaatacattttgtctaacatatataaatatacacacacactcaaacacctccctacactatcttcaacttggcttttgaagccttcttcagcacttattaattttcttcatttattgaaaaaattatggtaagttatctttagattatatgttgaaataaaacatatcctttttaatttgctattgtattccgtaatgcgtttacatatatcattattattattatatttatattatatagtcttataattaagcttaaattataaaatacatgtgtacgtacgtagagttaaaaacataattatgtataatatgtttacgtacagagttatatagagggaaacgagatgagttacaagtcagctgggccgtggggaggagagtgtgggaccaggtgggacgacggcgttcactgctccataaggcaaatgataatcagccatggagccgtaatagattcaatccagatcgagtacgatacgaggggttgctccctttggtcggagaaacacggcgggagtggcggaatcaagactgataaggtgaagcttgactacccagatgagtaccttatctctgtcagcggttactttgggagtatcaacgactgtgggcctatcatggtccgatcccttgcctttgacacaaacaagagaagatttgggccttatggctttcagaaagggactcacttctccttttccttgactggtgccaagatcgtgggctttcatggacgaactactgggcttcatttggatgctatcggtgtccatgccaagccttttgtgaatatcaaaacggtccacactctggcccagaaccgaataggacttggagttgttggtggtggtggtggtgctgttgttggaggaaacaataaggccattgatatcatggttgccgtcagagaaaaaatggataatatgtatatatccgatggaggtttcattggaaagaacgaacaggtgcatacatacacacacatgtcaacaatcaactataccatatatatatatattcacgatgtctatagtaataaacttattaaggattaactgtttgggaatttgtaggcatttacaagtacaggtcatcatgagacagtgaaaggtagcggcggcgggtaccaccagagacaagttggaagagatcagaaagaaaactatatgattatgcagcctaataatcatactacttatagtaatgaagaaactgatcagtattccaattattccaatgaccacagggtgagtagatagatttcaaattatctttaagtgaagtagacttttaataaattctattctattaactaccttttcgatcgtggcgtccaggggttttatggacataatgaatcatcacctgttaaagggtaccctgcacctgcacatatgggaagacctacaaaagaattcgaccattacaacatggatgcaaaacatgatcgtcaccattacagcgaatatgaaacaaaggaaaaggttttaatgctaaataaattgttaaatactgactaacatataacaatttcatgatcatcatcatcatcatattgaccaatttcgtaggtgtatggagcaaaaggacgcccaagtccaaagtacaatattattgatcatgatgatcaaggttatgctctttcacctgaacgtggaatgtatagagagtatgaaacaaaagagaagactaaggtgtgttaactcctttattatataattataggtttaattgcactataattcaaaagaagtagggtgtgttaactatagggattgcactaattaagtactatgtatcaatgaaatttaatttcagttgtatagtggtggtggaggcggaacagagaagaattatggaaacatgatgcgaacagagggaaataatatgttcgggcaaaacagagactttagcgattatgaaattagtaataaagagaaggtaagcatgcattaatttactagttggtgtggtgagttgaggtgactgactgattgtcttgatttcagttgtaccagtctagtggccacattcagagtcggccacagggtggaaaacaagctgtgtcgtatggaccttggggtggtactggggggatgttatttgacgatggagtgtatacaggagttcgagaaatccatatagcacgctctggtggtgttgtttccattaaagtttgctacgacatgaatggcagggccgtttggggaaacaagaatggtggcaatggagggttcaggttggacaaggtcagactagattctacagagtgctattttatatatataagaaaccactgaaatataaatacgtagttgggctaacaacttttattgttggttgttgttttgtgatttaatgaataatgaatcagataactttcgattacccacatgagtacttgactcacataagtggatattacgggtcaatgatcttaagaggaccaacagtgattaaatccctgacttttttcaccaacaagaagaagtacggtccctttggggatgaacaaggaatacccttttcctctggccagaaagatggcattgtcgttggatttcatggtaaaaagggttggtttgtggatagcataggagtccatgttcttaatgtcgtagaggggaagtattcacaacctaggcctacttacgacatgaattccacattgaccaacatcagatatggtcatgaccaggtaaaacagaacatgttcttaataactatagtttacatttgaattataaaaacattttaacatattttattattatgaatttatcatgggaaggttgtttcatcgccggtgaaaggaccaattccgttaggtcaagggctgctgccagccatgatggtgaaagagccgacgggtggatgtggttcaggaccttggggtggggatggtggtaagacatgggacgatggagtcttcacagggattagaaagattttcttgacaaaaggagaagccattctctctattcaaatagagtatgatcgcaatggtcaatccatgtggtctgttaagcatggaaccaacaacgatggtagctgtcatgtggtacgtaatactaataatatatatctatatatatagtatattggtgtatatatattttaattataaaattaactaattaatggcatgtattgtagatccaatttgagtatccacaggaagtgttgagtggcataagtggatattatggaccggttatgggagacgcatgcaagattgtggtgaagtccttgactttctacaccaatagaggaaggtacggaccatttggggaggagatgggaacatatttcacttctccaagaaacgaaggcaagatagttgggttccatggaaagagtggggaccatctttatgccattggagctcatatgcagccctggtgccaggatcggtctgccgatcaccaaggacccatcaaaatgattctcaacaaaatcttcgcttaggaataatggatcctaccctatcttatatattgttaatttcgaaaactgtattgtatggtatttgcaaacaagtcatgacttccagtactacgtacaataatgtactcttaccctggaggaaaatgagtaaaataaggaaagaatcatctctatatataatgtaatgaagcagtatatatatatatggtttatatgggtatactgcgtggtatttctttcacacaactacttgtcagtattgttagaaatttataaagagcagacattactaattgatccatataatttagagagtattgcagaaacctatgaattgaatgatatagtctataagaacatatttaattgatccattgagataattgaagaaataatgaagattgttagtgcaaactccaaaggatctctttccactctacatctctaatacaggtaggggacctagcaataaaatcaacacttctacttcaattggattttacatagatattaaacccattaactatagatctaataattataggaaaattgatttttgttgaaaagaaagaattgaaatcagctgaaattgaggaataaagaatattctgtgttgatataaacctccacttacactgatacttaaacttaatacaaaggacagaaaaggaaata

SEQ ID NO: 36700 - DNA, 7289 bp, Cannabis sativa
caagcattcttattctagtttgtttatgtgtcttaggtttcttctgatcactatatggctactaacttgttcaatgatggtcctttacattgtaaaaccacttgaaactaactgcaaagggatattcagaaatgcatttttatttggatgtgtgcagattccaagcattcttattctagtttgttcatgtgtcttaggtttcttcaagcagcattcatggtactgttttcttgcaatctccattagttcatgaagctgatcaaagagagatgttctgtgtctatttatttccaggaaatcagcagagtaggaaggttggttggtcctacacctcattgaactcttatttctttggttattattattttttttttgccaatatattgtccaatttcttttgattgtgtaggtattcaggaaggatatagtatttgttgttgatataagtggaagcatgcgaggaaagccaattgacgataccagaaatgcactctctgacgctctctctaagcttgatccagaagattcatttagcatcatagcatttaacggagagatttttctgttctcaacatcaatggaagcagctacaacggaggccattgaaagggccactgagtggatgactatgaattttattgctggtggtggcaccaatatattgcttcctttaaacaaggtatgtttttcttgttctcttcaactgggattcaccatataataccttcttattcttggttgcacacgcaagtggtgcattatttgtatgcaggtttagatagataaaaatctggcattatttcaaggtctttctgaagtctttatggttttctgattgtccatttctgattttccatgcatgtttatatgctctggaaataattaagttaaaggaactaggatgatgttttgtgcaccaatactcttaagaacattagacaatagaacagtgaaaattagccgaacagccaagcaagccaagagttggtatttttgaataaaaccagttgtggaaatgaacaaactattgctcctatcggaccctatgatgcagtgagtgagtactcaattcatgaattcccacaactacccccttactcacctatatataccatccaattccccagtcattattacaattgcttagatacccttttccatctactatactctcattctactcatcctaccgatcctgggatctaccataggaccatttacgttacaagtttaaggtgctttataagcctaaaactgctataattcaagtccttgttatgtaaatttccatctggattagactacttgatataggggaagttaacttttattaagtaaacagctaaatcattattcttttttgaatcagcatacaaatattggctgagttgtgctgggcttattttcattcttatttttgctttaggcactagaaatgctatcaaatcctcggggttcaactccgataatttttcttgtcactgatggggctgttgaagatgagagacaaatatgtgatatcgtgaacaatcatgttgcagaaatgggatcaaaatgtccacgtatatacacctttggcataggtaatggttaatacactttctgtaacaattgtttccaaatcagactctttcttatgattttaagtggcttcacaaattttcattttcactctaggtagataacctgaatttctttaagcgacaccatggggcttggtgttgttgttgaagtgttaaactcctttgtaatttttcatctatgtttgataataggctcattttgcaaccaccattttctgcggatgcttgcattgatcagcaggggacaatatgatgctgcttatgatgcaggcaagtgttttcttctttatatctatattagcttttttaacttatgtagagaagcttgaaaacttttaccctctccttggaatttggattttagcgaggaaagtaagtttatgagaaagttcgagagttaagttcaatgtaattttataaaaattagaacatttaataaagtctcttatagattttttctcaccaaagactttcttgaaaaaattgagttctgaacaaagcctaaagtgttctgaattaaagaatcaggacttcaaatggtgcatttcaaagctaattatccatgaagcttgttgctttgattgttggttttcttaagtgaagaccggggatctgtccgaatttggttatgtgctgattatctttcctgactgacagatttggtggaagctcgattacaaaaattatttactagagcttcatctttgcttctttcaaatgtaacatttgacgcattggatagtcttggtgaagttgaggtatgtattctgaccttcattttccatttttttatccatggtaaataaaaacgaaatcatgcttcaacctgttcaaatgtttatgtttcactacatctttttagtggttcttgcttacctgctgtgtgttctatattgactaaaaactggctcccttcgatcactttgttaggtgtttcctactcgaataccagacctttcgtctgaggatccactagttgtatttggcagatatcaaggaaaattccccaactcttgtaaagctaaaggtgtcttggccggtttgaatagttttgtaatagatttgaaaatacataatgcaaaggacgtaccacttaacaaggtaaggcatctaatatttagccacctttttcatattttagtttctaattgtcgttgtttagtaatttggtgttttgttttggtcataatagatatttgcaaaagaacagattgatcagcttactgctcgggcatggtttacagaaaataaagaactcgaggataaggtttgttgcttgatcctaacaataacccgtaaagacgtaaaaaataaaaaattgctaataatttgatgatgttacaacatttaagtcatatttttttttctaattccacatctacatgaccaacaatattactttatcgtgtgtagaagacttggcatgaaatgcttttaaaagttcactatttcctgtaaaataaatactgttcctcttatttgacagatttccaaaatgagcatacaaactggggtagtatctgagtatactcggatgattgtacttgagacaatagggaagaaaattcaagatggactacaacaggtactcatataactattgttacactatacaaaataatatctaattatagttttttgtactgctatgtggttttccaccaaatgcaataaatttgttacaatttctattatcaatgttattattgttataaaccattgattttctttttctaatgaacccaaccatctcaaaaatacaaaaaacaagcaggtaccaaagaaaagcctacccccaaaaaaggcagctgctgaaaaacagaaggtgataccaatgccaagtctatgtattggctttggaaacttgactgcaacggctgaaaacgttcctccaggatgtgaagaagcaaaacttcctgaagttgcggaaatgttcgtgaaggcagcttcgagttgttgcggcaacatctttagacactgctgctgcatgtgctgcatccaatgttgttccaggatgaacgaccaatgcgcaatcgtactagcccagatatgtaccgcactggcaatatttggctgccttgaatgttgttcattatgctgtgccgataacgaatagaaaattcagtccgaacagattattttattgttacaaatagtttttacacttgtaatagagatgtgtaatgtaaatgaaaatgaggcttcgtgacactggttcaacacttgtataatcttgagtctaatcctcttcaacatgttcctcaatttttaactctgtctcttcttcttctccggagtcatctgatctgtggtggaaggtctcttggatcttcgttactcccttctccacaggtcccattgcttgatttatagtcaatacaacatcgctcacaacctgtcaaattggcattatttaagatttaagcctatatatatgtatatatatatatatatatcttgttttttcaagagaaaatagttgtacttacatggtgaccaccttcaagaactatgtcctgaacactctcggtcacactagttccaggagcttcaaccttaatttcttgcttctcaagcgcagctggggtgtcattgtcaccatcttctaatttaacttctctgcttgattctgcagtgacactccaatgcttgatagccggtacatagtggtaccgctccgtcgaaaagacatacatatgagcaacagctgcaatagccatctgccaagccagtaaacataaacctgcatcatctttgctttaggagtataatagcaaaaccagacatttcacctcattaataaggccaagaccaacaaggacatattcttatcagattatcaaagtgcactatcttatattaacagaacaaataaaggcaagccaatgtagaaaaacagagttgctaacagaatttagtgaagggactcacttctatgcaaatcaagaaatcctgcaatccactctgtaattctccctgtttaggtatagctccaaaagcacgcagtagagcaatagctacaccttgccaccaagtggcaaatacaatagccttgaaacttatgaactttgcaagtggttttattggttgaagtctttcatgagttacattgtagaattgcacaaggcaatacagagcccacatctggctgaaatttagtaccactgctaggtagggatatctacaacaaaagttaagatgtcaaaactagaacttgttttgttaacttgaaaattaaagttaaaaaaggctcattaaattttgttttcagaagggttaatgataataatgagaaacctacccataataccacttaaattctccatcaccataaacgcctaggagctccaacaataatgctaagaaggcacaaacggttttcagaatcatctgagctaatgaaaaaaacaatatatgagaataaagatttctttttaagaaaaaagaaatgatgaagaagctacttacatattgtacaaggccaaatttctcgattgttaacaactcctttccaagaacacatggtcgagtgaagaagttccaaaacgacctatttctctcattaatatgattttcacttgcctcttctatcaatggtttgttcagcagttttcttgattcattttcaagttcttctatgacacttctttctcctcctgccatggttgtaacaattaaataataatactaataataataaaaggaacataatatattataatagacccaaaaaaaagaagatcatgatagagtgagttaccaagacaagcaatcaaatagcttccaaaagaatacaaggcaaatgcttcataacagtttcttaaaatgtcacaggccaaagaaaactttggattccacaaagatatgacctgttaagagtttttaacataattaatcagttcttagaagcttaataacatacaagcaattgaatatatatatatatatataattaaaaatcttactgattcagtggcataagctggtactatgaaaagaacagcaacaatccacttttgttcctgaaaaatcacatcaaaattaatcctttgtttcttcataatgaaatatcaaaattaatggtagagaaagaggaactaactgggggattagtatatgatctgagatgttgaaatataagaaagatagaaagagagaacgccacaagagcgaagcaacttgccactatgagtcctggttcatggattttcctatacattatttcactttcagacactgatgaataataatcatcattatttatcaccatttccattatttttcatcaaaaacaaaatagtttttcattaaaatgataatgtaaaccggtttgtataagatagtattggttgctgtgacgttgacaagtgtactacctatactcaagacagttatcctgtgatccactagacgagcctgttccgacacgtgtactttaatccaaagtcagcggtcgtccacacgtgtatatatgattgatgttcccttctgtttatggttttctttgcctcaagtcaagttgatgtcgtttacggttattctgttgtcgttttcagttttgacgatcagatgtttactcgttcattttaatgatttcttgttgttttattttggcttctgagttctgattatttcaatgtcactgtttttattcggttaattaaatattataccagtactttattcaggcttgatgaataaatttaaacgtgtaaattgcggtccaaagttttgagtttttaggcgtgaattttttaacggcataagtacttaatatttgtaaaattataatttttttttattttttctgtaaaaaaaaatagaaataattgacactacacgtttctgttcaacccaatgatatagaatctaccatttgggctttatatgtgctttttttaaaaataataacagagcatgtacggatgaaactcgagaaaaattactgttttacaaatattgagtacttctactgctaaaaaaattattaagtttataccactaacaaacccaaaattttaagtacttatgctcctcatagccatcactatcttatccatcggaaactatatcaacatctccatctttcttgagattatagttctttaagattggacagtcaaatgagtacacgaagcatattttcttgaacttggaattctgtagttgcctttaattgaattgttctgacccttgtttttcttctttggagcatttcctttgatcaacaatccatcatcaacactttcttcttgttgttctaatttttcaattcctttgacattaatgcattctgaatttcctttaatgtcaataaatccttaccatatatcatggtatccacaaaatactcataattctctgcagtgggaaattcagtactatgattacttgatcttcgtcctcgactgtgattccaatgttttccagattgagtatcaccttattgaaattatcaagatgatcttcaatagtctttcctgctatcatcttaaaaaaaatacaacttttgtttcaaaaataacctgttagtcagtgattttgtcatatatagaatctctagtttcaaccatactccaactacaaaatcttctttaggcaccctcaaaaagttgtcttagaggctcaatatgaaggcactatgattcttttcaagaatgtcgattttctcttttggagtcaatccctctgatagattttattctc

SEQ ID NO: 36701 - DNA, 4389 bp, Cannabis sativa
aaaaaaaaaaacaaagaatatacctgctgaaaatattttctaggtccgcccatgctgcctgccctacatacaaaggaatcccttaagttgtatgtttaaatatatgaatataagagatttcatattaagctacattatgaaaactgcttaatttaatcgttgtcatattctcacaacatgtagtacattgatattatatatagaatatatatgtaaatcaaacaattggtagatacaattttacctcttcaaccattcataagaaactcatgtgaaaattttaaattcttgtaaatcattcatgtttatttgttttatcatctaatttgtatactatttttttttaaaagaaaataaaattaaattgcgtatgtcttttgagcatgaagataaaatgtctaattcccaaacaattgaagataacatgaaaggatatttataatattttttttttggagttattaggggtactatttgttgaatatagtaactttcttcattagagtcacaaaattattaaaaaaagaaataaaaataatataaaaagaattaattaattattgatataaaacaatagagtgacacataatgaaaaaaaagtctgtatgtacaaacgtttttcgtgactctacttaagcattatccatatagatatagatattaatgataaatatatatattttaataaaattattaatcaaatatcaagttttgtaattatgtattgagacacaatattaaaaattgatgtaaatataccataaatttattttttgaactaaatataatataattttatatttttattgaacatggtctaagatgataattgttatttataatgataaatttttggtaattggataaataatttggggagatttaataggaaaaaaataaattaaattagaccacatatataatttgtaccgatatggattgtaaattcaatcaaattagaacctttggataatgtatgcacatcaaagtaattttatcggaaaggtggattctgtcataattgtgtcgttaacggctttgttcactataaaccattttctttcctaaaaagttaaaatgttaaagctagtgaaagagtggggacatttgaccaaaaagccacgctccactttaataagctcttctttctcaaaaagaaaaacactcaagtactttatactataaagctctaaaaagattaaatacaaatgcttcattatatttaattgggaggacttgcttccatttttacaattaaattcaatacaaatgttttcattgcaaccattttttcccttttctttttcattgtcattatatatacaaataaatgaaagaatatctaataaaaagaaaacaaaaattaaaatgaaaagatggaaactgagagagacatatgcaaaatgaatgagcaccacttttgggattcattagttttcactccaagagtataggcatcacaacttttgcaccaataaaaagtatcttatcgtttattgtaagtaaagcaaagcaaaccaaagccaagccgaaaaggacaacaaaagaacatgccttttctcaccgttttctctttaggtttaaaagttaattagctctctccaactccgtagaatacttttcttcttcattccaaattcaaaaatgtcaaacgacatttgtcccacatcgaaacgcagagaaatagtcatcgtttctgatcagaaagaccaagatctcctcccaggcttaccggaccacttagcccaagtctgcctttccctcgtcaacccatccctcctcttttccgtctgtcgttcttggcgtcgtctcatctactccccttccttccctcctttcctctccctctacgctcttttctcttcctcctcccattccaaccaaacccacctcaatttccacgccttcgaccccatctccactaactggcgcgtgcttcccacgccctcatctggctcttccctccgcctactcctccgtcacccttccttcgtctctcgcaatctccctgtacaatctatcgccgtcgccggataccttatcatcgtcgccgcaaccaccgataatctcttcccggctcttccgctgccactcgtattcgacccaatattgtgcgagtggtgtcacgcgccgccgctatctgccccgcgcaggtggtgtgctgcgggttctctacgcggattggtctacgtggcgagcggtattggatcggtcttctcgtatgacgtggctcgctctgttgagaggtgggacccacgtacgggagccgatgggccaggttgggagagggttagcgatctcaaggatggtagattttgtcgagatgccattgaagccgttgggtggagagggaagctttgcatggtgaacgtgaagggggaatcgattaaggacggcgtcgtttatgatgccaatagcgacacgtgggaggatatgccggaggggatgatcggagggtggagggggccggtggcggccatggatgagtacgagatgttcgtcgtggatgagatgaagggagctctgaagaagtacgatgcggtgagagattcttgggctgatgttattgaatcggagagcctccgaggagccgagcagatcaccgccgggggtggtagagtctgcgtcgtttgctctggttccggtggaaaagggattgtagttgtcgatgtgacagctgtgccggcgaagttgtggccggtggaatcgccggagggactagaagccgtgacggttcacatcttgcctcgaatgactgcttcgtaatatccatgtaaataaagttttttttattattattttttatacaaaaatcatccgaaaaaaaaaagagattatttattattagttatcaaatcaaatataaattaataaatagaatgtagtgaatgtgtaaatatttaaatgtttgtgaccattattttgtttgttacattcaaaagtgaaagtttgtccatttactagaaaaaaggaatggctaaaaaacaaggtgatgtaaagatgaaaaaaaagccctctgccccacgaaacagagaactcatatcaatgtatttttttcttctttttttattaacaatcgtatcaataaagttatgagatgattctatcaaaagataataataataatgtcatgagatgaagcatgcgtgatctttctcaaaactataaaccgattcacctgtaactttgagctggcgctttaatattcttgttttcttttctcctcagctcagaattatagtcttttatgttttagataaaagaataaaataaagagtgatcgttaattattattaatttttatatatataactaaaagagattaggggttgcatattctatcttcagttttttcggtttaatatcaatcttggacaagttagggcttatacactactcttaagataattgtcagaagaaactttcacataagaatatcataacctagttaataagatacacaaactctggttactctcaaaagagaacaacttttaaagtacagaataagttaacagagactccatagtgattgttaattaattttggtaactgaaaataaaatttttattattattaattttttttaatatatgttggaatggcaagttggcaaccgtaccttttgacaataaatgcgtagaaaattaatatcgaaagatagtcttccatagccctacctactgagtactcgaattatgaaatgttatttttggtacatgtattaaatcctcaccaccaatttgtcatttttatttatttattagaagaatgataattcgagaagtatgagactgatattacctactcgtaacggtatatggacataataaacatgacaaattgtatctctcattaagcataacattacgacaaagcgtcatttgttgcagatccgaagcagtggcctcaaattttaatttgtgggacaaaactgcaataattatgtttaattgtataataagtttaggaaattttaacaaatttttacactaggtgtccagggcccaccgtgaaattatatagtcaattaaattttgggaccctcaaaaagagatttgaaccatgacgttggaaattatatcatgggctatttacaaaaatataagaaaatgaagatatgttttgatatatatggcataaaaacttttttttttgagggaaaatactttaaacaaataaagattcgtttacaataacagagtaaatcggcagagggataatatccaaccaagtacaagcctcattcacccctaaagcaaatttagttaggccatgggtcgcttcatttgcagaacgtttgacatgtgatacaacaacgttagggaaaaaggataatagactaacaacatctaatattaaatatgaaaaagaagagtttggattgaa

SEQ ID NO: 36702 - DNA, 4312 bp, Cannabis sativa
aatgatcctattttcactgcacacactaatgtctgacaagtgtgtacaagtttgtaagtctcctcttctaaattaataaaaaaatcatggtccacattctatgtaacttgttttttttttctcaacatctagtgagtatggtttatatctgagacactaaattcttatcatctttgaaagcataacatgattttttgtctttttacgaaacctggtaagatgcatgctctaaaataacttattttttgtataaatctttctagtttctttgttattcgaatttttttgaaaaaaaagggttgtgtaacttgacttgtgggctaaggaaattcggtccttgttttttcttatggtaagtatcaacatatgctctaattgattgtttatgatgattttccttttaaagtttgatatcttattcattgtattttgtttaattgttgatcttgaaagatttatcaactttaattggtttgtttatggaaaaaatcttggtttattcttgttcttttttttttttttattttattctgtgttttttttttaaaaaaaaaaataatagataagaaaagaggggtggttctctctttgtaagagggaaaggcagttgttttcagttttctttttgctcttccttcatatcattatttataccaactcattttttatttaatctcacattctctcatcttctacccgatattactctcccttgttttcctcactctttgttttcattcttactttcaataattcatggctaagacaaagaatttagggtacccaagaaagatggttaatactaaggctgctccatcaaatgcctcccctatgccgtcataaccatctcatgctgcagcaacagcttcgaatctaggttattcatttcatcttcgatgtgaaccaaagaaagtgtcatcttccactccttcgagcaaaagagcacccaaaatacttgctcaaaaatctatgaggcatatccgattgcctaagacttctaggcctggttcaaaatcttcctcgttgtctggtgaggcatctccttttcgtggtactcaatcaccacctgctacaactggtgttagttcaaccctaaaaggtctttcatctcagacccatgcctagcaagcttctcttgaacaagaagctcaaaccaaatgacgtcatgataggcctgttcctgctgctaaagctcaaacttaaccctccctcggcctcctcgagtaatgatgaagaagaagaacccatggaagtgtcttctaaggattctgattccaaaactgagtctttttcatccgaaaaagacatttcagtagacgatgatgttgtctcttctaacagtgaggaagtcccaatcaaaattgaggataattttgttaatctggatcctgagccatccttgccaaaatctgcagcgcagtaacttctcgttctgcttctacagtcaaagcttcagcagtagccaagggtaaacaacccatgaaaagcactttgtctggtaatctttcttcctctcaagtagtaagttctagattcttttataatgataatcaacatgattggaccttatatgctacccgaaagtttgaaaattgagagaaattttaatttaaatgctcatagagtttatggcattgtgaagtatattcaaaatcaaaattgggaggacactttaactgggtttgaaggttacattgatggcattgttaaggaattttatgctaactttactcatgatttgcttgataaaaaatctaagtactttggtaaagtctatgttcgtggccattggttttcattcacttaaaatgatattgaagaagccttgaaaatgcctaaaggagcaaaaaatgatgaagtgactatgaatcatgacctcattcttactgatctccttggtgaacaagtcaaatggcctgctggccaaagtgttcgcaacactcatctcacttatggccatgtctctcttatgcggtttggtcttagcaatcggcttccaaattccaacaagacaatggtgtctcaagacttggcttttcttcttttttgaatcactttaggggtaaacattaacttggcttctctcatcatggagaaaattatttccttctaaagaggtaaaaaacgtagccacaagcttatttttcctaatataatctataaatttctttcctctcagaagaatgtggcctattcgaattagactctcgagcctcccttcactagaaccatttttcaattctcagagtacattgtcgggatctcgagttaaactttttacaaatgtttccaaaatattttcatatacatgtcacacagcgactacaaaatattattctagatgtcccgagaccgaacactccaggtcgcgctgtcccaacatataaatatatatataagtttataaagtttgataatttaatcaaaagttttaatttgacacgattttcaaggaaaaccctttgattagcaaaggtgacacattaattgagaaatcactgcagcgcgcctaagcatcagggcattacaattttggtatcagagccgccaggtttgtctaccgaagattgtcaagacatgtacaatcatcatcagagaatagctcgactcacggtttagtaagcccttacttgtttagtaaagcatgttaggaagcatattagtttataattgtttattttaatgtgttaccttaaaagccataagtgcggtattaagtctatgtgatcgctgtgtgacctgacttacttatgggttcgtaggctaactcttattaaatggacacccaacaaaatacaaggagttagggtaatagggtcgagactagaggcgttcaaagaaatcgaattccccaaagtctccatggacgcagcagaggccgtggaaggtttcagggtgatcgacattaaaacccacctcaagctccaccagattgggagcaaagatttgtagaaatgcaagctcggattcgtcagcaagatgaagagattatgagactgagaaagcatggtcctcctacagtgcctccaccacaagttcaggtcgctatggttctagtggtgccagtagaacaacctgttactggcaaccgtatggagccactgtatgagaggtttcgcaagtaagtgcctccaatttttctgggaggcccggatgttatgaaggccacgaagtggctcactatcattgaaagaatcttgaacttcatgtgagttaacgaaaatgactgagtaaccacctgttctactacacattatttcatcagttctaggaagacgctcttgtgtggtgggagttagtgtccctcacttgagacgtcactgttatgatctggaaagaattctgggacttattcaatgccaaatactataatgagacggtccacagtgctaagcaaaaagaatttaccgagctggtttagagtgagggtatgtcagtaacatagtacacaacaaagtttgatcatttagccaagttggcatcgggtatagtgcccatcaacttcagcaaaaaagaaaagtatctagtgagtctaaatgcgaagattagacatgacctggtaatcacaactaacgaagcaatgacatatgctgaaatggttgataaggctctgcgagccgaaggtgcagtgaagtttcttcaagagcctcgagtgactccaagtgttggtggaacctccactcttgctactcctgcatatgatagggatagtggtgattccatcaccgatcaaaaaagaaaggctatcccgacatctggtggttggggacagagtaagcggttccgatggaaccaaggcagaggtggatgctagggttattcttaccttgagtgcccacgttgtaagaaacatcatcctagagagtgcaactggaaaacatgcttctagtggggcatggttggacatttcaagaaagattgccctcaagtgaaaaaataatagcataagcaagaggcaaaacccgtacatgcttgggtgtttgctatcatacaagttgatgttgtagccaatccttccgtggtgataggtcaagttattgtcaacaactcctattttactgtactatttgacactagggctacacactcatatgtggcatctcgcgtaattaatcaattggataggccatgtgactttatcaaaagagggtttggaaccctacttcttatcgaggaattagttatctccaaaaggcgagttaggtctacgccaattagagtggaaaatagggagttgagtgttgactaagtagagctggaattagcagagtttgatatcatacttgggatggatttcttatccaagtattcg

SEQ ID NO: 36703 - DNA, 5325 bp, Cannabis sativa
taagatttcacaatatttaagaatgaattgaaattgtaaattcctaagttgagtaagttttctgaaggtatatctatcatgcatgcttgagtaataagttcatctaaattgtttcattctgcaaaagttgtgcctttatttattaaactattcatggtttaatgtattttaagtttggagatgagcaaacggaatgatgatagattgatagtttttccaggaatctagtgtataatagctctaaaccagctttgcaagtatcactcattttctttaatttctttcttataatttcagtttaacataatgtgccaccctgtacacttgcatcatgtatgaatatatatatttatatgtctatttatgtatacacaatgggcagaactttagatttccacgcaagatagttcaagtggtcgagcttgacagtaagagaggagctgagagagttggcaaaggagttttgaattgggagaagagaagcagaagaatgttcatggccatagaaggtgactgagaagaattgtttgaagggttggaagggttatctataacagcaggattcataggagactatcattaatagagttctaataccatgagatacttaaagaaggagaggaaaaagatagggtgaacttatctatgtaaagtaagagaaatttgatttcagagctttacaaaagttgcttagctcaagttacaaagtaaaaaggttaagaagacaagaatcaagacccaagactgctataactaacacagaaaattaacagactaacaaccagtggtggacccagaatttaagttgatcggaggcgatacttttttttataagtgaatggtcgttttttttttctacattgtataacatgttaaaaattaatgtaaatttatattttaatattaaatatagtataaagtaaaaagaaaataacaataaaaatattgagttcaataattaagacattaaatataagtattattggtagatgttcaaaaaataaaatgcaaatacaacttatgatttctttatatgcataaaatgactttatcataaagcttattttacgtctatagagattatttttatttaagaaggcgactgcctcacctcatctctatatgggtccgcctctgctaacaatcatattgaaccatttagtaagtgttaagagttaggtgacttaagatcaacaactttgttatcaatgtaaaacattatacataaaaacttcacttggttctgctaaactacaatgattatttttaaataaataaaaaaaactattttcttattagttcatgttagttcaaatcacactccaatgccatttcattatttcatttgtgtttcgaaaggataaaaaaattaaacaaaaagattatatgacactaattaagtgctgttagtaatcaaaacaatttacattataaatactaattttactttaatcaaaacgttatcaattcggcctattagctcagctggttagagcgtcgtgctaataacgcgaaggtcgcaggttcgagacctgcataggccacttttctttaccttttttaatttattttcatttttccaaagaggggtattacggtaaaaacgcaactcgtttcaaaaaaacggtaaagagggatcatacgaccgcctcttttcaaacatttgctttcaaaaaaaaaaaaaaacccactaaacccttccttccaactatgaagcaaaatctactgaagaagaaagctatggaggttgacaaggtatctcaaacctccttcgattttctttcttcctttccttctttgtttctttgtttccttttttcgaaatttacggaatttccttttgatttgaaaccaaaggcaaaactcctcactgttccgagcgtactgggcagaggtaatcgacttcgtggaagcagtaaaagatctatgtttattaatttcaagaaaattgattttattcatttgttaatgattttttttataaaattttgcagccggtacaagaaattttaaggtctatacggaaaaggaattttctgaggttgattctcgtactaggtatttatggttctaatattagaaatcagtagttctgccttgaatttatgttattgaatgttagttgtggttaattttgaagaaaatattttcaaggaagaatggatatacaaaatgttggacttgatgtttaagatttcacaatatttaagaataaattgaaatgttagtagctcatgaaacccagttcatataagaattcttaattatttcaaaaataaccttatcatctggaagtgaatttactttttttttttgtagagaattcttacgcttaaagaatctcctacaaaacatcttgtgtgaacctgagtagaagctatgtagtattatagcttaggcatgctaggaaatataaactttattttctttaatatttccatatatccattagttgaagcacagtggttcatgaaacccagttaatttagtgtctttcttttactacaatgggtaattaaacccatgtcgcctcccctcaaactcacatatcggaccacctgagctagccttagagtggcttgtatacatttattttactgggtagtataagtgttcctatctattcttacagattttgaaattaattatcttttttataatagatcttatgcaatgcataaggtagctctacttaatatatagtgtgattttttttctcaatatttttgtaactcatttttcctctgtttgtttggttaaagaaaatctataccagttaccaaagggtctactttggccagtacgagttctcagaaggtattactatcatgcttgagttcatctatattgttgcattatgcaaaagttgtgctttgatttattaaactatccacggttcctctttgtctgaatttattttactaaggcggttttgacaagtgtggagacgaacaaagggaaaaatgatagttttggtatggcctagactaaacttgtgcttgaattttcaacgattctttttctaaacctctttcatttatgagctactttccttttcctactttcctttttaggaaaagcaaagtttggaagaagaccattggcagatgtcagtaatgttaacaacatatcttcaaagaatttggtgtgcaatagctctaaaccttcgtaagtatcactcattttctttagtttctttcttctagtttcatttcaacataatgtgccaccctgtacacctttgtacgtataaatatataatatatgtatacgtgtgtctttgtttatatatcagcagtgtaatatatttatgaaatgatattagggttatataatttacttatttaactatgtaatcgcacatatctattataacatttttgtagtgtagatcatatgcttaaggaaactgatacttaatatcttgtatgatacttgacctcactattttcccattttccttctgcttgtttggttaaaggaaatttatgccagccaccagaggatctactttcgccaatacaagctctcaaaaggtattaatatctagctgttcattcgtctgaattggtagaaggattgcattgattcaaactaaccatggcttctccttctctgattttctgctaaggctgttttgaaaagtaaggagacgagcaaagggaaaaacgatacttctggtatggtctacttacagtctagactagacttgtatttgaaacttaaactacttatttcagaaattctatgatgaactactttccgtttctagaaaaatcaaatttgggaagaagaccattgacagatgccagcagtactaacagcacatcttcgaggagtctgttgcgaaatagctccaaaccctcgtaagtatcactccgtttctttaattctttcttcaaatttcattttgacttaatgtttcaccaagtattaagtagcattttacgttcatataatatttgtacttattatacttggatgcatattaaatgcatggctatgtatttgcagatattcattgtataaatatacatataatattttaaagaggatagggggggtctttatcttgtgtgaagccttcatttttgaaccaagggttcctataaatacttcattgaaaatttgtagttcatgaaatgagagaaatattctttgttacatgatgtaccttctatgtatttttttagtatgcgtttgagtgagtgatatgttttctcaatcttaatttatcttgcaaaagcctttttgtataactttgacggaagttgaaaataacatcctcactgttgtttgatccttcgcttgttttcgtatctttagagtatcagctactgtgggctctaggactgtaaatgtatcatcaaggaaatcatttcaggtatagatttgtatttcaacattttcagtttagaatgcgttgcttacgaataatcacagaaactagtacatttaccttctggttcacatgtctcctgttaagtgtcatttgaatgagacttgggctagaaaagaacttatttaattcacgtgcctagttaaaataattagttaagtgcataaaaaagatgagtggataaagttatattaaatattctcttactttgttaactaagaaaggctgggaaagtcaagttcctggtgagaggctggacatagggataaccttcagaattatgtatttgatttttctatttttggaaaaccattgatttgaatggcagcaatgcttacacacacacacacacacacatatatatcaatatatatgtacatacaaaccaaaaaattgaatcaaattagacaagcttatattgaccatattcacaatcctaatgatctgtcaccatttgccttggaactgtgaagtagcagactataatttttatttgatttagcggtcattgaaagtttcttcattcacatttgtctaactaggataagtatgcagggaggtattagtcaaggtgatcctggttatcatacttcaaagaaaggtgatttatttcctttataaatttatgaccagagtttgataaacatgtttcggttctaacttgcttttataagcagtgcttgttaaagatttgaaggttccctctggttaccaaaggatcaaagtcactggacaggctcatggatctcttgttgatttaaatggcaggtctgttaaagtttcctcaaatcaaagactagtatgtaagaatatttgggcagttcaaacatgttaacggattatgtttaatgtttcaggagaacaacaaggacttcactcataccaacaaggtttgcaatttgattttatattattattattattat

SEQ ID NO: 36704 - DNA, 4369 bp, Cannabis sativa
  modified_base (2081)..(2086): a, c, t, g, unknown or other
atgaactatatcttatgatttatacatataattatatacttttttcactaaaatctttacaaaatcaatattttatatataactatgtacaatatggatctaattattgttaataataataaacaaattaataagaaaaataatttatatatatacgatatgatattattccttgaaagccaatagtaattttatcatttgggattaattggttgtaataaatataaatagaggagagttcttgtataggaccattaaaaataaccctaatattaaggtttttttgtccaattaagttttgtcacttggcaaaaatatttcacttaaatagtttgagatcgcattatcattagaatgagattttttttttcaaaaaaaaatttaaataaacttaagtagttgttattactgtaataactcttcttcttctttcttcacaaaatcgaaatttttagaaacataaatgaataaaaatttcaacttctgaaaggaacaagttaatgaaattattaggtagtcaaagagagcaattctcttcacaaatctgaagcttataagcccattcaacgccacgttattttttcttcttcacatcaaaagtacaactctctggtgtacgttatcacataacttaaactaccaacaaaaattattatatttcatcgaacattaagctaattaattatagattagcaaataagtccaatttctagttagataattaatgaataagattaattataaaatatatatatatatatatatatatataaatatgacacaagaaatattagacaaaggattaaagcacttcattatctaaatataactacaaaagttcagccaaaaattcaaccaataaacagactaatttttgtttaaaactaataaatttggccaacaaagattttttcatagagatatagaagaactatgattcctttactctagctaattatgatttcacatatacctaattaagaaaaaaaatagcagatgtgtaagaacaaatatatataatttcattttcttaattatatatatcaaacagttcttaatgaatattacttcattatataatttttattttttttagaaatcatcaactcattgtattctattatatcaaactttacaccctaacagcactaaaaaaaaagaatgcctgtattttgctatgcatgcatacgctttacaatttatcaaaccacaatatctgctatatatatagtcatattttttttggtcaaaatagctgatattctaaatttcacatcctatatttcactctataaatcaatgtattgaccaaagtaggcaaacaatattgatttcaatacatgtacttcatttgtatttctccaaattaacatgataaactacatatacctatcgttgaaattaagttggtagttttgtttcgtttgatggctcacaacaaattctgtaaatgagtcccctgttctacgccagccaagccataaagaaatagcttcgaaacaccgtaccttttgctataacaacactcaattaaagaagagatgaacatgaactgctggagattgatgattttcttgaatttcaccaataccatctacttagtgaagtaaggatataatcccacaaattttcttactttgatatacacattacatatgcattcgtttttacccacaatatatcttgtttggcagctacaccgcccatatatatatttgccaaaacccacccgtctgataccactgcaatagctttctaaatcccaatatcctccttctttacgaggcttacataaatcatatgtcatgctacatatcccgacccactaaaaatctgcagtccctttccaaagaaagaatctacatgaattgcatatcaaaaccgatctacgcctaatgacttaatagatatcaaaatgatcaagtttattaaagtgactcgacctgcatggaatagatgtcttgacctctattctaattcgagctgcataggatagaataaacaaaattttcaatgaatcaaaaaaagagaaattacaacatatattatttttttaattattattttttttttcaaatttnnnnnntgagtttctaaagtggtttctctagtagtttatatgtacattgctatacagattttagttattccgttagttgcaataagagtttttatatagaattccgtaaaaattaatataggaaacacaccatatatgtataacaaaagaaaaataaaaattagggttatatatagtcagttaatatatatcctaggctggagactgatgagtactagtctacatatgtaccctaaatacaactcattattatatattactttgtatatatatcatgaatttgaacctcatattcctcaaatccctttggcacatgccaattaagagcttctttgatatatatttacttttgcttcacaatcgtataaaaatttctccttaaaatcattaaaatgaaagtcatttgccgtaattctggtacttactaattaataatataattcataaattagctttgtagcttttaatttgcagaaaaatcaattattgtgtttaaaaaactaaaaattaaagtaataatcccataaatatacaacagaatttttagcagatgaatgaatgtaattattttcgtgaataataattaggttatttttttttgatatattgtataaattagtcattaatgtgtataagtactaaaactgcattatttattcaaaagaaaaactaaaattacattttatatttatgaagatatatatattaatagtatacaccatatcagggtttagtgctaattttctttctctcattccagaaagagagaataaagagaaataccctgcactagttcatattatttatatacccccataattaataaacacctcgtctctataaaccctagctacaaatacagtttcacagcagctagctacacatgataatataatatatatacctatatataaatatatatattgagtacgtgtgaaagaaccatatgcagtagtcccattaattgttaatgttttatgccgctggggctactgtgacacagtcgtcatcgtcgtcgtcgtcatcgtcgccctcattctccaccagcttattattgtaggaggagaagattacaacttggttgttgtgctccttggtaataacacggagcattgaaagccccatcataggcttctcccaattattaacaatcattaatgccattattattatatattagggcaagaaaataaataagataataatatattatatttgataggaaatatttaagtattaactggccaagaaaccaataatatattaattgttttagtgtctcagctgaagatgaattaattggtagtcatgtttggcttcttatttatagcaatataaaagttgaatattcttttgaggagatattattattattaaagaattggtaaaaggtattttttcagtgtcatattcatattggtttaattaagtatcagattttatataatttaagaaaataatttttaagaaatatcactaaccaatcattacgagttatctacagaaagtatcgagcaccaccgctgataaatgtaagataatgagtgagtgagagagccacgttagcagaggagtactaggctactagctagcagaggtggggcccgcagtacatgaggtaagctcatggaaagaggctgtgttacacgatctaacgcatggacacaacactctacctcatgcattgcatgcaacaacaataacattattttaccctaggccaactcacactcacacacataagtctatatcttggaatatatatatatatatatatatttgagaaatatcctacattaatttatatattatacttgagaaaacaacgttatactcatggtatatatacattagctcactagtctctgcatcaataataatatgaaatttgtatagaaagaaatagatcagctgagtgtgtatggtaagaatcttgagattctatctcggtaatgacttgaatgaaagtgaagtaattactcatcttcttataactaattcctcaaatagtttttacgtggggatactatatacaaataacaatgcccagttgactaagaattgagaatattaaataaatgtaaagtcttactatagttaaggcacgttacgatattttttaaattattgcgttaatctttgctaatcaaaaagttttagtataaaaaatatatttaataaaatttttgtaataattaatactataaaaaagtactgctacttttagtaacaacattttagtcacaatataattttttggtgacaaaatgtaacttttaatcacaacaa

SEQ ID NO: 36705 - DNA, 6353 bp, Cannabis sativa
tgtttcaaaaaaattgattcacatatctatatttttataaagaaatgtgaaaaagcacacaatttaatatgttatattgttattggtattaaaagtgtttatctaattaaatttgtattattttactcataatgattctaattttcgttaagtgcaaatttcatattgtaaattctgttcaattcccataataacttaaaataatccgcaaaaatataaatttgatcggttattttgagtttgttattttttaatattaaattatttaatatttattaaaaaatcgcataactaataataaaataaatagattattgttgtcttatgtctccaacaacaaattaaaataaataaacaaaaaataacaaattcaaataaaaaataaaaaaattatatgtataaggaaatatttaattttgttttagattatgtgttctttataaataagaatgatatatacattaatttattaagttttgaaactagggttattcatataatcagcaattcgtggttccgaacctcatctaatccagaccaaaccatgtgaaaccggaccaaatgaattcggtgtcaataatttggtcaaatcaggaccatttataattctctggttcggtcatagttttaaaattctcgctcgtgatttaaaccaaaccaaaccgcctaattcttgataaatatttaatgtaattttcttattgaatattgatataaaagaacagtcttaggcataatactgataatcacattaacattgtgttaaatatatttatttttattgttatttgcgtattataagctttaaagtaaaataatttaataaaaaaatattaaaacatttacaaattacaaactacgatttcgaaccaaactaatccattcttaagtgggttggtttagtttggtttgagcatttaattgatcgggttcggttttgaattttaaaaatccaacattactagtttggttcgaaaaaaaataaaaatcaggaccaaatcaaactatgaatacccttgaaacatatttgtatcatatgtattagatttttaacgtacagttaaaacattaattatatattttttaaaatatataaatatgtgtagatcagttacttttacatgtcaatcaacattcgattggcgcaagtgcagattttaggttttccaatccaatctgcacaagtgcggatatctacactttgtagattcgatgtcttatctcaaaaatcaccatggtaacgtaatgtgacacgtgtcaagtatcgaaggtactagacgaatgtaagacaaccgtgcccaaaagacgttgggcgaagtatatgccgaatggagccatctagcatcagacatatgcttgagggggcatgctagccaacattctgaacaactaagaaggcacttctcagaaaaatatccgaccaacaacctcgcaaaggaaatgttcagattcatgatcccaactacctaatccctgcggaataggccaatcaaaatgcttaaaaaagtgggattgctagaaatcaaggggaattaaatgtaaatattctacatcttattccctagaaatagtggatcaaattcactattcagagaatgattttggcattatcaagaaagctatatactaccaaattgtttataactttcagagatagtaagaatttacttgaccaggttcatgtgatcttgttattttccagataaatacaacaaaaaagaaagtaggtcattaatgattcagggatcaaacctctaaaaatcttgtgtcatttatagttctttattgttatcattattcaaacacttgcattatcatttatttactctgcgttgttgactagaaacaaggtcaatattttggtactttcattgagagcaaaatccttcattgctctctacacaagatctgtgttttaattatcttcgattcatcttcgtctcaagaacaatggttcaaacaaggagggttgcatccactgaactgtgtgaccctatggctaccgattcgaatgtccaaatacctactgacattggaactgacaacgcccatgctcgcctgccacctcataataacaccttagtgggaaccagagctagagaccccatttctataggtgtcaggagtacggaaggcattactattgaaattcctagagttgcccctaggatataggaagtcaaaaacaccagcatatggtacaatggagagactggagctagaacaggctagccatctgagggagaacctcgcataaacttgggagacaactctaagatagaaaatctcagtgaagttttggggaaagtccaaaaccacaccaacaccctccaccacagctaggaggagacccacgcgatggtgaactaagtgttcaactagcaacgacgagagtttcaagaatggatggattgtaatgcccggaaaatgcgagcctagcaagaagaaattaatcgtaaagccaaggaagttgtcaaccttatccaatagttttctcaatatactaggggcaaagaaccaaagttcaactacccagacgggatgacaatagaggaaagggattgtatataccaagtagtgggctcatgcacagactagaggagagtttgaccaataacgggaaactgcacaaaagagacggacccaccaactcgaggccctaggaacagaatcttgatcatcttgttaatgaacaagtactgcctggtcaatgagactaccaagataacttctgccctaggtcgaaaggaaggagagaagatgcacctcctagctgggcatgagggtcttgccgacatgtcacccagtaccaactagacaaaagagtctaggtgtacgaacaaaatatacataatgatcaacaaccccatcaaggtcggacagggtatcaaagggaagggaatggtcagttgtattccaatagatctaacaatgaggccaagagttggcccggtgatgataaccgttagggaaggtgtgataaccaccatgaaaacccgcccaataatggaaacggtggccaagctaatcaaaaggataactataatgataattttggctaaacttttgagtttggcacgatcaacccctagtactgaattttttggggtaaaactctcttcttctccttctcctccccctccccctcctcctccttcttcttctatgttagaattgattaaatacttaatgttgatacataaatattagtaaagtttgatctatgagatatgtatagcctacacccaaaaaatttaaggggggttgatcgttcaaaactcaaaagtttaaggagtttggtcgtaaattagcctaaccaaaataatgcatgcaacgacaggaatcctccaaggccaaaaaggtcaactagccaaaatctgggcagaagaccaaaagtagattcagtttttcaaagaatggaacccaggcccagaaatggccgtcgtaatgattacaatcgaaagtgggagaatcggcacaaaaatttgtcccaccacaaaataaccaaccaattgatcaagataatttttttcccgaacaatagaagcaattttaagcctgtagtagttccagccaatcagccagtgacacaggccggtcaacaggaagcaaaagttgattaggggtgcaagcccagctagatcaacttaacagcttgatacaaaacctgaccagtccaaaactcatcgatagagacctcaaccagacttaaggctcgctattctacccacgggtcaatgccctagaactcccaagcaagttcaaaatgttgacttggaaaatatacatcgacccactatctcatatcaaatactttgagatatagacagacttgcagtgggtgaagggagacatcagatgtagaatctttccagtagcgttagtagaggtcgcccaacaatggtactttaagctaactcctagaaattttgactattggaatgctttgcttctaaattatacacccaattctcttcctccagaaaactcccaacacaccttgaagatctagatgaaacaagtacttggagagccgttaaaagactatatcaattgattcatgataaaagcaactaaggtcaagggactaattgaagaaggtcggctggctgcggtcctatgaggaattgaacctaaaggtgagctttggaaggacataacaaggctttctgtggggggctcaatgggtgagttcttggatcgggtagaaaaatttataaagcttgaagaagcagtcaaaggggtagacaatgttggctagagcaaggctgacccaatttaaatcccatctgcctgcagcccagccgcatctgtcctgaatgaccaaaccttctagcacagggaagtagtatcaataatctcaataataatagtggataatggtctagcaatgagaataactcagggaatggaaagaaaggaaagttcaataccaccgattagtaaaacccttaagagaaagttcctcattttaatgctttcactattctcactgacacatggcgatagtgggtcgctcgtcatttgaagactcattgttcggctcttcctccaccaccgttttgccttttctcttaacaacaggcgaaggagatcagaccacctcaaccacaggttgatcaatccttgtagctaatcagattgggtgggcaagaggtgcaactttctttggggtagatttttctttattttccacagcctgagcagtaaaggactttcccttagcctctttggacttctttttactcgtaatggaaggataaagttcgtatttgtggaaattttcctccatggccaacttggggatgtcccttgcctcctcggaaagcctgaatatctagtgggttctacttcttaacttcaaggtgagtactgggtagaggaacgacatgaaagtttgaaaagaatggtaatttgctttagcatccttcactataaagtagtcccgagcataaccttcaatcattgttatattcttgtgtcgataagccatctaaagttcacgagggagaagtaaaagtacctcgagttatgattgcaagagttagatttgagatcaaagtaccaattgatatcatgagcagaaggctccccaaccttgttgggcgtacgatacatacaacacaaaaaagtaccttaaccccttcaggcttatatgcattgggcatatattgtaatagttggccaccctttggaaataagggtggagtggaagaatggcaccctgtttggcatggggtccaaaaccatgcgcagaggcccatccaaggaaggtacgccaattgcccttcaagcggaagaaagattactgcttgcttgaataaactagtagcatggagattgttcaacttttttactgacagcctggatggtggggattgctataggggctagggcctgttagatttcttgggaacaggcatagcctcagagagttcctcctcactatagtccacaccagcttcaagttgtcatctagaaggcgatagaggttctaaggtagtattatagcccccatcgctattaggagcccgacctcttccattttttctttaacttcctcgtcgaaatcttcttgtacttctggttcattttgtgcttgggctaccatcaactgcccaatataaggatccgaagccaaaattgcttgggtggtttgtgttgtccgggccagcttttacctggtaggaggagtaggtctggacatatgtttaacgactaactctgtcgggacagactatctattgagggaactggagcgcccagcaggaaaggtatgctagacatcagaccagacaatataagtccatgtggctagtaggaattgcctccaaactttgttcaactcccaaatataccgatcataactatctcacccaacgtggttgatgtagtaatgatgttgggaattagactccaagagtcactcgaaaatcctcccttagaggatttagaagaaagcgaaggctcgtttgtagacaaggatgagctttttgcacaaatcttcgagtggccctcaaaaagtaatccaagcaggttgtcggctattcaatgatcaactccttagaattcagctaggttcattacaaaagaatgaggataaaagatgaggcaccgaacaatttagaaaatgctttttaagaataaaatcaccaacacttcgactagggagaaaattggattcaacccaaaagattcatctttttttgatggaattttctgagaaaaaggtttataaggttatgaaaacctaatttcctaaggtacctcgaataaggataaaatgatcaaaaaatgaaatatgtggaaagcccaagctaagtcgacctttaacagatgacataatttatatt

SEQ ID NO: 36706 - DNA, 5953 bp, Cannabis sativa
ctcattgtttaatttttattatgtattaaataaatttattagagataatgacgattgattataagtatacgatgatgacaataactttaaataatcaggacataaaaataatattaattacaaaaaagagaattgttcacttaaataatttttaacaaataataataataatctaatttttctctatatcactcaatttatctatttttatattaataaaataatttaaaattctatatattatttattaatagtataaaaattaaacttcttaataaataaataataaaaaatttacaattctcctattaaaagaatttaatttttcaataaataaaattattaatttaaatattttattatttattacatttgataaacaattattttttttataaaataatcccaaatatgaatgagtgtacaaacaaacccgataccaactcggaaaagatccgaatggagttcgggaaacgaagttggcgatttcctgatttgcgtcgacggctatttccctaacggctagtttccctttattacaactgtactacacccgactcttcactcctcatctcactgcacagcagagtcagagagacaaaaaacctcttttttccctctccaccaaggaacccactcaccgttgacctctccactcaccggcggcggcgcagttgcatcgtcctctgagagtatgtatgtcgttttagtattattttttccttttcttcctttctatgtctacctcttcgtgtcttgtgtatgaatttttgttattgctcggtattagttctcatagggcttgattttcttccttgacgttgggtttatcatacaatacaagtttagaataagtttgttttggcttcgtgtttctgggaaaaacaagggtttctattacaaatcactttgctctaattagactaatttacaagatgataaacaagcaagttaaaatatatatatatattttttgcttttttggtgtaattgcttgcaacgtgtttgatataatgtctctttcaagattatgcatttttcattagttttatcgtgtaaagttgacaactttgtaattagttttgttggtttagatcatttaaacaattttactgataaggaagaccaatttatttatattgaaaccttcttctagtatttactattaggttagaccttgtggatttcaaatgagcaggtgcacgatatattagtaattttcattctcaagagctggcatcaattgtttattttgatcctttctttcttacttactatatttacactctctcgataactcttggacttaggtttctaaatttgaaatgggaaagttattagtgacataaatttaatgtgtaaaatttgctgaaagtgcttaaaaacaagtagaggcagtaataaactatatcatctctcacactaagtttcttttacttttcttgtaagttttgatggaaaaataggttaaatatgttactctttatttagctaaacaggactgttgtgattaacttatactggatgaatatttgtgaagatttctttttttatttgaaggagcggagaaataaatttattaaaaataaaaattgcagttgctaacttaggcaattcaaattaacacacacatatacattccaaccatattactgactacctttggtatttaggtatattcctatcataaagacaataattacatatcaattataagctatattgattaagtttaagctaaatttaatttggaagctccatataaattactagattaaattccaggtgaaaataattatgtgtaccattttgacattgattcttacctattttttcatttgaggctagttttgatttctggaactggtagtttattagaatggccttcataatatttgttttaaaaatagagtcagtgtttttttttttttatatgtatatatatatgttggactaattttctggctgaataaatatgcagattggtgctcattgagttctgtaactaacattcagtatgatgctcgtacaacccaagaggctgaagatcaaattttcaaaggggggtataaatactgatcctcctgggatatcatgtggtgatgggattaatgactacatgaggtcaaatactagtgttgctgttggtaataaacgagtttcaacatggatggttgggtgtccaaaagaaaagaaacagaagacagaaaccagtgcattggcgatgtgttcttctattttggaagatttgatgtctcatgaatttggttggattttcaaccaaccagttgatcctgttgcactaaacattcttgattaccttacgatcattactaaacccatggacttgggaacaataaaatctaagctggacaagaatgattattacggcgttccagagtttgcggctgacgttagattaactttttccaatgccatgcactacaatcctcctatgaatgatgttcatgcaatggcaaagacgttgagctgtatttttgagaaaaaatataaagttttgcagaataggtttggatcagacactttattaaaagataccatgcaaaagtgtgacgcaacagctcttttggttaatagatcagcccccaagaggtcactccctttgaaaggaaaggttgtcagatgttcttccgaggcaagagctgctgatatagtaagtagtagctttttgattatgttttttcatatattgacttggtaataggtatagaaacgtttaggattattatgaatttccttaatggtttagcaaataatacgtcatataacattcacatagataacatgcttttttttttttcttgcaagaaagtattcatgtttattgtttgtttgactcgtttaccatttgtttataggttgaacactctaaaacgaatacctattctatgcaaaagttggggaagaacttcattgaaggtatgaagcggtggtgttcaatctgttttataactctatacagatgctaaattggcaattcgtcttgtaggtactgacaatagcagcagacgaccatgtgtctctatcaatgcaaaaaaaccatctagtgtaactctcaagcagtgcagctcacgtagtggtcagtggatttttatccttttctattgtggctgttatgctgttaactaactcatggatgtaactatcaaacaattgatctgtggactgacaatttgtcttgtaggtactgagagtagcagtagacgaacgactgtctctgccaatgcaaaaaagccatctagtgtaactgtcaagcaatgcagctcaggtagttgtagtggtcagtggattcttatcctttttctgttgtggctgttatgttgttaactaactcgtggatgtcactatcaaataactgatctgtggactctccctgtcttggcttagaaatttcttcagatagatcactgggaaaaaatcatccttgcagtgcaacctctagaattgtaaggatctattatctcaatcacctgagtgttcaatgtaagtttttacggtgtaggatagttgatcattctatgtaaatttaggatcgtcgacctaggcctgatccagaatctgagagagacaatataagttcatctagagaaggttagccttcttcctctgtttttaatttcaccatttgttcttttaatgtctttctgaaatgttaatgcttgtgaaaattctcatttgtggtgattaatctgtgttgttttagaatctactccaactgtaaaattatcattgcaagaagcacttcgtgctgccaaagctgtcgctgcaaaattaaaatcccactatgcagagactactttgaaggttgaagataaacgctgtattgacccttttaaagctattcaggtaatatattttctaatataatttggaaaatttgtagaggtttaatctcgaatatatcatctgattttttccttatattcccattttctaactagggtaataaaataaccaatcttgagaaaaagcccaacaagaaatcgggacagaggcagcctgagattgaaggtaattttagtactgaagcttgttttagaatattcctgtacaacatttgtttgtgacctttgttatacgtttctgccattattggtatcaaaccatattcatctaagtgtttcctatatttaattttatgcaactaacttcttttctattaagcattcaattttttcggtcattgaggagtgaatattataaggttagagacaatttagttaaaaaaataaattgaggaatttctttgacatagatgagatgagtgtttaatttgtgattgattgtagtgagtttcaaagtagcaaatgaatttggagttgtctttgaaacatggtggctattctttttatgtctatcttgataaaataatgtgatactaaaatcttaactttgcagaggaggtgatgactgaggttgtctcaagaacaaagacagaattggggttaaaacatcagagggaaagagaaagagaagccgctcgagttgcactcgataaggtttgataaaagctgtgtttatttttggtgtcttgatataaatgatcatttgagctctctgagaaactaacagtggctcatgttcatcacccaggttgttgaggaagctgatattgatcaaaccctcgagtattttgaagcactcgaacggctgtgcaggtacaagccatcatgtcggtttactagaagaggaaaccactgctacattgaatcttccgggttgagtttatctcgctcaccattggagaagttgggtttgttcttgaaagaagagtacatggatggtgaggaggatgactaggagtgtatatacacaagaacatatatgtgatatgagttattcttggaaaatgatattttcaataatgttttgcccgaattcttacatgtatataattataggaaaactattaagtgagagcatcactcttgccctcaaattttttacatgatattgtatattgaagcatagtaatatgatatattactttttcttttctttcttcttctaaaatcttaacaaatgaagtctgcctatcaaatactgaaaaaagaaaaataatataaatgagagatataagagattctaaaatctctctaaatagcactatttattctattcttaattctcttattttttttaaaatttttttattaggtttatatataacaattgattaattaattaaaaaatatttagtgtcctatatatcctctgattttctattattttttactaaaaattaaaatatttttttcccatttagccatataacttaactaaaaaattttttttttttttttattcaaaactaaaaaaaatatcaatcaccctattcaaattttttcttattttttccatttatcatcaatattaatttttttaagaaaatctctaataactaaactttcaaatcattacctctttcagaaaagaaaaacctccaaatcattatatatatcacacatatgcttctctcagctcttcttttactttgatttgttttttctctattgtgttttaatttttgaaaaataatagcaatctagatatatattatttattatcaatcccaatttataaaaaatttactttggtagcatttgcatttggtaacatttttttaatcaattttttatttttaaaattagaaaaataaaaatatttttcaaaaatatgttctataaaactgttttaactttttaatcttttaattgagaatcaattttttttttttaaaaaaataacttttaatattttttttaaatagttttttttcttaatcaatattttagattccgaccagacctgaattcaaatcatctccgtggccctggcgttgaacccggtctcttacccgaacctgaatccacccccggacctagacccgacttaaataaaaataaaaaataaaaataaaaatgaactttac

SEQ ID NO: 36707 - DNA, 2798 bp, Cannabis sativa
atgttctcatttgtcaaatatttgatcttcaacaatttcttaaaataccaactcatatctaatttcatggggaaggaccacacatcttgctcctttaggtaaatggagttgatccatttcacctaaaggttatcttatttgtttgaaacaacccacaaatgtttagttatcatagtaatatttcatattttaccctctcgaaacccaatgcctccaaactgtttagcaagataactttttcctagaaaggtagatgaagtttgctcatattaccattcaatatccccataagaaatctctacatctcttatctatggtagcaataatcttttgaggtaaaatgaaaaggctcatccaaaaattttgaatactaagtaaaactgagtggattaattggaaacgactagcaaaagaaaggtttctactagcccatccactaagtttgaaattgagcttatctagaattataccacagtccaaggccttgcattaagtgggtcttagataaactcccaaatacctgagagaaaaagacccctcgtccatttgggcaatctccaagatcttactcgtactctcctctttaaccacccaaaaaagatatgagatttctttttattggcagcaagacctatcgcattataaacccttgaaaagtttcaaaaattaattttgcaaagttcacattccccttgcaaaaaattatgagatcattgacaaagcaaagacttgttaatctcaaattcttacaaagagatgcaatccaaatctttttttgttctaatattgagccaacaatttagaaagatattccattataaaaacaaacaaaagaggagatagagggtcacctaggtaaagacattttttccctttaaaagagccttgtaatctaccactaagtaacaaaaaatattttgtacctctcaagcagacaagatccattgaataatcttgagggaaagcaaagactgttaaggaggtcttccacaaactgcatgtctacaatatcataggccttgctcaggtctattgttattatacaacgagcagacatattcttccttgtatagcctttaagaagatcttgaaaaattagaatattgtgggctaagagcctgtttttaacaaaagccccttgattgttactcacaagcttaggaaggacttctaccaatctattacagatcatcttagaaatacacttatacaaagtattgcaacaagaaattggatgaaaatcactagcatccttaggatcttgaacctttagaataagagtgataaccgaatttttcaaggaaactagcatggatccctcctcaatgaaagtaagaatagccatagaaacatcgtccccaatttcattccaaaggcatttaaagaattcgaaaccaaaaccatccaaactcggatttttcaaagagtttatcccaaacatagccttcttaacatctttcctagtaaaaggtctaatgagcctaacttgttgctcaagattaagacacttcccttgtttaagacaatgaacatcaattctctgagtagttgtgcttttcttccccataaagcttctgaaagggttaaaatgctccaccactttagaataatcattagcaattacattattcaacacaaaacttgtgattatattttccaactttcttttcttcatgaaagaatgaaaatatctggtattgtcctcaccacattgcaaccatgttactttgctttgttgtttaagaaacaagaataactcttcaatgcacaaacatattccagattctttagtttctcattctactacaatgtgaaattattaggatcacaagccaggttctcttgagctgtaataaaggcttctttactctgcttgaatttcaacatagcatcaccaatatcctccttgttaaatctcttcaaaacatgtttgactctcatcagattcttcactatatcattaatactgatagaattcaaaggcctgttccagtagctcaaaccccgatccttgaaaccaatgtgaaaggaccaatggttacaatatctaaaaggtttaaaaccaacattaccaatcttgttacttttgacatcacaatagctatggtctgagatgcaatcccatttgaaacacggttcagtatttgggtaaaaatctagccggttttcattcaaaagaactctatccaacttcaaatgaattatagtccccatatcatgcttgttagaccaaactgttgacctcatatttggccaatccatagcggagtcatattcaatgctaattcttaccacgtgttacacaaaagaacaagaaagtaaaagaacacgagattttatagatgttcacccccttagttaatgggtaatgacctactccccttttagttgtattgatatcgtaatactattcagatcgctataggtgggatctgaagtggcctcttaaggttacaatgtaggaatgagagatggaaaatctcaacttaagagagaagtaatggtgggcgtgtgagtaagagacttagagcttagggttcgccacttatgattttagatttagaactcagcttagcttcacttagggttttagggtttagttaaggctctttatataggagagcttaaatcctttaatttgataaaataagtagatatttacatatgaaattagtaaaatactaatgactaaaatgtcccttaaaaataaatattttccctctaatttcatgggttgttaaggcccaatttgtagtctagcttgctgaccatggatgaagttgtacaccaaagtcatg

SEQ ID NO: 36708 - DNA, 4507 bp, Cannabis sativa
attgaaaatagtgttgatctttgaagagtctagttggagttgaggatatttgatttttgtagaaaatccaacattaattctagctctttttgatgttttatagttaatttcttattttaggtgaaaaagttagaagtgggctgcttagatcaggggctttgaggaggaaataccattgaaaaagattctaccttttctcttttttagtgaaaaaagaggaattgaataagatatggttggggatggtgatggtgtgattcataatgagtactcaaatggattggtacataattcgaatggtttaattgaagacaagatcgatgagattcgtcggcttttggggaaagctgaaggtgatcctttgaagatagttggtgttggtgctggtgcttggggtagtgtgtttattgccatgttgcaggattgttatggtcacttaagagacaaggttttgataagaatttggagaagaccgggaagagcaatcgataaagccacagctgaacatttattcgaaataatcaactcgagagaagatgtgttgaggagactaatcagacgctgtgcttatttgaagtatgtcgaggcaagattaggtgatcgaacgctctatgctgatgagatattgaaagacggattttgtgtaaatatgattgatactcctctttgccccttgaaggttgttactaacttgcaggaagctgtgtgggatgctgatattttggtaaatggattgccctcgacagaaactcgtgaagtgtttgaagagattagcaagtattggaaagagagaatagcaatgccggttattatttctctgtctaaaggtgtagaggctgaacttgagattgagccacggattattactcctacacaaatgatcaatcgagctagtaagaacacatccacatttgtttgaattgattataacttagttatatgtctaaacagttgtttttgtttatattttcgatttctttaaagttcttatgatgttgtgctttgaagctggagttccaattgagaacattctctatcttggaggtcctaatattgcctcagaaatatacaacaaggagtatgctaatgctcgaatatgtggaggcgaaaaatggagaaaaccattggctacatttttgagacaaccccattttatagtgtgggacaatggtgatctagttactcatgaagtgatgggcggtttgaaaaatgtctatgcaatcggagctggtaagctttcgtttaaaaagctttcatttttcagtaagagcatcgaattcttgtgtgcttctcagtttttatatcttttcaaattaattgaaacttttcagagtcgggttttgtttgtctaatttttacatgtttataatctcattggtaaattgatcaacttgatctgttctttgagttatgtcccatgatagcaatctacccgatttcagttatcttttccaatttatctttttttgtgcaggaatggtagctgctttaacaaaagaaagtgcaacgagcaaatcggtgtattttgcacattgcacatccgaaatgatattcatcactcatcttttggcagaagagccagagaaacttgcagggcctttgctcgccgatacatacgtgacattgttgaaaggtcgtaatgcatggtacggacaaaagttagccaaaaaagagttgagcctcgaaatgggtgatagcatcaagggaaagggtatgattcaggtacataacagaatcttcaaaccaaactgatttttatggaatgatattcgaattgttataactaaactgagcctgtcaaactcaaattgcttgcagggtgtctctgctgtgaaagcatttttcgagttgttaagccattcatcgttgagtgtgttacaccccgaagaaaacaagcatgttgctccggttgagctctgtcctatactgaaaatgctctataaaatccttatcaaaaggtacttatttactactaacttagctaggtatggttgatgcattttgtttctttttcaagggtgaaactcttatactttggttctttcgtatttagggagtattcatcacaagctattcttcaaacactaagagacgaaacgatgaacgacccgagagatcgtatccagattgctcaaactcatgtgttctacaggccatcacttcttggtcaccaaccttgatatgttatattatcagtttcacctcaaaatcacagaacagttatatatttttgttcattagattcaagattttgatataattatgtaggtgttacttctagcttagctagtttgtgaagagtattatgaatgatatcctcattggtttgattggattacataaactaaaaattattcattcaatccatgttttaaaaatttaaatttagattatttgtgtgtttgataacacttttccaatttatcttttttgggattgaattgctctattttgaaatgtttttgagtctatttatagtttagatgaggggtattttagtacttttggaatgatttctcgctttttctagattttccaacaaagtttctagttgcgttaagagtatttccatgtggattctggttgcttcttcggatttacgctattgaatatttacaaaaattatatatggtctaaaataagcaccgagaacttgatctggaaagctatctaatgtgttgctacagcatggctttcagtactccaaggctgatccatccatgttcataagagtcacttaacagctgcatctacattctagtttatgtagatgacttcttggtaatgggcagtaataatactcttgtaaatcagattattacagagttgagtacaacattttcgttaaaagatcttggtcttgttgactactttttaaggattcaagtcacacacgcgtttgaaggaatatttctttctcaaactaagtatcttcaagaactgctttgcaaagaagacatgcaaaaatgttaatactcagaataacactaatgaacagtagtttgaagctttccatctatggcagtgaccctgtcaagggtgtcactctttataggtctattgttggagctttacaatatgccactgtgacacaacctgaacttacattctgtgtcaacaaagtatgtcaatacatgcaacatttaccatttttacattggacaacagtcaaaaggatactaagatatattgcagggacattagactatggcctcatgctaaaaccagccactgatttctcccttgatgtgttttgtgatgttgactaggcctccgatcctaataataggagctccacgacaaggtattgcatctattttggtggcaatctagtgacgtggaagtctaaaaaacaagctacaatcaacaaatcatagactgaagcagagtttcgaagcttggtccgtgttgttactgaagtaacatggcttcaatctcttcttcgtgagctccatgtttcatccacatcagtaccctctatacggtgtgacaaccaaagtacagtacttctagctgtcaaccccaccctccatgctcgcactaaacacatcgaaattgacctatattttgttcgagacaaagtgctgtaaaatctgatacaagtcaagatgtccctgttcatgctcagattgctgattgtcttacaaaatccatctccaacttgagatttgttgaagttcgtaccaagttgtgtgttgtttttaaatccacactcggtttgaagggattgtcaaggatgagtctaatgttcattagttagttttcagtttgtaactaactcaactactttaccatttgtaaagttagttagagcttgattagctcattgtatataatgttctgtaacaactctctcattgcaatatactaggctctctctctctctagattgaatccttacagctcccaaaggtgacaaagtggatgatttcattaaacttgaattgaattataattattggactaatataatcatgtttactttcaaatgttgttttcatgcatggttatttgtcgttttagaaaaatattgttattttttacttttagatgtcaattttcatggcgtttcagcaaaatattattattttttatagtatataatgtcattttcatggcatttcagcaaaatattgtcattttcttgatctattgtcgttttattgttgtctcaacaaaatattgtcgtttctatgagttattgtcgtattcatgtcgttcgaacaaaaaattatcgttttcatgttgtttgaacaaaatattgtcgttttcacgatcggttgtcttcaccaaatagtgtcgttttcatgtcgtctcgtcaaaatattgtcgttcagtgaaatgatgtcgtttttatgagctaatgtcgtttcagaaaaacattgtcgtttttttgatctgatgtcgttttatgaaaaattattattttaccgaaataatgtcgtttgcatgagctgttgtcgttttcttaatccgatgtcactttatgaaaatattgtcgttttac

SEQ ID NO: 36709 - DNA, 5250 bp, Cannabis sativa
tacaccattgtataaaaagaattggtttataatttctctcttaactttagaattttcctctatatgtatgtcacatcatatcatgctcaacttgtagtgtatattgtgtcatgaaaatagagtttgttagctgttttccttgcatttctgtttgtggagatcaaggttgtctcaaagaagcttttttttatcttcaattttctgttctttatatatgattgatcaaatatttgagggctatcctattattttcagtggatggtgttgatttggatgtgaattttttaggtgtaatgggtgaatttcttggttacagttggaacaatgtggattgcgtactcctcagtgtaccatattaggtagcattgacaaaccagacgacgaaaagactatgaaggtactccattttttatccctgtttgaggtgtttttttttttttttgggacaactcttctaaatttctgaactttaaacaaagtggttgtgtaaattgttctagttttcgaatattttcttgcgtatggatatgtgttacgccttcatattagtctaggtagtataattgattaggattttcgaggctgagttgtcaagtccttagtggctgatatgattgtttagtgtgcttaattcgaaattctcattcttagatttaagtagagaatagagaactttggtgtaattttttcttatatttcggggcaaatgagtattttatatacttgtgagctgttttcgatactgtatgttttagtatttttatgctaaaacttatgtaaccacggttttcttccgctacaagtaagggttttcaatacataacgggtgaggggtcagtttaagacaagtagccactttctttctttctttagaaaaataatcttagattgctattggttggatagcttggagtctttgctagccgagcctataaatcctaagatagggtcttatgaggggtatcgaattttgtgtgagttatttagagtaaaatattgcttggagagtttacagagtttctcgaataacttgggattttgtatctgtgtttcttactcttatcaataaactagcttttcatggttcttaaattcatagttcttgaactttcaagaactgaattgtccacctaaaaagaaagggggttatatttggatttttaataccccaagccttaacacaaatggaatagatattattattgagagtgttgtttgacctttgacttttatgtaacttgattatgtaagattggttttgttttaaagaagaatatttgtgttccttctaaccacaatgcccaagcttataaacttatgtttgtgtattagttctcttatttgatgctcaatacattattttacagaaatttaactcgatttggaagaagaggtatggcgaagaagttgatgaaagtcttctatacgttgtctcggtggaacgggtacttcaaatggaagacttcaaagaggtaatattaggtgctttatattttgtatttgaagttgctatgccactttgattagtctcaaattcaatcattttaaattgattctcttataatttagaatgcaagtcaatatgagaatcaatcacatttctcttcatgatttaataacagaacatttgatagaggtatatagctactgaaatatttcgggttgctcccgaaagtagtgctagtgctggtcgatttacttttttgaaagtgactcgaaagcaatctgacatcttagaccatttcttcaggttggcaagtgggtcgattcttcagactatagaagtgctcagcctgatcctcttcgatgctttgctgaaaatctagtgaatgagattaacacgaatcacgtagaagatgtcaatcgattttgcaatgtctatgctgatttgaactttcaggttaccatgaatttcatgttttacatcactttgtcttcactaatttagtctgaattctctcatgatatttcaaattggtttggcaggtttctgaagcaaagcttatatggattgatcggttaggctttgacatgcgtctttggtctcctttgaaaggcatattcgaggttcgaatcccatttcccgcagaagtaacagatgagaagggcgcgaaatccacattcaattgcatgtctcaactagcttgggaggtagaaaagtgtttcagtgccccggattttgagaaggtgaaagaagtgaagcagatatgttagaaggtatagagttaacccttttctgtgtgtgaatctttgatttgtattctttcgctcaccgctttatgttatcgtagttgtataataggcgggtcgattagagctgtaagtcaagtttgaggcatcaatcttatccgttgattaggttcgaaggaagaacatgattaattactaagatttcttgtaattctatgctcaaattttggaacatgctttttcattgttgtctattaccatcaataagaaatgaaggaaaaaaaattatggcttttgctcaatatatgacttttttgtttattatttgtaaggagaattgataaaggttaagataacaagggtaattactacgttacaccatagatggatgcgtctttagccaatttataggtctcaacaacaaaggtgaggctgatatgagaaagaaatgttctcagaaaaactaaaaaaaataaaatcttaatatttgtgaagttgtgaatttttgttccacaaatcaaacatcaacaaaataatgaaaatataacttatttacattaattatttagatgatgttgtcaaagacttttgaacacatctaaccttttcatcccaatagagaatcatggtactagaaatgagaattcattagaacttttgatagggagctcttcttatttagtatagtaatgccaacatagaattgagcttttatttaatgggaatacatgacacaattcaaatatggctagttattctgataatagcttatcatatgatgattttctctgttcttactcttgagaatcctcaagctcccatgatccgtcgtcgttttggaccatggacttgttcttctcaatccaccaacttgtaattttgagatactcatccttaacaaagtctcctcctttgttcatgaggccaaggtcgcgatcaatttgcaaattgaaccctccgaaaacaccctgtgttcctgcaactccatgcaaatggagctccaaattatgaaccggtagccactttctagtggcaaccaaatgaaggaatggcttaatgtatggtgatttgagaaccatgaggagcaacaactgtcccacgtcgacatagccttggaaaataaaagggtattgggggacaatgtcaagaaattcatttactcggaggatgtgaaagttcccgctggtgttgagatcagaatagacgctaccaaacccgcgatctccaacacgagggctggcaaagacaaaggcagtgatcggaactggagccttgtttggttgggtagaaaatatgtttaccttgttgtaagccatgtcaactgcattgagtgttgcgagtgcagctcccatgctgtggccagtcactgttatacttagttcctcctcttggtatttcgccattagtctcttaacctctgagaaaacctgttcaaatttgatgtgaaataccattaacattcacaatatgtagtgtcaaacactaatatgttactcatcgtaattacctgatcgcgagcactggttcgattaaacttggaagtattagtcgccgtgtagatagagtaccaccctttatgcactttaggattgttagttgcaccaagtatgtccttcccagacaccaaatcaaacttaaaatcagcagtccaatcctctgacaccatgctacccctccaaaccacaatgatgtctcgccttcccaaagcaaccttaccctcatccgtagcaacagcaatgtagccaatgcagttagaggtctcagtctcagatagcggtgataatgattttttaaaaatcttatcagacccaccattgtcgagatctccataagcagcatagaaaaaagtagtgacctcatatttgtaagggttaccttcagtgatagattaagaatttttatttaacagaaactttgaatataaaaaatatgtacactaattgacatcaagtgtaactctttttagtaattctatacatttttcgaaacataattatatttaaaatgtagtatctttttctctagagtacattaattgtggaattaggcttacctttgtctaaccctacatgagagaagaagccctcagtagggtatcgagataggccacagttcttggatttggtctcagcgatgaaggcgtcagctattgcttgcgccctctcgccatagtgaatcacgtattggcgaaggtctagatcgagtggttcgagtagaccttcccactcattctcaccgctcaaaactttccatctttttgcaatattgttgttcttagccattttcatgcacgtacacatatggaatgatattctatactatatatatacatataagtatattaattagagatattacatatttgcatggtagatatagcttaattttcaaaacgttagaaacatgtatagtggatttgtgggaacgatattgaaagtgttatcataccaatgtctttgtgtgcaatttgagaatatattacatttttttttacaaagtgcaataataatgcatgtctttttaggggaccaattcccattcacattgctattaggtattagtggtggtgttgaacaccatttaaaagtaacgtcttgcaattgattagtaatacactatacaagttactacatttaagtcagggtcggccattggtatagacgggctaggcctgtgcctagggcccacctagctcaggggctcaaaacaaatttgtcatttttaaaattacatatatttttttttacgaattttaaaaaatactacatttttttttaataagggttcaaaaatatttttttcccctatgacccactaaattttaagaccaaccctaatttaaatatataaaattcgatacttaattgcaccaatactaatattatactttagaaaatactaaatattactgatgtcttttaacatttttattcctttttatatcttaagtaattttttttaacataataggaattattaaaagagaacaactccatccaaaatcctaaaaagataaagtaaataccatttaaaattctttattttacaaaatttatcaat

SEQ ID NO: 36710 - DNA, 4064 bp, Cannabis sativa
ctatgagttgtcttgtacaatggaggtcagtccaaaatagaggttcagatgcttctttttcaattttttaagttggtgatggagctgaatttcaagttaagccacaggaacatacaattaaggtaactgttgatactgtcatttttcgtgatcgagctgcatttggttatggcatagtccttcgagactctcaaggggaattagtgatggataagttggggagttttgctagtataggcgctatgaatttggctgaagcaattggtataaaggaagtgctaaactggatcaaaactcaattatggcgaaaagagaagttggagtcaaattgcttggtggcagtccaaactattcaaaattcattatctatgtttttttctttttggggttattatagaagagtatggaaaatttcttgcatttttaaacaacattttttttttattaaacgatttgccaatatagttgctcataattttgttacaacatcttgttttttttttttgttcaacaaaagtgatatgtacaattttatttttttatgtttgcttaaaaaaaaaaagaaaaaagaaaaagtataaagagatctatttagcattttaggaatatgcctcccacattgtaggatataaaaaagtttacaacctcaaccacactattaaacgacatcatttggggaaaacgacactattttgaacaaacgacattgaactacaaaaattgtgtttgagaaagaaaacacttgttgttcccaatactttgtcctatgtatgtgttggttttatgtttaaatattttttatgtatatttttaaagtgttgtacaataactacaaaataatataaaaattatataaaaataacaaaaaaaaataacataaaaataatatataaataacataaatttaacaataaaataaaaaaatacaacatagtaaatattaaaatactgtattttttataaataaattttttaaaattgtaaaaatatttaaaattttatatgactgtatctttttaaaaaatttgttgtttttatgtatttatgaaataatctcttttaattatacacaatatttttaaaatattatgtttttgtaaggttagattgaggcgaaatatactttttcaagtcattttttcaaaaatataatattttgaaaacattaaatattttagcactatttattatttatttatttataagaacaagcaaaacacaaaaacacattaaatatgaatgaagatgcataaaaagacaataatatagtgcaataaaagatataagcatcagacaaagacaatgggaagttggtatagctatgaaatattattattagttacattaaagatggatcacaaaccataatcataacatctcatgtcaattcagtaaaatgttgcaggagaaacacattactggcccaactaaactcagtagctgaatcttgaatgaatatacatattggcttggcttgacttggctggctgctactcttccccattgagtataaagtttcaatctttataggaaagatgatgaattatgatgagatgaatgactgttatgatttctctaactctgtctgagcataggattccatattcatagtacaaaggtaacacaacatttcagcttcagtacttactttacttacaatcagaaactgattggtagaatagaatatcaggagcagcaccaatatgtatatggctgttcctgttcctcaatccaatctaaatatactcagcagcttaaagtgcatacattcttttatattcactgttcaaaatctctgaatctgatgccatattagacacagagtaagaccgagactggctctcggccctcctaatattcctcaattttgattcctccatcctatgcaagatcacacagtagcacattgagccaatggtagtgagcatgattgtgctacctataatagttgcatacacagcaagccaatgagcatgtgatcccaccacaacatatgtaagagaaataaacgcaatcgaaatgaagagacaagccaaccacatgagcttgttgatcacaaacacaagttgcctctttgccttctcttcaatcacaactactgatgtctggactacaacaactgcaagggatataaatagagccaggctatcaaatacaaagaagacaatgaaagctgcgttgtttgctatatgggcttgtccactctcaggccccgactcctctacaaactggccaggcacggtgaatatggcagcgaaagcaacagtggcaatgagaactgccacaatagttgcagagtttatagcattattcagcccttcaatatgaagcttctttagcctctttgcaattttctggaccctcactccagtttgatgtgtctgctgaagttgtgagcggacatcgtgctttatgtcgctcacggtctgcttaagttgcttagcaggattctgaggctttccttgctcactagaattcgttgcccctgcttcctttagaaccaagacaagttcaggagttccgaatttttcagcaatgtcaagaggtgtttctccagccttgttaattgcattgatgttagcgccttcaacagacagcaaacgcctcacattctgcaagaaaagacacaagaatatcataaggaaatcgctaggttcccaacactatatcagatatcaggtgtcatatcgctattgttgtaattcaatattaggtcccacctcttctaatctaatctaataaatattatagaaaaccaatatagctagtgccacatcggatgttgggtcttatatcaatgctcatatcataaaggcacaactacaaatgcaaaaggacacactaaacaaatttattaacacaaacaacaataaaaaaaagcacctcaatacgacccttccttgtagcaatatgcaaagctgtattccctttattatcttccacactcaaaacagaaggatcaggtttcaacaattcaaggacaatctcctcattttggcctttaacagccatatgcagtgcagtttgacccttttgatcagtcctaaagccagtgcttggatctttagtaagaagagacttaacaacttccaaatgccccatccttgcagccgaatggagcactgtcttcccattatttcgggcaatcttcgcgagattcgaatctgtttcgagcatgagattaacaacatcaatatggccctgagtagcagctgtgtgcaaggctgtggcattggacaaatcagtagtcattgccaagttcgggaagacttgcaacatttcctttaagacatcaagatgaccttgccttgcagcaatgtgaaaagggtcatagccattcctagctgggagtgatgcagtatgaagatctatgtacttaagcatctcaccaacgattacagaatgcccattttctgctgcaacataaagtggggtttccccttcctggttttgcttagataacaaattgagtacttcattgttgttgttagaagaagaacaagagtgtagaatttctttgattctgagcaaattcccagcacgagaagccaaatgaaggtgggaatctcctcttttaccaggtgaatctttggtcttcttcccaatgaaactgagctgtttttccatgactatacgaaaactcttctgtttttccataaatccacctcggaagctcttctgtttctcaatccctctcccaaaacttgggcgtttctccaattggggttgtgattgaggttgggattccagttggggactacgagaactgctttggctctccattaacaataataataataatctaaacaagcacagatcaaaaatcaatactttattttggtggtgtgaccccaattattataatcaccatcatcatcaaaagaagaagaaagcaagtacctttgaattgtggatggatcgaatctggttgaagtgaggtttagagatagtaaagactcttactttgaatttggagaagatgaggttagctgctcaggtggtgttcttcctccactcccttccattccgaccaaacaaactcactagcactcattttttttttc

SEQ ID NO: 36711 - DNA, 5971 bp, Cannabis sativa
ttgagtttgttttaatttttgtgctgtgagtgtgaggactttattctaatgttgattggttgtgaaaatgacagccgctagtccttaccacatgtgatctgtagtgactaaactccaagccgacaatctctgtcacttcccaaatctcgatatgttttcctaagttttacggcttttaaactggttttcttatctttattcattttttttttcatgttttgttttaagttttccaatacaaactgagaaaaagggcaaccatgatatctcagttttctctcaaaaaacaagagactataacctcagcttcaatcaaatcctcacatggctaagtgctaaagctaatgtaaaaagtttccctttttccttttaccttttttcttttcttttctgggctatttgttttccctcacttcacttagctcagctggtccttttccataatgaaagcactaaagatttgcttttggcttttctacactttccactacactctggttttggttagagcctctgatagtcttctttctccaaagggtgtcaactatgaaggtttgtctcttttgggaaattttcttttttggtttttatggaagtttgactttagtttgcttgatgcagtggctgcattgatgtccatgaagaaagatatgaaggatgagcttaaagtaatggctggttgggatataaactctgttgacccttgtacatggaacatggtgggttgctctgttgagggctttgttatttcactgtaagtagtctcattttctaagattcatgatactaattttatggggtttaattatggaatgcaattaatgctttcctgttttatttctttaagagctatataggctatgtgtaaattgtaataggggatgattcatctttttggttttggaaacatttgaatctgatagtgaaatgacgactatgggtttagctggaacgctttctccaagcattggaaatttaactcaccttcggacaatgtacgtttttgcctctttggacttctttttctcattactatatattgtttatcgtgtgtagcagcagtgttcaattctgacttttctttacatagttaattaactatcaattctgaatttgaagactttgcattttagggtgcatttggaaatagttttgtagttactaggtattgtaattattagtgtagtaattatacatcatagtaattacactttatttataaatgttaattagtatttttacctcccgaattttgacatgtactaaattatgtccctgaacttttaaggtcgttaaaaatctatcctgaactatttagattatttgatttaaggattttttccaattttagtaaaaagtctaacatggatgaaagttcaggaaacatgatttggtacatgttaaagttcgagagacatgatttggtcgatatcaaagtctggagaagatgatgtagtacgtaaacaatcactgaattagtaaaattgaatgaaattagacaaaatttcttaaatccaacaatctcaatagtttaggagggattttttgtttgacaaaatagttaatatttaaattggaaagtttttaacagtgtaatcccatttgtatgtggtatgagacctctcaatataattatgtggtaaaacaaactcacaaaattgtgcaattaccttaaattacacccaatttcaattccaggctatacaaacacacccttaatgttaagggtgggttctttcaatattcaaagttgtgatttgatctaacaaaatgctgaaagaatcaagttgttggagcaagggaaatgaaaatcatgtgttgatgaaatgttttatattcaccacatttcattaacatacatatcaagttattctcttgactagaaaattacaggcataaactaaatgtgctctggagtgtgttagtatagtatggcttctttagttggttattccaagttatgaaagtgaaagttttgtgtccattttctggattaaatgtgtacttaattatgcattcaccctgatgcaatattctcaactattacaggctgttgcagaacaatcacttgactggttctatcccagcagaaattgggaaactttcacagcttcacactcttgacctttcgggtaatgagctcgaaggaaaaatccctagctctttggggtccctgtttcacctaagttacttgtgagtatggtattgaataaatttagttactgaaatttcaatgttttctgtagaagttggttttgatatcatgttttggtctaaccatttacattttcaaatcattttcatgccaagtttttcaggcggcttagcagaaacaagttagttggaccaattcctaaacccgtcgcaagtttgtctggtctttctttcttgtatgtgtttcatcacattttcgctttcttctcacgagtatagtttatgaggctctaatttcaaatataattaccacacagggatttatcattcaataatcttagtggcccaactccaaacatacttgctcaagcctacaggtaagatttttatggaaattagaatccatttcataatttcacattttctgttgatatatgtcttagccattttctgtaatttgacaacaatccttacttgatgtgttccttcacacttttttcctagttagctagttatccaaggtacagaaaattgtgtgaagaattataaggagagaaaaattgtggaaagaggaagtgattcatagaaaattgataagaggaagaaaaaaatgagaactatgaagtatgaactcaaaattgacattttaataatttctttagatggtagttgtgtttagttactgatgtttgattttttgaaatattgggttgtagtattacaggaaacaactttttgtgtagtccttcatcggcgcaaatttgcatgggcaattcgaaacctataaatggtaaaatggattaaacttctgacatccagttgctttgtagttcatcagatttttaaaattcttttacaattgcagacaccagttcaccagcaaaagtcactggtcaccaccgatgggtgctttctgtcgccattggcattagttgcacattcgtcatttctgtgatgctgattgtttgctgggtgcattggtatcgatctcgtcttttctccacatcttatggtacttcctaaactatgtttaaacatatacttaattcagtacatgataagtttcctgagagattgtggtaattcaaacttttcagtgcagcaagattatgaatttgacattagtcaattgaaaagatttgcatttcgtgatctgcaaattgctacaagtaatttcagtcgcaaaaacattctaggccaaggtgggtttggtgttgtttatagaggatgtcttccaaatgggacaatggtggctgttaagagactaaaagatccaaactacactggagaaatgcagtttcagactgaagttgaaatgattggcttggctttgcatcgaaacctcctacgtctgtacggtttctgtatgacatccaatgagaggttgcttgtttatccttacatggttaatggtagtgttgccgatcgcttgagagaaacttgtcgtgaaaaaccgtcacttgactggaatagaaggctgcacattggccttggaactgctcgcgggcttctttacttgcacgagcaatgcaatcccaaaattattcacagggatgtgaaagctgctaacattttgcttgatgagagtttcgaagctgtggttggggatttcggtcttgctaaactgttagataggagggactctcatgttacaactgcagtacggggcacagtgggacacattgcacccgagtatctgtcaacggggcaatcttctgaaaagaccgacgtttttggatttggcattctacttttggaactcataactgggcaaaaggctttagatgcagggaatggtcaagttcaaaagggaatgattctagaatgggtaagttttggttaagttgtttgaaatcaaatttaaagatctttcttcaattgaatgtcactaaaagatggttcaattaatcaattatgcaggtaaagactttgcatcaagagaaaaagctagaagtaatagtggacaaagatcttaaagggtgttttgacccggatgatcttgaaatatcagttgagttggctctacaatgcactcagtctaatcccaaccttcgtccaaagatgtcggaaatcttgaaaattttagaaggtcttgttgaacccttggcaccagctgaggaatcacaaggcggaaccaacctcggcgaggcaagggcttgtagtagtttctctagaaactatagtgaagttcatgaggaatcttctttcaacattgaggccatggaactttcagggcctcggtaacggctaatagttctctgtatgaattttgaagattaaatttttgcatttttaggactagtttggtacagttttttgaaaaactaaaagttactttctcaaacagtgaaaatcagtttattgaagaatttatagagaaattatagctaaaaatgaaagttagtgcaacttaacttttataataataagagtaatttgcggtataaatatctaagtttaactctcgattgaaaataaatacttaagtttaatttttagcgctaataatgcctaagttataattttaaaacttatgtaagtacttggctgttaagtgttaagtaaattgttacgtgttaatccctgattggtccacattattaaacttttattttttttaaaaaaaaaaatagtttaaatataccaataaaaaaataacacgtggacaatgacttgacatttaatggccaattacctacagagttttagaaatataacttcggtatgattaccgcaaaaaattaaacttgagtatttatttgcaatcaataattaaacttatgtatttatgtcgtaaattattctaataataaattattttttttattaaaaactctaataattttttaaaaatatttacttatttcttatatattactaaaatataaatatttaaaataaattaatatgttaataaaataaagagataattacataaaacacaattttttttgtaaattttttatattcttacgttcgaatatttttttttaatatatttttatggcgtacaatgcacaagaccacctcctgcactgggacttgtaggatcagaacgtcatcttatcctttgtggacaactaatgtatttcagaccattagaacttataaatacccatgtttttgatttgagaagggattaaaaattctttgtaacataagctattaagttgataatacaagacacattttttaccattgttgctctatgagttcttaagttacactctaatgtcatctattttttgacattcatacattgagtttttgaccatcattaacgagttcacgtcaacattgttcataaaaatattgttaatgttcttatttcattattatgattttaactcctttgttttcatttctattattgttgatctttacatgagttcatactctattaatatattgtattaataaattgttagaattataaaaattctccgaaattcctaacaaaaaatattccatttaaattctttaacaaaaaaataaataaaaagttgtgtgtaaaaagaaagataagttatagttttagattatgtttttttgtatataaatatatatgtttgatatattaagctttgaaaaagattaataatatacctataatttaaaataaatataaataagtatagattagattagatcgtaacttttacatatgaaacaatattcaatccgcaaaagttcaaattttatattttttattccaatccaatacacactttgcaaattaaattagattggatcatgcgaattgagaccagttgctcatctcctggtctcccccataagggtgtactatggtatttat

SEQ ID NO: 36712 - DNA, 4057 bp, Cannabis sativa
tagcaagtgtcctttgattacacagaaaattgatttaaattatcaatctgtttgtacattgaatattataaatattcaaatcaattacaacgtaaatacaataaatgaagaatagtttcagcccaatttactaattacaacaacgtatgcgaccttcatggtacgagttgtctgtttatattctcgtataagctcgcaggctcaagatgcacacaagactaatcaagtttaggatgtctacgtcctattcaagtcgcatatacagacatcgtgtaacaggtcgataacttaggacatgcgagtccttatcgggttatcgaggacgttgggtcatccggaccagctcactgagtagagaatcgatctttagtacttcgcaggaagacctttatagttcccgcatatatcctggtatatgcaagtcttaaacccgatcttcggtcctgcttcgtgcgagctataagaatgcgactagactctgtcaaggtcacatcacccgctgagtctagttcagcgaggtttacactcaagaagtctcctgctgacatctcaaccctcctcgaggagagtgagtccacgtgtcatttttatgggagcttggtctcgagtttctaggtgaaagattctcactataacacacgccaatcaattaaaaaggcgcaaaacttttaccgtgcataggttttgttatactgactattgacagattaggggctttctttattccagcatatacattttgtcggcgcttattctcgtcggtaaaagctagttttaacagtacaattgtgaattacgccgacaaaacgtcttttaccgaccaataatagctgaaatcttttaccaacataattacgtgcaggtaaaaatatgctagcgcatttgtaggtgcaaaaatacgctggcaaaacaacatttcttatagtgttcgtacactttcatctattttgacgacagtgattactagctagcattacatagcactctcgtgaaacaatttagtgtcagattaaattcacatgatgtcacggaaaattcatgaaagaagagtgaaggtatgatgatcttgcaaatatatgttttttattattataattttttatcgacaggcctgagataattttcgtcatttattttaatattttttggacaatatattatataccttgtatatataacttctattatttctctttaaaaaaactccagtaattaatttgttatttacatgttaaaataaaaggtattctattgttgaattcaattttttaagtggcatcgacaaaaatataatataaatatatgtatatatatatacactgtcttaattaatagtggcaaatgttgcttaccacatataaatgtaaagaatatacccgagagtagtttaagtacgtacagttcaataacataattttttgataaacttttagtgttcttttttttttcctttttgtaattcaatatgtaatacattgaacaaaatatatttgattaaactggtgcaattaatttaggatgtaatggtggagatcatgcatataatatactcacactagcattaatattatatatattctcatgcatatatactcacattagcattaatattataagtatattctcctcaaactaaacatatatttaataaaaaagagaaattggtcatgaagatcacttgctacacaaattataacaaacccagttccatactataatatgataggtctacacaacacaagtaatacatcttacatataacataataaggccaaaggcctacacatacacacaaacatatatagtgctgatcgtctaattattacaaaaacatagttaaaacaaaaaaaaggacaaacataataataataataagtagaacaatgaagcttgaactcgacccataacaaagatgtagttttcttttcttaattagtcaagccaatcaaatatatatgagagaaaaatgccaaaggattcaagttgccctttagtacgacttactactactcaaaccttattacctaccttttctccaagtaacttgaatcaaggatattgtagtagctagctagagagagagagagagatcatgtcgtacgaccaaggaagtgaaagaaacgacaacaaaatatttcaaagcaaatatagataatccaacaccaatctgaaaaacccatctgaaggaaggtgaccagtgaccacccccaccaaccatttatggttcagaccattaggagccatgttggcaggggtggccgtcgagagaaagatagcaaataagagggcttttttttttttgggtgtttgaatactgagaagagggtttggtaatgaagatagagattggttgttataggattatgtttttgggttttggtcttaagggcaataaaaggctgagatgacttaagtagagtttgtggtcactttttcattaaaggaaactatgaaaaagaaagttatgggggaaaaagtgagtgttgaagtttgcaggtttaagcatcttccatgggatatgccattagcaccttaactcgactttgctccttcacattacctttcacgttgtcctttttttttttttactttttcttacgccccttatatcaatacataaaatattaattatgtaggtgtagatttaataatgtcaatgggacatgcttagtctatttgtcttttttttagcttatgtgaaaaaagtgaacttttctagagaaatcatgcaataagaatccactgttggatttctttggcccacccaaaagtagaaaaaattagggtccataccttggactaatcagttgctcttaatctccaataagtataattccaaatgctataagtataagccacacagaactcaaactcaatttttttttctttatataaaaaaatatatatattaataatttgatatatttttaatcaataatattttactaaaatgggtctacatttttttttttggtcacagattattgaagcctcactccaagacaacaaccctttgattgacaggcttgccatcatggctttttgtagtttgcataatgagtgctccatttggggcctacttgaactaagttggtcttccaagtgtcaattattcatggcatgtccatagaggatacgatggattggtatacatagaataaatcaacaaaaggccacgtttatatataatatgattataggactaaataaagttctcttagtgtttttctggcttaaaatattgtccgagtgtgatatcatatttctcagtgacaacagcaaaattgttctgttatttacctaagctatacaacaaataaatagtctttattttgattgcgtaatgcctttgaagaatggggtcaattttattttttcttctctttttctcatcaattaaccaatacagtcttgtgtttcccaaatcttttgggttaaattcctacttgatgagtcacactataccaattttggtagtagtttatgaaatatgcaagaagagtccatttcatgtccatattgctcccttccaaactaaagtgtgtatatacatatgtaaatgtataaatataaatatatatgcattgtttagtatggtataatagtggatttttactataaacagaatatggacctagtatgttctgaagaatattatttgattccaaaccaaataccatgctaaagcaggagcccctatttattctttaaaattttatctatttttaatatggtgtccagtgtccaccatagagaggggataaaaaaaagagacaaagtagcaacatcaagcacactgagcactaagcatatggtatattacatatagatatagcatctaagtacaaaaggaaatgaggtaaaaataatagcatctcagtcactcagtgctgtgccatttcaatatactttgaatggctttggaaaatttcagaacaattttatcacctattcatttcaggttactgtttttccttattatttctagttatttggtttggttggtttccttctgcaactcttgcagaacagacgtaaatacttttccatatattat

SEQ ID NO: 36713 - DNA, 4329 bp, Cannabis sativa
ctctgctcaatttttttttcgatcatctagtttctctgttcatcgatcatgtcagattcatctgcagctactccggccatgtctcagtgcacggcagcttccttcaatcctgtcatcttctcccacaaattgtctgttaaactagacagtgacaactttcttctatggcgccctcagattctttccgccattaaaggtcatcagctcctcaatttcatttcagcttcattcaaacctccgtctaaacatctttcagatcaagatcgcgaggctggcatcatcaatcctcaatacactcaatgggaaattcaagatcaacttctctattcctggttactctcgtcgatgtccgaaggcatcctcactcgagttgttggctgtgaaacttcagcatctgtttggtccactctcgaaacctattttgtcactcaaacgtctgcaaaaatcgatcaatttgtcactcagctgcaaaacatcaagaaaggctctctttctatcaatgattatcttcttcgcattaaaaggattgttgatcgcctcagctctgttggtcatgctgtttctgtcaaagaacacgttgctgccatcttcaaaggactcccctctgaatatgacacctttgtcatctctgtaaactctcgaaatgtcccatacacggttgctgagattgaatctcttcttctctctcaagaacacagaatggatagtcacttcaaggatcctgattcaatcaacattgccacaaatcgttccaatcgtggaagaagttctggatactctacttttccaaataccagacctccctctcccaatttctctggcagaggcacctggaatccttatgctgtcaatccccgtggcaatttctccccaaattactctgcacctccacctggtttcagtcgaggcaatacaccacaacaaggatctactcccaatcctaatgcagctaacagacctgtttgtcagctttgttccaaggttggccatattgcttctcgatgctatcagcgtttcaactttgagtttcctggtgttggtgctgccaacacagatcgacaatctgctaatattgccacatctgaatctgtaattgaccctgcgtggtatccagactcgggagcaacatcacattgcactgcagatgctaacaacttcactcaaaaggatccttattttggctctgaacaagtccacatgggagatggtgctggcatctccattcaaaatgttggtaagaccattttcactactccttactcctctaaacctctctatctcaatagaattcttcacgtccctaagataaccaagaatctcatgtctgtctcaaaatttgctagtgataataatgcctattttgagttctttcctaaccaatgctttgtcaaagatcaggcttccaaggaagtccttctgcagggacatcttaatcaaggactttatgtcataaagccttctcaaatgcatctcactcatcaatctcattctgcctcaacttccagtccctctcatgcattatgttccactcataacaccactgtacaaccaaatgcctctgttatttccaatttttctctctagcatagcagattgggtcacccatctgctaaagttgtaaaaagaataatgcaatattgtaacatttcagattctaataaaactgttcatgatttctgtgaagcttgttgcaaaggaaaaattcataaatttcctttcccacattctgacactgtttacactcacccactgcaactcattcacactgatatctggggtccttcccctcatctttcctctcaaggatacagatattacatacactttatagatgcattctctagatacacatgggttttcttactcaaagctaagtctgaggctctatcaacctttattcagtttaaaactcaagctgaaaatgagtttaattgcacaatcaaatcagtgcaatcggactggggtggtgaataccagtcactagagccttatctcattaaaaatgggatttcccatcgtgtgtcatgtcctaccactcacgaacagaatggtgttgctgaacgcaaacacagacacttaattgaaacagctcttacattccttgcccatgcttctatgcctctttcatattgggatgaggctgtaagagctgcagcctttgtcattaatagactacccactgttatccttcaaaatcaatgtcctcttcaggttctgtacaataaaacacctgattactcttctttaagagtatttggttgtgcatgtttccctaatatcagaccttacaacagaaacaaacttcaattcaggtctgtcaagtgcactttcctaggatacagtctaaaacataaaggttacaagtgtctagctcctactggcagaatctacatctctcgagatgtacttttcaatgaaatctcttttccattcactcagttacactcatcaacaaccacttcaagtccaccaaaaatcactgtttctgcctccattcctactgttgtcacccattcctccctcccacctgtcactaaccactccaacaccaccaactccacttccacttcaccatctgctcatgaaacaccagacaaccattccactccttctctctctgtttccaccactcccaacaccaacatccttcactcaacatcccaacccaatcccactgtccctgctacaaatcccaacccagcacccactctcaacactcatgccatgactactagagccaaagcaggaatcagaaaaccaaaagtgcttctggctaccactataccacactccattacaaaagctttacaagacaaaaagtggaatcaagccattaacactgaaatgacagctttggttcgaaatagaacatggacacttgtccctttaccttatgggagaaaagctattgggtgtaaatggatccttagaataaaagagaaccctgatggatcagtggacaaatttaaggctcggttagtggccaaagggtctctccaagaatatggtttcgattatacagagacattcagtcctgttatcaaaccaactaccattcgaatcatccttactattgccttgtcaaagcattggacaatcaaacaacttgatgtcaacaatgctttcctaaatggtgatttacatgatgaggtttatatgttacagccccctggctttgtggactctaaaaatcctcatcttgtttgcaaattacacaaggcactgtatggattaaagcaagccccccgtgcttggttcgataaactgagatctgctctgctatcttttggttttgtttgttcaaaagctgacaactctctcttcatatgtcaatctcatcaacatactctatttgttttagtttatgttgatgacattttggtgacagggagttctaatgaggccatccaaaatctgatctctcagctgcactcttcttttaacatatttccttggaattcatgttcatcacacttcatcaggtcttcatctatgtcaaaagaagtatattcaggatcttctcaccaaagtcaacatgcaggatgctaatcctcttccagcacctatgccaggaggtgaaaaattgtcagcctttggtagtgatcccatttcagatccatttttatacagaagtactgtaggagcacttcagtatgcaacaattacaaggcctgaaatatcatatgcagtgaatcgggtatctcagtttatgcaaactcctttggagtctcattggaagatagtcaaaaagatattgagatatctcaaaggctctttggaccatggtctacaccttcaaccttcttcctctctgtctatcacaggtttctgtgatgcagactgggcttctgacccagatgatcgacgatcgacttctggtttttgtgtttaccttggttcaaatctcatctcctggtcctcaaagaagcagagaacagtctcacgctccagtacagaagctgaatacagaagcttggccaacaccactgcagaaatcatctggattcaatccttattaactgaaattggtttcaagcttccacatcctcccaccatctggtgtgataaccagagtacagttctcatgtcagccaaccctgtacttcactccagaaccaagcatatagagctagatctctactttgtgcgagaacgaattctatcgaagcagctcattgtcaagcatacccctgctcatgatcaaattgctgacatcttgacaaaggctctttccagcacacgatttctccttcttagagacaaactcagcttagtctcattggcccagctgagtttgagggggggtgttagagactctgtatgagtcaa

SEQ ID NO: 36714 - DNA, 6375 bp, Cannabis sativa
tttcttacttttgttttccccactccttttagacctatcagctacttttacacatcagactgcacagaaacttcatgagctgttgtttaagcaagggtgctatgccgatcttacagatgccaagattttggaaatcatcaactcatatagttttgatgtaagcacttgtactttctttcctgtttaaatcatattggtgcagttgggagtgcgataataaagttacaaatcaagcttgatgatgctcatgtgtcttgccattatcttttgcagaacacatcaactcagtcactttgtaatgctgtcaatcagatcttggaagatactatccaaagaaagaatggtgatgtttctaatgtatggcagtaagaggatgcatggatgcatatttttaaaccatgcattaattccttacatggtttttagactaattcatttcccccctttttgtattttgtttagcagttctaacttctatttccgtgaatactttaatcagcatgttgcatatctgttgagaaaagtaatggatgtgatccagcagcgtatctcaaatcaagcaaagaacttgaaaaatgtaagatgctaatttgctttcctttccccactacacataaataatatattgattgtagcttgtcatttactatcgactgtttatgttgcctgcttgtagcataacaatctcttcatggctcgtgaagagaagtatcaatcaaaacttagagtacttgaaagccttgcattagggacaactgaggagaatgaggttagtcaagttatagatttgagccatgttttctttttttaacagattaaattaacataatttattaagctaccatctatttgtgtaggttgttttggaccagctccaacttttaaaggtactggcctttactgtaaatggatcctttcgcagtttttctttgttacatgttgatgtttctgaatatatgttttttttcgtctttatcaatttatattagagactaattgttttgttgaacgaattttataatcttatagttcatgatacaaataaaaatgcagatacgtaattatgttctttatacactattgttctagtcgtgtataaaattacaactaccattcatcatgcatgccactattgataaacatgcttccattagctttcacttcttatgcaagtttttgagataacttgtccattattatcatattttaatactacattgaatatagcagcagtttaatagtagtggtttggtccattaaaaaaaaagtatgaacatttctgaatagtcttaccaataatttaccagtaactagtgaaaagaatgctagaacaattaattgaacaatctgatacataataaaactcctaaagtatttcaataattattgcaatatatacatgtatataaatatgtttaacttgcagaacaggatactttaaatgtatttaagatttggtttttaattatatttttgggcttttggttattctaaataagtttattggaatatgcagtatgagaaaataaagttggaggagaataaaaaacttgaagagaaggatgttcagaaaataagggaagagaagaatcaatttcaaaatgagatttcaagacttaaagaagaactagaatcaaccaaaaacaaacatgaaagtcattgtctgcagttagaagaaaatgccaaggaagaaaaaattcaattggagcaaaagttgaaggaatttgagcatgaattgatagattctaggaagaagatgaaagaaacagagtcattcgcagagtctaaaatacggagatggaaaaaaaaagagcgtacttaccagaactttataaagtttcaatttggagcgctgcaggtatgcctacatcattaaattgtttccaagtttaacttttaacacgtttctaaatgttatttaatgataataggatttgagggcttcaatggagtccacaaaacatgaagttttgaagacaaaaagaagttactctgaggaatttaattacttaggtacttgatttttgcttgtttaatttcattttcagttgatattgttttgggttatatttttcactgttttttccttgatattttatgacatatacttttacatatattaggagtgaagcttaaaggacttgcggatgctgctgaaaattatcatatagttcttgctgaaaatcgaagattgtataacgaggttcaagatttgaagggtatgatgtttagcataataatgttttcactattttttctttggggtacatataatagttagttacttgtcagctaatggtgttaaactgctattatattgttcttcttgtaggtaatataagagtgtactgccgaataagaccatttcttccaggacaaagcaagaaacacaccacagtagagcatgttggtgaaaatggtgaattaataattgcaaatccctctaaacaaggaagccacaggctattcaaattcaacaaagtatttggtcctacagcttctcaaggtatagacttttgtattagtctcaaataatttcaagattcttattctgttttcatattttattaaattggtcactctgccagcactataaatgagacatattgtatgttaaatgttaacagaggaggttttcttggacacacaaccattaatccgttctgtgcttgatggatataatgtgtgtatatttgcttatggtcaaacggggtcagggaagacctatacaatggtacgtaatttgattatattttctcataatttatgcacattttagtttggctgaacatttatctttgttatatcagagtggacctagcatatcatcaacagtggactggggagtcaactatcgtgcattgaatgatctttttcatctttctcaaagcaggaagagctccattgcttatgaagttggtgttcaaatggttgagatatataatgaacaagttcgtgatttactctcaaatgagagttcccagaaaagatatcctatatctgtcttctgtttattttcatttatgtttctggtcaatatttgtgaaataacaatttgccttaaaggtgcctgcctgctgctctgcttctttgtatgcttatttttgttgttttctttcaaattattatgtctactcctctttgttttattttggcttcttttttccttaacttgcacacacttgggatttggagtacggcccaaccaaatggattggctgttcctgatgcaagcatgcatcctgttaaatcaactaaagatgtcctggaattgatgcatattggattaatgaaccgagcagttggtgcaacagccctcaatgaaagaagtagcagatcccacaggttttattctttttatagagtttgtatttgttattatcttgttcaggatatgatatgctttgttttctttctaatctccattcacttaaagatcaatcctatatgaacatggattgtagtgcctgccttacaaatattttgagaattttattcgggtctgtaacaatttccatattgcatgtatgcttagttgtttggcatatttctgttttcatttggttgtttgtgttaaaaaatgtttgtcttttttgctctctttttatattggtttcaatgattcatttctgatcatggtgtctatctaacaaaatgatgcagtgttctcactgtccatgttcgtggggtggacctgaaaactgaaagtattctacgtggtagtcttcatttggtagatcttgctggtagtgagagggtagatcgttctgaagcaactggagagagacttcgggaggcacaacatataaataagtcactatcagcacttggggatgtcatttttgctttagcacaaaagaactctcatgtgccctatagaaatagcaaattaactcaagtacttcagagctctttaggtacatatagtttttggtcctcagttgcaaaatattatgatacttctgtctttatgtgttgtatgcatttactttctgttttcctctagttttattgatgaattcttataagcttttgtttttcatccccaactgcaggtggtcaagcaaagactcttatgtttgtacagctgaatcctgatacagaatcctactctgaaactataagcactttaaagtttgccgagagggtttctggtgttgaattaggtgctgcacggagcaacaaagaaggaagagatgttagagatctcatggaacaggtcttagctttatttcttcttaaacttgtagatttatatatgccgggttttcagcattatgcctgaattctagagtgtgttgccatatattcaaaattactattgtttcgggttagatgatttatcatatgatgctactacaaatgtagctaaaatttcaattgtatagacatttggaatgttgttttttcaataataataaaggccagggttagtttacagtaagtcctactaatgcaacttttgttcatttacttctaatgattttcaaaaatccaatcatctttaatctatatacgatgcagaaggtttagttgtgtttagtcaagtgtttcttaagtttgggatgaatgagttcatgtgtttaaccttggtgcgtggatctttgactttcgagctcctggctgtagattttttctttcaaaatttgggtcataatattattactacagtagctctattataaactgttcttttgctttcgttatactagttgtcactagtgaggactacccttgaccccaagcttttgtctaaactttatggctcacactagctatatatttctagttcttgttttattccagctacagtaaacccttttcccgcttggtaaccataacttcagatgcttgctgtcaaatgtttgacacctttctattactcactgcaattatttattggatatctttcaggtggcatcccttaaagatgttattaccaagaaagatgaggagcttgagcagatacagaaaactaatgtcaatggtttgaagcgcggtatgagtatgggcactctaagatataggtcttcatcgccgagaaaatattcggtggcgacacctcgacagagcaaacgtttgtcaggagggaaaggatcagggccaagtgaaaaaaattctgatatggacaactgctcagaatttagtgagaagcattctgaaagtggttctcagcagtcaatggaggacttaagaaatcagaaagaattctcttctcaaatgaagcttttaggagatgcaaatcagaacataaatgaagactttgatcttttgggctttggggatgcagattctgaggagagattaagtgacatatctgatggtggtctttcgatgggaacagaaactgatggttcaatagccagtgttgtggagttcactctgttccctgaatctacaaaaacatttgacaatacgaaatctgagaatgcacaaactgaacaaagtaaagccgagaaggtacaaacttcgaaaactcaaactgagaacaacaatcgactggaaagaacacaatcggaggtcatagacaagtgagtatttcctttatcatctactgaacattttgactgtccttcttttggttaaaaaacacataatagctgaacgcacttactttttaaaatgtgttcaagtacctgggctatttttacaattctttgttatctactgattacacttgataacttttctttggtctgctatctgatttcttggttttgggagatctttcatttgacatagctagttaatatcttgtttatatcttactccaatcaggcaaactataccatctagacttccaaagcctccacagaagccattgtcagtgaaatcatctcgattgtcattgaccaccagaagttcatctaaggttttgtcaggtatgtatggccacttcaatttatgttcccatatttgccttaagagtaagtaatgttaattcaaccatccattttccattattactcatatccaacattgttgtactgtataaggtacgtcaggtgctaagaaaccaactgtaggcagctcctcagcctcgaaagctgcttccaaacgatggcagtaatcgacattttcatataggaacagcattgttagacctttgatttcctatctttttgtgtggtgcattgatgctaggaacatgttatagtttgttgttttttgtattccaattctcttctgttgcttccatttgtctgatatttgaagaggcaatgggaaagttgtaaaatatgtaatgtaatttggttcttattgtttttaaatatatattttatatttatataacaacgtttaagattagttggttttttcttagttttttgaactggaaccaaatgttgattttcttaagtagcagttgagaaa

SEQ ID NO: 36715 - DNA, 4141 bp, Cannabis sativa
  modified_base (4089)..(4096): a, c, t, g, unknown or other
ttaaacactcttttaaaagcaagaaggggaaattggggttatggcggttaagacgaatatgagcaaagcgtacgatcgactggaatggaatttcttgttgcgagttcttattaaagcaaatgggttcaaggagcattcatgctctctcattacaaattgtgtcacctctttctcctacttaattttgcttaatggtgcgcctttggctcctttcaatcctaatcgtggtctgaggcaaggagatccattatctccgtatcggttcattttctatcgtgaagttctttccaagctcatctttcgtaatgaagctaagggagatttaaggggggtgcgggtctcttggtatgcctctccaataatacatttgttttatgcagatgatgctatattattttgccaagctacatgcaaaaatgctatggtgctgatggagtgcttaagaatttatgaaaaatggttaggacaacaagttaataaaagcaaaagtggtgtggttttctctccaaattcttctatgaataataaggaaggcataaaagtgatgcttggtatgaatagtcttagtgctaaagaaaaatacctcgagaactctatcttttttactgcaagaaaatgtgaggatttccattttctcaagaaaacaattgtatctagattggagggctggaaagctaaatgcgtatcccaggcaggtagaactactttggttggaaccattttgcaaagcattcttaattatgatatgtctactgccaaagtaccaaaaataatctgtgaagaccttgataaaatggtagcttgtttttggtgggttgggaatgcagagaagagtcgatattgtgcccttaagagttggagtgacatctgccaaatgaagagatgcggaggcctatggcttaggaagttttatgacatgaatttaacattgcttgctaaattgtattggatggttctaaagggtgagaagaaggtttgggtgagtattatgaccttgaagtactgccagtcacttgatgtgtgggatgttaaaaggcatgctggcgattctcgtggttggcagggtcttttggaagcccgttctatttgtaaagaaggtacggggtacttaattggtaatggaaacaaggagctttgggataggccttagagtctgggaaatcaatggaagaaattaagaagagcttcaggtataatagaacacatgctttttggaaggtctcagatttattttcggaaggaacgaaggtttttaatgcagaaattatcagggcttattttgatgaggatatggcttcgattcttaacatcagacctttggaggaagacaaagatgttctgttctggaagcttctagtttgagaaactttttagtgaaaagtgcttattgggtgagtcagaagtacagattccaggagtctaatgtgatgtggggcaaactttggagattcaatttgcaccctcgttcaaagcttatactgttgaaaatctggtctgatgtgctccctgttaaagctagactgggatttcttggtcaggatgagaatctctgtattttctacaattcggaagtggaattggttgctcatattttcttccaatgcaattttacgagaggtctgtggtttcaaagtcggtggggcattcgggttgactgtatgcattggagtaatgccagggagtttggctcttggtggtcaaagctcaatgatagggagcttaaaatgcttgtggcctgtctgtgcgaggtgctctagaagtggagaaaatgagttttgctcgatggcttttactgcaatatggaaagaacttttaaggaaatcagtgctagatagatatgtcgagatggagtcagtgtggttagagaaggagtcgtgcgagtcgattccaaagttaattcccttgcctgatgcttcggtgtccctttctaccgcaggtttggctgtagtggagatttcaggagaggttttggatttgggttgccacagattttgtctctgtctcaggagttttggaaggggaactacacgtattggctctccgtttagctaaggataggaacattccaaaactccacatccaaactgattcgaaggtggcagttctggcccttacgaaaggttctcttccttttgcttggggttcttaccccattttttatgctcatttaaatctttgtaagtgttttgttattgtgatcttttctcatatttctcgagatttgaatcgtgttgtggatgctctagtgagttggactagatgtgcaaaggtgcgatctatcggttgtttaaaggatgtagccccctttgtggctactactttgatgtagtttgtttcttgttttcaataaaatttgctaattatcgaacaaacaaaaaactttcaacaattttcttaccttatcatataaaatacatcacaaaaattgtactttctctattttagagcacacgtttacattatattaattatacatcaatttcattattaaaatacattagagaaactctacttttataaaattttattcattctaaatatataatattaatatatacacatattctcgtataaaaataatcattaaaatttaaaataattaataaaatatatttatagtaatgaataatattcaataaatgtagattaagaataataaatttaaagaaactttaaaatgaagaaaagatttagattagcgtgttttagtacggctttaaaatttttaaatattctataacagcactctcattaactcatctactctattcttcaccatactccaccaaaaccttactttctatattttaactcatactacatcactctctatatatcatttaaatattatatatataatatattttatttatttaaacaaaaaaattaaaaatattaaatgaaaaaaaaaaagaaaagagagagaaaaattattaaaatattagataaataataaatagtgcttttccacatgtacataaaattttaaactattttagctcacttgatggagcacaattttaacacatgctttattttgtagacattggtgtgagtgctctaacaataataaagactaatgaattatatattaaaaatttaaacatgcaaaaatacttctaaaaaattcactattttattttatagacgtactaaaaaataataaaactacgtacttgcatacgccaaagtagatcactactagccttgatttgatagcggtggttgaagaagttaaggcgggccttttcaacggccgctctctcttcgggtgttccggcttgaggatcaaattcccatatttgcctaccaacaaagttgtttgtggtaaatatgtaagggttatttcctccatctcctatcttcaacctccacattttccttttcctttcaaatgtttagtctatactctattttgtataaccttataatgcttctatataatatgtaaatctttacgtcctaattttagtaatgtgacgttgtatgttttttaatattatcattattattatctcctaattgttttgtagcggggagtgggggaaatcataataataataactataataataataataattaagatatcgaatcctttatattctttttaagagacatcaacatcatcggttaacatatattaattttttttttggaaacacatgataacaatagattaatcgaccaaaatatcctctaagaaaatatagattttttacaaaataaaaagcacaaaaaacaaaacttgccttgcacgtatgatctacctaatttctatattgatatatgacggttagatttttggggaatttttaattatatacctaaatgtgaaaataattacataaaaaacaaaagttaaattaatacggaagtctaccgaaattaaaactttgcagaaaaaaaaagcctaccgaaattagaaaattgttagattggtaactggaagcctggaagtatgggcctctctcttattgatatttttcttttttagaactcttttattgctgtggcttttttttcgttttttttttaattatagctgtggctttgaggaaattacacttagtatgggattttaaaagnnnnnnnnataaatatggcacatttaagtttggccaatttatatggtattttt

SEQ ID NO: 36716 - DNA, 9006 bp, Cannabis sativa
  modified_base (6126)..(6149): a, c, t, g, unknown or other
cactcttcaagcttcatcttcaacccccgagcctcctacaaggctctggtccggtggttcgtcttcattactcaaaatgcctttcatctcgaggatacagcgccaatccgattacagtctcttccctccatccacgcctattgttatcgacaatggcgcctcctattttcgaatcgggtatttcactcttgttcttcttcttcttcccatgaaaaccctaattctgcttccatttcaatttttcaaaatcctttcttcgactaattctacttttgttttccttccccagatgggctggagagaccgagccccgcgttattttccgcaacattgttcagagacctcgccacaaaaccactggtatgccctttttccatgtatggtacgcttaagaaccttatctcttgttttgttggtcacatgaaatcgaaagaagttattttctttaacaaaaattcacgtctttaataaaatcaagtaaaacaaatcaattcttgggtgaaatccacaaagtaacttcaaagttgtgtgtgtgtgtgtgcttttcttctctgttatcttgttatgccttagttttgttacaaagtttttatcattttccagttcaagtatctttgctattgatgaatttcataaaagattttttatctgatcaaaagataaagaagacaattgctctgctatttgatatgcagtgattccctttgttattctcctctcttatggctggtcattcatgtcttaggtgaaactgttactattgttggtgaccatgatccaacactgctaaaatactttgactgtactcgctcgggacctcgttcggcttttgagagcaatgttgtttatcagttcgagataatggaatacgtaagttcattcatgttacttcacttttaacttcacaattatgtgactgaagttcctgtaggactgtgtataataatgttcttataatcaatgctaaccacacacatgtataaacatttaatattggaaatctgtagcattccttgtcttctattgttgtgatcattcaattacataatggaggatcaaaaacagaattcaatagcataaacccaaaaattcagcaaagaaaagaaagagaagagatctagttgcagacaaatagctcagcctgtactggcacttcttgattcaattagcttgagaattaggttacatgacaatggtagcaacacacatcaatagagcacagctccttacaaaatggttcctcacactgagaagaggttaatcaaaatacacaatccttgtaattacaaccctccaagaagactaaacttgttttactaagctaccaaaaactctaagctcaaagaatgtgaatttgaaagatttaatgggttagttattacagttggtttcggctagccttatatagaactaaccaccttaactaactaattgttggaacaaatgaagtagtgccatgtgtccaagacttagtgaccagaccataaactaacatctgttttgttatttaaaaaaataaattctatgttctgttcatgctttttcagtacattataataccttgtttatgtcctggatatctgtagatttagcaagatcacattaattttgatatttgcaactacaaggattcagtaaacttttctttaattctgttttattttcaccactcatttattcatgtggatgcttttatctctttctttcaataatttattgagttttgttctaactaatatattgttgcacctgtaggttcttgactttgcattcgatcggttgggtgcaaatgaatcacaggtatgattctatttataaaagtgcactttcttttgtattctctgtatttttcagctttacattgcccatttgcatgttcaatgatgttacttaacggggtttcataccatgtatacttcaggctccttccgcctcagttttttttttttcatctggtttttatacaccatgctccgtaggcagttttgtatattagggtcatttcttttgcagttgtcagtttgtatggttttattttatccatgataattcttatcaagaacattgtttttgattgtattaggctcattcagacattgttatatctggatatcctcttagaatggttcatcattggtgttaatagtcttggttttataatgctgagctagttcctacctagttctattgcgagtgattactttcttagtcttctattaagtgatagatgttatagttatttttaattacacattcttaattttttgtataaatttaaaatattttttcttgactcttgattttatatttgtttggtggcagagcagattgatcatccaatcttgattactgaatgtgtttgcaatccagtttattctcggggaaaaatggcggaacttctgtttgaaacttatggtgttccatcaataggtaacaacattgaccttaatattcagaaaactgttactagagagtgggctaaatttctgtgtggttcagttcatacatatacatgaaaaagggatgattttaactctgatgagcatctattcttctttgtgcatctgcaacacacacatgtgctaattaagactctcttgttctgttccctgaaaagatgttttctcacttgacttcagtcctatgtatctattagtggtcactactctatgaaatgctctattgaatcatttatattcttaccatcatcacagcatatggtgttgatgccgcattcagctacaagtataatcaacaacatggggtttgtgctaaagacggtcttgctatctgccctggatttacaactacgcatgtcatcccagtatgattctcacagattaaattattatattagtattacatctttctgtataaaactgaaatatatttgtctgatatagaattatcctccactaatgtacttctatcagtttcatgttctttaacgtgattggatgtagttcttgttcactatgataggcattgatattaaattgagtggttgatgtgcttttaggttgtattggatgttgtctccgcttctgtctctcttcttaggattggttgggcagctggctttttaaaagacagatgacaatatagtttgtcagcctagagattgaggatggggatggcaatatatttttagaagacagatgacagtatagtttgtcagcctagagaatgaggattgggatgattctagcgcctgtaggaatattgtttgtggcctggggaggagggggagagtagacaggcagggggagaatattgttagtatagttgggttggagctcagctcttgggaggtccaacaccctcaaagaacttggttatcttttctttctgattttgtttcagtcagtaatagaaatcattattttggccattgttactctgttttggtgtttcatgggtgtagggtcttatggctctttcagggaacttgtactcatgtataaattaatgagttattatatcagacctaaattataatgtcttgagggagttgacgataatgtgtttctgtgactgcagtttatcaatggtgagccggtttataaaggatgctgtaggactaatattggtggcttccacatcactgactatatgaagcagctcctttcccttaaatacccccatcacatgtaagtacaattgggtacacattatggaacttaaagtaccaagtcaaattttttttattatttgtctctataaatttgatagggctcgatttacttgggagaaagttgaggacctgaagatggagcactgttatattgcacaagattatggttctgaagctcaattatttcaggtaatgtaactgcttttacaaaatctttttaccactttttttatgtctaattgtggtacctcctatgtggttgtacagaagggacttaaggaagccgaagagaaaaccaggtgctggcagcttccctggactcctcctccaactgaggagcctccttcagaagaagagcttgctagaaaggcagccataaaggaaaaacaaagtcaacgattgcgagaaatggctgaggcaaaaaggtcttctaggataaatgagctagagaatgaacttaatggcctagaatttctcctgagacagcttgaacaagtgcaggaaggcgatatcccatctttcttgtcagaaactggctatgtttcaaagcaggaaatagaatctgctttgatgaaggtaacacaatctttaagaaagacaaaaggcgaaccaaagggtgatcaagctgaaattgaagagaagaatgatcctcttacaagtgaaaagttcccccttattgatatccctgacaacatgctgactgcagagcaggtatgcttttatgtaccaagtgcttattcctccagccattttgcagtgtctatcgtttcttatagaataatacatatgtacttcgtatctctatacatccagaggtctcaactctcttatttatgttcttttggcagctaaaagagaagagaaagcaattgtttcttaagaccacatctgaaggtcggcaacgagctaaacaaaagcgtcatgaagaagaattggaacgcgaaagaagaaatcaagaagatgaagtaaaacgcttgtatgtgcttagacttgatttatatgcttcagtttaggaacaactctttttcttagtatcaaaactttaattaatggacgaggagtgctctttatctctatcttctttacacgtgagtaataaaggaataaaccatttatatcttaatattatgttcgtattaagattcatgtgctaaacaataaaaataagatctttttcaaaaaaaagaacaataaaaataagaagcattgcttgcacaacattgtatactcatcatttgttcatttaattgttttagttttttcttaataatgtagagaaaatccagagctttatgtagagcagttgcaagtcaaatacaaagaactatgtgagaaagttgagcagagaaagcgactgaagacaaatggaggacctacgaatggaaacaatatatctggaggcgttggtcgtggtgagaggttgagtgctactcagagagagaggatgcgtcttttaacaacagcagcctttgatcgtggtaaaggtgaagatacatttggcgccaaagatgaggactggcaactgtataaactgatgagcaaagataacgatgacgaggatgaagggccaaacgaggatgaatccgagctagctcgtttatcttccaggctccaggttagtttatctagtttattggaacagtaactcatgacacacttgtatgttttattctcatcaataatttaagtaataatatactactgcggcaggaagtagacccaacttttgtcccaaagttagatgttggaacttcacaatctactgaagttccacggttgcgtcctctcactaaagaagattttcaaattgtttttggagttgaaaggttccgatgtcctgagatcttatttcgtcccaattggattgggattgatcaggcaggtctagatgagatggctggagtctctataaggaggttgccttcacacgaccaggagctagagtcgagactgaccagttcgatatttgtaactgggggaagttgtctttttcccggtataaatgagcgcttggaagctggaatacggatgatcaggccttgtggttctccgataaaggttgtgaaagcgttggatccaattcttgatgcatggaggggagcttctgcgtatgctgcttcatctcagttcttcacccaaacttttagtaagatggactattatgagaagggtgaagattggcttcgtgggtatgaattgcgatatacattatgatctgtagcttaattattttattttcttttttttttttttgtgtagcttaatttattaggtacatctttactgaagttttttaggattcttacatgacattgtagcatcatttgtatagactttagtgggtttggtcgttatccttcctattctgtattcctttaaaaatggtgctaggtctgcggccatatttgtttgattctattctaagctaaaaaggaaaagccctcaaggcaagatttatagtgttagtaacatcattattattattattattnnnnnnnnnnnnnnnnnnnnnnnnattattattattattattttatcaagaagaaagaaccttcattaatccaacaaattatacacccgcgaaagctctctaacaaggcaagagaactccaaaaaaaaaaaaaaaaaactcaccaaaaaacaactgctagttacgtatcaatctctttacagaaacatccactatagactttttcttattcaaaatcctgtataatctataactcacatcccttttaatatcatttacaactctattgactgttttataatgaagctcaaaaattcatctattcctattgactcaaagatgataaaccactgctgccaatattaaaatacagcactttcggattaaactaggggctgggtactcagttgttccagctgctgaaactcaacgaccaaatggaaaaactagctcaactaaagatagaatccaccacattgtgagagaggcaccattcaaaaaagaggtgactgactctcatcagagctgtcacaaactgggcaatttagagtgctagatcaatgtgaaacctgcttaacagtttgccaaagtatgaaacaatgtttaggcacatttaaaccacaccaaacatctctattatagcacactggaggctgagtgatagaggaaaaatataattttgaagctttgaatttacttttactgcctgcaggttggatctcttcttgcgtgaatttttgtcgaactttgcaaagcttttttcaataccaactcgtgtctggtttaactttgtaagaccagaagctacccccctttaaatagatctcattgatccatttaacccacaacaactctttgttctccaagatattctaaacaaacttggcaagcattacttgattccatttagaagcatccttgaaacaaatgcctccaaaagctttagggagacacacttgatcccaagaggtcaaatggattttgttacggttgccattcataccccacaagaacccttgacaaatttttttaatctcttctatgactttcggaggtagcagaaaaatactcatccaataattttgaagactaagaagtgaggagtgcattaattgaattttacctacaaaagacaggtgtttgtttgtccagaacacgagctttttcttcatctatttaaagataataccatagtcatctagcttccatttcgtagatgaagagggacccctaaatatttaaggggagaggcaccttgggcaagcttgataatacaggcaaggtcctttttttcctcatgagcaactccaccaatataaatttgagacttttgaaggttgagtttgagccccgagaaattgctaaaatcatcaagagcctcctttataactttaacatagtttcaaatatttacaagccggatgatacctaaagttcttatcttgggcagcctgttggagaatcctagaaagatattccatcacaaggataaaaattaatggagatatcgtaggcctttctctcctttgaagactccttgaattctgccattaattaagaggaaataagaagtattctcaatacaaaccattatccaacttatagattttgaaggaaagcagagagctttcaagagattttcaatgaacttctagttgacagtgtcataggcttttcgaagatcaatatttatcgagcatttaggagaaatgttcttcctactatagctactcaagatgtcttagagaataaggatattatggcctatggaacgaccttgaaaaaaagctcctttatgctattgcacaatttgagggaggaccttggcaagtcttaaacataaaagcttggagatgcacttgtacagagtattgtagcacgcaattggccgattaataactgctgaagtaggacaatcaaccttaggtatcaaggtgatggctgtactacgaagctcctgggggatttgattagtgttaaaaaaatgaccaatggctgagcaaatttccttcccacctcaggtcagatttttttgtaaaacccagacccaaagccgtctggacctagcaatttgttgctaggtatactgaataaagcttttttaatctccttttgtgcaaaaggcttcaagagagtaagttgtttgtcaagtgagagcactggacccatggctatgcagtttttttccacctttaaagaagagtattcgagttccacatgacactttgaaagtgaccaagaaaatgagcaactactttagagaaattatccaccaccgtgccattaccatctgttaaagtagcaatgtgattttcatctttcctcttttttaaacaagcatgaaaaaaagacagtgttatcgtcatctttttgcacccagttgattttactcctctgcctcaaaaatttatgataccttttttcctaagtttgaaagtaaatagctacttttttctcctcctcctgataattgatgtcactcggttcgcctgggcattgagttgggactttttataattatctttggctttctcaaagttctcccaatatcaccaatgaattgcctattaaacactttcagcttatgttaaggctcattgtcttcaggtaaatttctttaagacccttgtcggctataagctttctctagctatttgtcacagtaagattgaactccggatgatcagactagaaattaaagtatctaaaggcttttacccctattttttcagtgacacaagaagccacaacacacaagcagtaatctgaggttgtctcccaagtaaaattagctgctgattgagaaaacttgtcaatccaatcttcattaggaaaaatatgatctattctcgaataaatcctagcttgcccctcttgattgttagtccaagtatagtttgaa

SEQ ID NO: 36717 - DNA, 6070 bp, Cannabis sativa
cttggcaaatcatgatagtatgggcaatgaatcttccttaattttatgaagcccccccccccctgattttgagctacaatgtctgggagaataagtttcaatctactacaaatcattttagttgcaactttgtaaacgacattgtaacttaagcaatgggtctatagtcacttacaacatttggacacttactcttaggtacaagtgtgataattatcgaatttaactacttgagcagctggcctgtgtggaggaaagaggtgacagcttcaaacacatcatgcctgatcaagtcccaattatcttgataaaaagaattgctatacccatctggcccaggtgcctttgctgctggaatgctgaaaatagcttcttttacttcatccattgtgtaatgagcagtgagtatttgaacatgatgatatgtgatacatgccccatttctaattagtttggagtctacagcccttttgttcatcatcttagaacccagcaaattctgatagaactctagaaatgccttagttatgccctcaggatcttctaatttgttaccagtagcatctaaaatggatagaattctattgtgacaccgtctctctcggatacttgaatgaaacagagccaagttttcatcaccatcaattaccaatttatcctagacttctgttgtaagaaagaacaataatctttatggattttaacataccgttcccttgcctcctgttctctattctgcaaatccatatctaacgggttttggtgaagaatcccttgtataacttctaaatcctgcttagccttcctctctgctgcctgaatatcaaagtagttaactttatttagttctctaaagaaaactttcaatgcctttagcttcgagacaacttaaaatatttttgttcctaacaccttttgctctcagagtatcttaacttcatgatgataacttgggtgcgaagtccacatgcgaaagtatttaaatggttttttcccacaagaaaaatcaggatagatatttaatattgctggggtatgatcaaaggctccctcattgagaaaaatagctccagcccttgtaaatagatccatatccaagattgattagctaacacacgattgatcttggaatataaatattttttttttgaaaacagaatataaataactttaaatatatataaatgtaattaaattagatcgatttttaattggatttttaattcaacttttaatatgtatgaaatcaaaaacatgctcaaaagtaagataaaacagagaaaattttggaagaaaaaaaaaattaaatctaaaatattctgttaattgctatcggctttgaatactagctagccaatcttcaatcgtcttacaattatgattaaaaaagtgtagagagggcagtgtcatatattggttttattatatcactagatatatagtttaaggtagttctatagtagtgaacaccctataagggttagtatatatggtggatactctattgttattggttgaaaaagtagtacacattacaaatggtggggtgtcacaaactttatatttaattaagagtgtttggtaatactattttaattaattgtttttattagaaaagtaaaaatatttttcaaaaacatatgttctataaaattattttcactttttaattttttatttgagaaaacaaaataaaaccactttcaaaaaaattttaaacaatttttttcttaattaatattttagactcctaccccaacctcgaccttaggatgcaaaccctaaccttggccaataccctgaccccaacccagacctcgattggaatccagcccacccagacccagacctgactccgaaccccagattagggcccggacccagaccctgaactaattagacctagacttgaccccaaactcgcacttgaaccctgaccttagaccctaaactgggccccgacctcagaccccggaccacgaaccaaggaccccggacctagactgggcttatcgaacctagatccgactttaatgaaattaacaaataaaaataaaaacaaaatttacaaaacagacatttattttttatttttaaaattgaaaaataaaagtagttatagaacacatttttgtttttcaaaagcataagttaaaaaaaaaaaacacttctatttttatgattaaaaaaattaaaaaataaaaatatttccaaactttaccttatcttttttttttcaataatttgatttaaaaacttaaaatagcttattctatgatttattgcatttaggcttagactttctccaactcaaaattccatgtttttaatatatacttcttgtacaaaattcttaaataaataaaaagtaattattgtaattttgagaaaatgtggaagaaattaactccatcttcttcaagaaactcataaacaaagtatccatttgaatgggggtttcttcttgttgttgttttattactgctgttgacaagccaaaggctaggtaatattatatcataacaagtgttaaacaaaataacaacccattttctagaaagaagaaaaaaataattttttttttcaaagagacaaagtaaattcgaaaatttctcacagaatattattcttaactaaatcatgatatttccataaatagattttgtgttaccttagaaaatattatcactgagattgaagatgaaattagtttcgaattaaattgtttcagttagtgcagttaattcaatatgtaagtgattactgcttttgatgtcttcttttttatttttatttttcctttatttggttctgtgtgagtggttcaatcttcaatggtttaatttagttaatttagaggtttgaagattgtttataaaaattactattcattaattcatgtttggattcgctcatagaggtattttctcttgagagggagggatcaaatggtctagtcagttacagggatagtttttctgttgcgtaggatcatgattagaaagaccaattaagaaataaacaccaataaaatatttctattagggtgtccacttgttcaacctttttaagagatctactataaataattcttataacttatacggttaattgcgtatataaaatagtattaaactcgtaactagtattagaaacagaagaccacatatgaacaacactaaataaaaaactttattataaaagaataataatatagctagcatttttcaaaaataaaaataaataaataatatagctagctatagccataggtaggcttatacatataaagagatttataagtatgcattcacactaaggagttgaccattttatgtagagaacgttgaaaaggtcttttgtactatcaataataatggactataaatatatccttctttttaaaatgtgagaatgaaaatttcataggaagacatgttttgtgctatgatcatgtacagctcttaatcacaacacatatcattatgatatatcagcttttgagctatttaattagggactgaataaacatatatctttataaaaatcaactaataattattagattattattttgtataaataaagtctatggcgtacgttattgcctgcatcacatcattcccattacttccttcatcttctaattaattaagacagacatagaattaagacattctttatataaatattaatgtagccattaagggaagcaacctgacgatttatctatgttaatgtattcttgtatagaggcaatcaaaatattttaattagctaaaatatataatatgaatgatttactctcgactaattaacaaggaaaaatattgcttcattatcataattaaatatctcaacttgattagtttttctttttttatctatttgctagtcctcaattaattatgagaaatagatttggttccagctataggcaatggcattgaattaataatggggggcattaatttttaagacaaaaaaaaaagttactaaattggctgaatagtttatacaattattattaggacccaaaaaccaggaaaatgatatatatagtgacaagaaaagaagaaaattcaacagaaaatcttacgtatacaatgaaaagagttgttgttgtctatatatttggagtgaggaactttatatgtggaagcatatcggcaaggatctaatgtcaaacaattattagcagcatttaattttccttgtaaatataataaaattataattatttgattaagactccttaccctattcaattaaggtttaatcaattaggctagctctgaaggaggtatagtagtattcatggatatagccacaatatacgtcccaaaaaatgtttgctatgactcatgagctaaactccacacaaagattgtgacatcaaaacaaaatctaaacataacgaacaaaaattatatggcatatcctaattatggataaggaacactaatcgatacccaattatatatatatactgaatgtttctggcattatacatacatacatatatatatattattttttttctagcatttaatttcatacctcatatgcaacttataaacattatgtcttgtttgttactatttgtttagtgaaaaaataatattaagttgaaggattcttcgcgatgtaacctttttttttttaaagtgtgtttagttgaaacattaaagtacttgttttcttcaaaaaatttgtgaatttatagacttcatctattaatatttcagaagatttacttgcttttttttttcctattatatattcatcattgagaaatgcccactttgccaataattaagagaggtatacatatatattgggagtttcataagctgagaatatgcacatgatagtttgtattattatgtttgtgagagtaaggacaacctcatcacttggcccttatcataagttacgtgtcaaaaatgaatatatatatatatattttttttctccaccatgaaattttttcaagacatgattggaacggtaaaaatgtataatttgtcccattacttagtgttatcatcttttaagtttttttcctagctagctgttcaatttaggtgaagtgactcagtacataggagatcccacaaatcttgccaaatcacacaaaaaattgtacctttaaactaaatgggttttgagtcccgacaattttcataaatagtacaagactacatgtgattttgttaacatgttcaataaatggttgtgttgtgagccgttaaaatatttgatgagatgttaattataaagcttacgtatgattttgagatatgatatcaaaaacattaattatatatatacatataaatatgtatgtaactgtacacagttgtacttgttagaagactgtttgagaaattatagtatggagtctcaaggtttttatggtgataaagaaagaagagcagaaataatttgtaaagagattctgctaccttacattgtcggactgaaaatgaaataacagcaatagagacgagagattacgataagctgttttcatgggccctcttttcatgatctttatccattcccctcttttcttttcttttttcttttagaaaattactgtttttttttccacccttcatattcaaaccattattattattattattaatattattactatttgcctaaaaccagtacagcaaaacatagcagaaaagatgaaatgcataggccaatattgggaaaggcatatgctataagataaaatgtgatgtgttatgttattgattaatgtctggtatagttttcttaagaattctctcattcttgtagcaaaagcaacctcactaatttgggcatgaaatggacttggcacatgacatccttatcttagtctcactcacatttgtcctgttggtagataccaggcccagtaccaaccaaaccgaaaagccttttatttttgccttgatccatttggatttcatggcctaccattttaattacatccattatatattgaaaatggtcaatttaatttggaattattttacaaatacacgaaaacaacaaaaaatttacaaaa

SEQ ID NO: 36718 - DNA, 8379 bp, Cannabis sativa
  modified_base (4954)..(4954): a, c, t, g, unknown or other
tttatttatttatttttttttgtgaaaaggcaatgatataactttgaaaattatttagattcaatttatcttatttttcaaaattctatgtccaaaaaaataaaatacaaccgtcgaaataattaaaaaattcctttcaaacaaaataattagaaaatcttgttttgttaaaaaattataaaatgtctctgttagttaaggaaatatttattagttatgaagattggtatgttactggcatgacctataaacttaaggtagtttccttaagtttactaaacaaagatgttaaaggatttttttttttcaattatataaagaagtttactagattgttctccataaaaatctcttgttaatcacagtttcaaaaaacataaaagtaaaaaaccaaaacctacaccgccacttctaatttagaaccgacacgtgtcactgaaggaacaggcaaaagaaggtcggtaagaatcacggtttccttttccaatagggaggtgaagggtgttggaacacgtggcagaattcattaaggcaagcagatctgatgagatctaaaagtccaaaacagtcccgtgaagctagccgcgttagattgatattttcattttcacccagactcaacccaactcaaccccctcacttgagggcaaatgacccgggcccacccacagtataccaaaatactacacaaaatatcaaaccaaaacaaccccaaataccatttggcccatttccattttacagtattttagtcttactcacatataaaatacgactccttttatttactgtactacctattcattacaaagtaaaaatcattctaacactcccctaataattgacttccaagtttcctctttcatttactcatattcacatataaatactactcattattaccaactcgttattaactttttttttttttatttctctttttaaaattatttattttggaaacggccaaagaccaataaaagcttttttgtatatatagaacattatatgcctctctcccctttgataaagtgaagctacggtcagtagttccactttgtctctcaggctcagttttcgccggaactgtttcggagaagatttaaattaagtaaataaaaataaaatcttttggactccgaacagaatctaaacgtaagtgtattattctcttttctgtagtttttaggaatttcacagatttggggattcttcttttcttagagtttcgagccaagtttttgagtagtctttgggttgcgttttatggatccgaatttcctggaaaatgaactttttcttcttattaggtagattacatatgtttagaaaaatctcagtgttattttctgcgaaatttggtaactatttgaattagttgacttaatattgtgtttttattttctttttcctctttccagaaagaagaaaggaagtcttttttgctgaaccattttttatacattagaaagattaaaaaaggaaaaagaaaagaagaggtggaatcgaatggcggtgaaggtagctacaactggtttgcaatggccgattcttcctcattctccatcttcttcacaaacgctggcctctgccgctatatattctccttcttctaagcgccgaagccgtggagacggagccacgctcgtgtgccggcacgtgcgaaaattgcaacgctcctccctgttcgggactacgtcgattaggctacaccgttcttggtcatgtgagatgcccaaatctgaattccgtactattcggagagcctctaccgccagcttagagtcattctccgacgaagatttctcgaagaacattcaagaattggcgcttagattccaactctcagatgacgacgacgttgacgatgaaagcacgggcttcttcagttctttgtcagaactcgattccgagcgtaatagtttcagttatgaaggttctgtaatgaagagcagcctcaaattcgtagataaccggactatgtttccaatggagccgccgtggccgggaattaaacaggagctgccagattggaccatgaaggacgaaattattccggctagtatcgagcggaaggcgaacagcgtcgatctgcctcactcgcttcgaattataaagagaaagatacaatggcaagatagttttagggaagctggtgaatcggcttattgttctgtgaaaaaggccttttcttccatggtgttcataataagagagctccatagttacactctacaaatgagtggacttatctactgcgaagagttacaggacgttctaagccgggtccagaaggagatgcacgcttctttcgtgtggctattccaacaagtgttctctcacacgccgaccttgatggtctacgtgatgattcttttggcgaatttcacagtttattctatgggtcatgacactgcgtttgcggctgcagtttctccgtatggatcttactcaactgcaatggaggctgctttgattgacgcgcatgacaatagccatcatggcaagtttgattcttcgtcagttaagtcgttttcagtgtcgtccggtggtagaacaacatcaactgggggaaataatggcggtggtggggatagtcggccggttgctagtggaaccgacggggacggtggatttaacgattctgatcagtttcggggtgttttgcctgatggggcttctcaaatgtcctcatttgggactagggaagctgcagcagcagggtcctctgtttcagaccaggagaccagagaagaagagttggcattatggggttctattgtggacgaagccgcttctttcagagacgaagctttggaccaacaaacaattcggaagttcgtttctccggtgaacgcgaagattgaatccgataattatgaggagtttgtcagaaccgatctcgtttaccaaatgggtttatctcagaatcccagcaatcctctcctcttggccaattacgctcaattcctttacctcgttgctcatgactacgacaggtactgtttctacttcattcaaattttctaatctttttatttgttttcacattaaaaaaaaagtttaagggctgctttattttggtttagttgtacaagtatatcttgtaataactcattataagataatcctggtctttttacagtgttttacacctaaattagctgaatagtctcctatagccgaatagtcctgtgttgaataactttaatatgatccatctttgtcgctgtactcaaattgtggttaggctgcaactttatgataacgatttgtgtggtatagggcctataggcaaataaaatcatgaagttcgaagaaaataaattaactttttgatatggtcatgtgctctatgtgtcccacatacgaaaaaaaatctttcatctagtgtatgtaaaggcttagagaattagtcaaataatttattttgacttatatagttgagtagaatgataacaattgattaactaaactaaacttaaacttaaacttaaacttaaactacacacatactgattactgactttattatatgattttttatataatggtacagagcagaagagtactttaagaaggcaactggtgtggagccaccagacgccgaggcttatgacaagtacgcaacgttcttatggagagcccgaaacaacttatgggctgccgaagagaccttcttggaggccattaatgtcgaccctgccaactcttactacgctgctaactacgctcacttcctttggaacactggtggcgaagacacctgtttccctctcacctctgatgataccaatgaagattgttaaaaataaaaataaaaaaaatagataaatgataaattgcctgtcagtgtcgaatctaccacaccccaccttatttttctcttgaaattggtcacaaataaaattcaaggaaaaaaaaaatagaaaattagcttttattttaggggatatatgacatggcttttttttttttgttaattatttaaatttttatgtttttaaaattttggccaagggaagaatgtggatggtcacctggccgtagaatggggctatgtacatgatgcggctacaaatcggcagtgtttggctctgcgtgtctagtgattagtactctcgagatctactaccaccgcctgggacttgggttatgctttttgcacagattttttttttttgttttgttttggtagacacgaacacatggcaaatgtaattagctttttttgttaatataatgccatttcagattaaatgaaaaaggaaaaacttacaccatctccaatctattttcatgttttacattatttatacactatttatttatacttaatactatttttatacactatttattcactgtttttatttatttttagtttcatcttcgacttaatactttgaattttaattacactaacaaagtattctcatatatatatataataatcttttcattttatcaattaaatttaaataattatttagatttaatatacattttattaattaagtcataattacaaaataaattacactttattataatgattaactgtttcattctaaagcagtcaccttcgagaaattgcaaataatatcgatctctaataattaaatcacaatattagtttattttgtatatgtttaagagcacttacatcagtttcctattctatatcttttaaaatagttatgaaaattttattttctttatgttaccttatacattacattcacattgtactataaataagattttttatattttcttctatagttgaattagtaaaaatgaatgaaattggacaaacaggagtgttactgtcaacctcctgttacaacctcttagtcaaccttcacactcaaaaacacatgtctgaatatttcttttcaatttttttttacagcggtgttcattatacttacaacatcatctctgtaaattnttaaaaaatttcgaatagtttaccatgctgaaaatatgtttgaagttttttgaacacgcgtggtatattagaatatcaagaactctatttttgatactgtaaactatgcagaattttaaaaaatttatagggatgatactgtaattataacgaataccgctatgaaaaaaaaaattagcatatgattttaaacgtggaggtcgactaagaggttgtaattaacactcttcttggacaaaagtccttaaatccaacaatctcaatacttcagggaaaatttaacgactagaaaagttaatggggcatgatttggtacatgtaaaaatttaggggacaaaaatcctaattagccttagttatttgaaggttcttggagatggcctaatgtacggtagaagtcttactctgcaatcgttatttatgttgagaaaaaagcacgtgttatttctgcaagaattgctttatattatatactagtaaatgtaaccgtgttttgggcgactttgtaatagaataaaaagtaatttgcagtataaatacttaaattttatgccgagtagcagataagtatacctacctaagtcatttttttgacggtaaaaataccttctgtcactagtgtggaactttcataggtacttggccgttaaatgtcatgtcagtatccacgtgtcactcgttcattagttcatgtcattaattttttatttattatttaaatttttaaaaataattttaaaattataaaaaataaacaaaaaaaataaatataatcgttttttatctttaattctgtatatattatctaaaaattaaataaaaattatttttaaaataaaaaaaattacaaaattatcaaacacataaacttaaaaattaatctgttaaaaaatagttgctgcaaaaaataaaaaggaacgaaattactgaataatcctatgttaataaaaaaaatccaacaaagaggacttgttttgttaaacacaaaaacttaaaattaaattaaatacaaaattaaattcaaaacttaaaaattctgagaacattaaaatccctaaaccctaaagtcacgttcttctcccccttcactttcacgaacaagaactgatttcatgttcttctctcttctgcgattcaaggggtcaacttcatcccttatcgtattctgagaaccaaggggtcatcgttcttctccctcatcggcgtagacctgcgaacactcctaaaacatttttaaacaatgtatgactttttattaagttaataaaaaataatatgaaaatttgaaactctcaaaaaaaaaaaaaaaaaaaaagtaaaaagacattgaaataaacataagatgtcacctcatttctgttaaactttcctttataatttttatttttttaattatataatattttcttaagtttttaattattattttcatacataaaatagttttttccactacaaaattattcacttgaaataaaaaaaaattatttaacttataatttatcaactctttatatatgaactcaatatataatatatagctataattaaataaatataaatatataaataatatattatttttttttgaaaagaaaataatatattagttgaactacaaaatttttataactaattaggtaatatattaatcaatcatccgaaaaataagttaaaattaatattgagtcatattaaaataaaaaaataaaatttttatttatagatttacacctaagtatttttagacgacttttaaataatgaccttttctttaggaaaacttaaagtttgtaagaatacattgaaaaaaaaaaaataatataccacctacttacttttaattatatagattatattagattatattttctttttaaaaaaaaaaaaaatagattttcttctagctaggaaataggaatctttcgatctcctggaaattagtggtttatttcgcccagtgaccgaaaaagagtcaaaagattcagcataatacacacaaaatatgctgcgaattacaagcttaaaaagcagatactttatagtttttaagtatgcaatattatgcatgagttgcaatatataatataaagatttaaaagaataagagggaacgtttttattgaatattgaaagaaagaaaaaaattacatggatagcactaaaaggagcactagattgggaatctaaatacataactaatgaattagtatatgtatcttctttgtaatgaagaacgtgttattcttttagttaaataatatataaaatgaaatctaagtaatacaacgtgttgtacttttttatattttccaaaataaatagatagatgttaaggttaagcaactaggccttgcaacagctggatttaatttaatatatatcaacatttatattttatgaggactaagcaaaataaatttatatattttttaaaaataaaataaataaagaaaatcattttcaatctttaaaaggactgtttgtacagtggaataaatcaagcatatgctgtcaggattcttctgattggttggttgtacacgaccgtgcaatacatatctttttctttcttggaatacacctttgtgataattcaatcctaaattattggactcaaatttttatgttttcttctaaatggcttttcgttcttaattttactcttttctttttcttttggttaaataagaaaaaaaaaaaaaaaagtctaaactcaagtgtcaactctcaactaattggatttagacttttttatttttgtgttatttataatcacatatatgaaacataaaaacatggcaagcacatgggaccaaagatagcataatacataaggggtccgtaatttggtgtagccaagcagaaaatgacgattttttcacgtgaaaaagttacttataatgactaacctcttcaccaagtctaaattcattattattattttattttttcaagtgggtgaatatttcacaattatttttggtatttaagtcgcttgtattgcacaaactagaaaattatacaaaagctgagatatacctccaacctcacttttacattctcaaacaatttgtgaaataaccaccccaactcttggtggctaataccatttaattctgcagataaaattccattttagaaattatattgaatttttctaattatatacatcactaccatatcccaataagctacattcttagccctccaaatattataaacaagagcccaaattacttacccaatacactccttttttaaactcgttcaacttgcttctctttatttaagaacgtacaccttcagctgaagaaaatctggtgtaaatatgaagccaaatttaattcttgataaaaatatagacacaacttgttgaaaaagctcttagcaaaaaaaaaaaaaaaaaaaacccctttttaata

SEQ ID NO: 36719 - DNA, 1886 bp, Cannabis sativa
actcagaaattctcattcactttctctttctctcttcatctttttcttctttcttctcatctactttatattatattatattattttataacaattgataattaatttaacagggagacttacatattttttcttcgttggaaattatgcttatatattttaattgaaaattataaagattgaaatatatatgagatttgatattcattgatagttgacaccaacatttctcactcaatatagttatatttattccactcaaaaacaaaaataaatagttatatttaaaagcagcttgtagtgtaaatgtaatgtgttcatcaacagttgtggggctttgattttgatagattaaattgataggtgtgtggtgtattggaaattgctttgtgattggggaattagatatattatatataaaaatagtaattttatctttgttatgtatttatgcaaccgacttaatctttcagatttggtgtcccatatttatgatacatgattttcttgctattgtgtgttgaaactttcttctttttttttttaatttttattattattattatatttaatgattacgttttgtttgttttggtcgacaataataataataataataatacccatattgttcaaaaaagaaaaactctactcataaattttgatgtttttacttactcatctctaaattgagcaattttctacttgttcaaactttatataatattcgtatactatgtaaacattcaattcaaatctatacgcatatgctacctgatacaaatgtataaataaagaatcttaatattataaaaaattccttgataatacttcgaagagaataaaaactcacacatagatgtaatttattgatagagattatcttaattcatttggtagaaatgatttttttaggtgtaataactttttaagaaaacaaaactaagagtttctatagtttactctcttaattcttgatgggagaaaatgagaataagtgattcttatttattgaggatcactaccaatatatataaactataggtaatagtttttctctctttctaacctgatctccctctcgctaattttcaactctcacagtttgtaattgagagtacaagtatttaagatggccaacatgactcaagaacgagcttaagtaacaacttaactaaaataaaaaaaataaaaaaaaaaaaaggactaaagtgattaactaatacatatgagctcaattttaatcccacacatagttattaagactgaaattaaaaagttagttaggttgttatttttctgttagagttagtagtaggtgtggttagctatttattgtaacaaattgtaactctttttagttacaatttgtataaatatcttattgtgtaattcattcgttactatcgctgagaaatgtttttattcatttctttctgcattatctaactaatatagtatcagggtttcgttgatcataagtctgattacttttttttcactattttctttttttttttttttttgattttttgtgttcatagtccatggaggaggtgtccaaatacgaaagagaagctaaaaataataaagaattaattaattaggaggaaaagaaataaaaattttggaaactggtaaaacggtccactttacataaatttctataaacagaagttatctttatagaatgattcaattttcaattattcttaagcaaaaacgatattaaaaatcaaaagaacctttattgttgtgacaaaaatttatctcttatattgcagtaactcttatgttgtggacattgtcccacatagaataaatgatagagaattgagccatatataagagcatgggctactctactcattgccaattgattttga

SEQ ID NO: 36720 - DNA, 13809 bp, Cannabis sativa
  modified_base (70)..(75): a, c, t, g, unknown or other
  modified_base (553)..(553): a, c, t, g, unknown or other
  modified_base (3161)..(3177): a, c, t, g, unknown or other
  modified_base (13135)..(13143): a, c, t, g, unknown or other
aaggtgcaagtgaagaaaataagcacacatgataaccttgcaggtattttcactaaaagtgtaactagannnnnntttaggcactgtttaaacttgttgtgcattcaggacaattaatgtccccactcatttcttttggatcagagtttaagtgagtctaatcaggtaggtggaattgttgggattaaactcacttaacctatcaagtcagtatgtccatccatttgctcatcagatgaatctgaagaaagccgctgctatctataacagttgtctttaataccaacctaaagggaaccccaccaacaattatacataggtgttcctctattcacaaagagagttctgagttctgagtgctgatctttaatctccaaaagctcatactttagcttcagtttagagagagagagagagtccaagatcatagtgagtgtgtgtggagggatgtaatgggagtatcactcttgaagtgatttccctcaatgtgagacatttttttgtaatactttactgtgttgagttgtaatcttgggctcattctattgtgtantactgactattcctattcaataaagatccatcattcatccattttcgagctaaattttctttatctttttttttttcaattaagttcaagttatggttttgtgattagttttagttttgaattgtgtttcttagacattgttactgccgtaacaacctattttaagggtgagaattcaccacagacatatcgagctctcatcaagctcaacgcttatacactgtacaaacactaccaagattttatcaaaccgaccgagcattaatggaaaaaaaattgcaaaaaaatgtatagattaaactcaagtcaaaatcaaacatatttgaacaaaaaatccaaaccaagccattaatgtatatcaaactctaaaactaaaaactaaaagcaacatatttggggttcaatatttagcttcggggatgaaggaggaggcgagggttccactcgtcgtcattgcagggtttgggactcgttgcaagcatcatgtgtgaggagtcaaggtttagggatttcgttcaacaaatacagtgagaaaaggagagaatgtgaaaagtttagagagaaagtgagataaattatgagaagtattgtgaacaacaagatacattagcatattttttgagtaatattatatgggattttttttgtcactaggtggaagagtaagtataaaaactcaaatttagcatgtatcaaatatctgaaaagtatgcttgagggaagagatttccaattgttaatttgaggaccatttttccaaattttatattaatgggaatatttttgcaatacatagaaactcaaatttaccctttaaaatcacagcagcacttatttttttttctgcatacaaaattagtttaatagcaatgagtaaatcacacacaaaattcacacacttatatggtaaattatttttaataagtaggatccatcttaaatgaaaataattgtttgaaattatttgttacataagtgtatattaagtttgtgtgtgatttatgtgtgtatatattataatacaataaaaaacgggttatatctaaaatttccacttcggtaacgaccctgttcgggctattgattagattataagatcatagtacagagtgcatgagaatatataatgtatggtagtacagccatgggaaccatatcagtaaagccaaaatacaagcctaagtccattttcatcttctaagatgataagaagtcaacaatagaaactaggcatataagagaactatattgaaaaaaaaaaagttatgctttcccatcgagaaccttatagataagaaaggctttaattaaattgcctttagggatggggaacaagcaatagagtctctaaatataataattaaaggatttagttaagatcatcactcactggcatgtttaaaggacagtgaatggtgtggtacccattttagcattttatgttccactcatctgcatcaattgcagcggagacttgagcaacttctttagcgagttgactatgctaccgaaagatggacgttgactaggatcactgccaaataataaaggaaattcacattaagcaagcaaaataagtgacttaggaagatactaattccttcctctctatgtgtgtatactatttttctttcaaaggaaggaaaagtaatgaaattggctaaagcatctaaagcctagaagaagactcagttcaaacttcaggacgtttcatattcaaccacttcgaacttatgagctagtgctgggacttggtcattttgtaacagttattaagaaaaataatatatgtatcaagaacacaacatgcaaatctgaaacgatataagaagcataaaaataaaggacaaaacaaataggcgaagctttagctatatgccttcacccggtttatctacttttaacagaacaagcattaacataaattgacttgtgagattctgtagacttactcagcccagcaagactccatgagggaagccaacaatggcgaagtattaggtgggatggctagccttctgttctgaaaagcgacagctccgactacctgaaaaatggcaattattaactcaattagttttaagagaaaattcttacttttctttggtccaaaccaaaaacaagaaggagataggaggaggtttggaattcacacctaaagaaaactaatgtaattattatggtacctgggcaggactaagtccattccaaggttgctgcatggtcacaagctcccacagaatcaccccaaaactataaacatcagacttctcattggagggctctcctcgaaggaattccggagccatccactcaggctgaaaagaaaagcaagagagttacatgttgaatgatgcacttgccaagtaaaatctcaacctgcaaaattttgatggagatatttgactacatggagagaccaaaaataagctagcatttatgctggaaaggaaatacagtcacaaagtttcttctcattttatgttttaaacaaaattacataataagaataggttttaactggtcctatatatgcttctcctaagagagaagtttagtaaacaagatcacatataaaatgatgatcacctctctctctctctctctnnnnnnnnnnnnnnnnntctctctctctctctcaattctttgtcacaactcttgcatgaaaatataggattggggttaatatcctctacaaggaccagtggatgatgacatctataatattacgttcaacacatttatagcaatataaacaagatccttttaatacaagttagcaaaagataccaaactttaatcaaactcaaaagtacccaaaaataaacgctataaatatatagatagcctaaaagaaaaagacaattgaataacagaaaataaaaattgaggtagttatttaacagataaaatacaatcgaaaataaaaacaacaaaacaatatttttttagggtactgaattacaatacagtaagaaaaaaatagaagaaaacatagagagaagcttactgtcccagcaacagacttcgatgatataaatgtgtttgctttaaatctagacagcccaaagtcacagacctgcaataaaaccattaaatcaggtgactagtcgcaaagggaacttctctaaccaaaccttaagactcaaaaaagaaaagaaaaaaacaaaaacaaaatacagtgcctaaaagcaatctaatgttaccttaactgtccaatttttatcaaccaacaaatttggagatttgagatcccaatgcactacaggtgggcttaaacaatgcaaataattgatacccttggcctgcatccatattagattatgaggtgttgttaacataaacagacaaacgaggcaatagtaataataattaataactaatacaaaccacatcaagcgccatgcgtaatcgtcgcctttgatccataatttcaccagaagctggcctgtgtataaggcgaaataggctacccctgtagaacaccgaaattgtacagattagcgcaaataaacgttcaagaatactctataagaggaagctattgtgaactattactatttcataatgttttcaccaaatgaacaaaccaaaaatatgaaactgcaaataaccttggcaaatattcagttactattgacaaatgtggacgcttcgtaactgcacccatgaaaagaactacatttggatgacgaacgcgtttcattattgcaacctgacatgttgtgaaagacaattcaagtcgtagccacatgacagagataaattgacaatgaaacccaaaaaaaatcatttgaatcaggaggacattacaatcacagcaatacagcaatccacatgaactgtcaacattaaaatggactatattacaagattattcaagctagcacaatattgtttgcaaaattcaccaccaaacactagggcaagttttgagatcttttcaaaacaaatacttgcatgaaaaagaaaaaaaaaaaaactagtgcggtttgttcctacaatacccacaagtactcccaacttaattaaaatatgtcaaggagctgagtggagtttccaatatcatctttccatagccaaataaatatatattttatgctcacccccaatctggaagtggaaataagtaagataagagatcaaattccttcccaagtcgcatgtcataattttgtagctatgttctaaacactgaagggtactagaagggaccaatactttcaccaagtagtagcaagaatataaaacacaactcaatacaatcactgctagtattaaagtgaatttacaattagaagaatattcacacctctccccaaaaaccattcctctatttaaataaaacttactgctacttttaggcaaactttcacactcccctatacagatttaatacaagatataagtaactgtttctacaaaatatctcacttcccattgtgcctagaacaactctacactgcctcaaatctctcctgcctagtatgggaaaactgattgggggcctaacaggtacactaacacacatcaacagcaactacaagatgcagaacagaattaaaacagagataattaggctggcaaactaagagaataatgaaaataataatagaaacaaagtgagttgtagtctgaattcttatttggatttgagttcaataacaattgaaccagcgctatgatgtcatcacacagataatgaaatgtgctgccagtttcaactttctaggtttcacattgtacctctctcaaacatcgcttgagtttctcatcatgaaatcctgaccagtcatgaccttaacaatttagtgttcaactattaggttttgatacgtacctctctcaaaaactccttcagttgatcatcatgaaaatcctgaacagtcaggaccttaacggcaacatcctgcattgtggcagcagcattgatcttagcaactgaggccaatgtagcagttaaaaatgaagttgctaataatacaagatatctcaacattcaaagaaaataatttgaaagaaaaaaaaaattgtggctaaacagctttgggatggtcatctttataaaaaaagcgtccttgtattaaaaaaaataataaagagtataaagaaccactttagatttactagagcattcaataggctagacacttgtgtggatctgtataaagcagcacatcccagttaacttgcaagccaactcttagagtgtataaaggatgctctgttatgttcactaaggcagtaagtacatgattaatattgctgttcaaagataatgaaagagcatagggaaaggaaaactttaaataaggagctatcagctccaatgtgacttaaaaaagtgctagtacaagacaatgagagaaagagagagtgcaatacaagtataaaaatgaagtcacatgcacatagagaatacaggagcagtgaggctccaagagcgagtaatttgtggccatgcaagttttacctactatgggctataacatgtttgaatgaaaccaaaaatgaacaatgcttacacagaaacccattttccctcaaagtagatgctttatattatttccctcaaaagaaatggttttttgcaccaaatttagtggaagtaaacatcccaataatagagaaaaaagatggttactaaccgatccgtgccattctgcacgatgcacagtaccaaatgaccctggaagggaaaaaaaaattaacatgattacatttcagaaaagaaactaaaagcaaatctatgacagtttattttctaaaaaaagtcaaaaggatataccagcaccaacacgctccttgatatgaagttcatcccatgagatctcaagccagtccattgcaagagatggctcaagaatcaagtaccggggaatggttacacttattgcaggaaacatggcttgactttcaagttcactgtcagcctccttcgaatccgtttgtctagacaagcttgcgcttacttttgcttgcttgacactatcactgatcaattgatttcctgatttgatgaaacacatttttttatcaagtttcgatacaacaaatttgtcctaaatcaactttagaatgtatatactgatgatacagcagcatcaagaacttcaaaaactttaccctggatagatgtcatcatggagctctgagcaggacatttttcagtccctttcaactccaaggacatcagagatgatttctttacgagactgtctttcttaataagaccacatctaacacccattaaatctttgaaaaaatcactttccttaattttctgactttctgtcccacaacctgcaaacgattgaaatacaactaattttaatcagtttggaggtagttgaggaagagatgaagcagactaggataacataagtaaatgcaggctgaatagtggaccatataattttaaaacagatataaatagctagtacttcatacgagtacacacatatatgacaaggtcacaatttgaaacgcagtggtaacaatccactgctgttagaaattatgaggaaaacaaggttgtcttttaaagagagcaattacaacaggaaagaaaaataattaaaagcaaatatttgatagcttctactttcctacattcttaatttttataacttttaccaaccatatttacacaagaaacagatcctagaatatccctaggatagtgactagaatcaaggccttgtaatgactgaattttcaagaaaatacagaagtcggatgtattaaatatatcagcactattttcaactgcaccattgtgaagaaactaaatgtcataacgcattactaatatttaaccctatagtaaatgctgcattctctctgcggaataaaagtacattttcctttgtttttgactcatcattggtgatttcaagcaacaaaccaaataaacacaacatatcatagtaccgctacaatgccattacaaaggaaaaattgctgctccatttattgctcttaatggcataacattagcaggctttatttgaaaactttcgaacctacacaaatctgagttaatcttctaggcaatatgtaacttatttattagtcacaatcctaaatgtcagtcatacagcttgtgatgcactgaaacactctcaagttatgcaagtcaaatcatacccgaatatggatcttcaggagaagtgtgtgaattggtggagtgagaaccatccatgtaaggttgttgaaattctttaagatgagaaatttgtaatggtgaaggcactgaagaaagaaatcctccattgattgaggaatctggaccatgaacatttcctggttccccaactaaatcaacaacatattccctgtaaacaaatatacacacatatataaagaggctgaaagagaatgaagaggataagagagaaacacctgatcaacttctacaaaaatattgaaacagaacggtggattacaataaattgatatgtgggtaacttggtcatcatattttgaaaagtcaccgagggcattttactgttgttccagaactaattgaaatgatagatcatgcaatgtgccagtttaatttcaagcaaggctccaaattcaatcagcaaaggtaaagcctacaagaacagttataacaacaaaccttgactgcttggaatcttcaattttaacaagacaagaagatcgatgatctgccacacaatacttgcacccacgagctatcctacaaggtaaacctatgtagtctgccagtttctgcagattaaaccaaggacgtatttagtattatcataacaagtaacacctcatatacaaatgaacatacactaatctgcaatgcacaagcaaagcagtttaacataaactaaccagtaatgtagttgaaaggttgaatagtaagtaaacatatacattcacttgcacagttcagtaagtgtgtgaacagggttcatgaaagaaccaataattttttaatgttcgccaaaatgtacatattgtgtggagaatctgtcttctacacacatacgatgagaatcttaaatctagtacatggtaattgttgctgacaagtatcttgtaatagatcaaactcaaactaaattcaagaagaacacagatcaattcagtacaccatgtacttcaagtaactatatgtaataacagaatcctagtagcgtcattgacagaaaataactctacagactgtggaaccttccacaaagactcccctctagataccttaaatatccacaaacatcattcaaaattcaaaatgctatatatctaatcagccaaacaaaagaaaattgctacttatgtcaaaggtttgctttgccatttttgtatatcataaatcaacaaatatgtagtccaatttgtcaccttgaaaagaatcgcccggtgcctgcaaagtcccattgaaagacttccaatgggtaccacgatacatttctgaaactccttcaacctcttgctaaccaatttccagtgcatgtgaagatccccttgctctaccggaaaagtgcccctttaatgttttacaggacacagataaaattcaagacaaatatctctgttactgagcccataaaaaaagattaaaatatttttgagtacataccccatatagatggcaacaagttttcctaatttctccaccaaaactagagtattttctgaggcacaatacagctcttgcgctttatcttcaagctccttaaggcgtgagtctccatatctgtcaacaaggatcacctccatggatgtctcacttggatcaattgctttaagtgacatcaatggtggtagccgtttcccttcctccaaatcattgcacatcacccacaaatatgggttcatccccaaaatgttgtagaacccatctgatatcttatcagtgtaagacaatgagccactaacctggaaaggttcaaattcattttttagtaaagtcaggtggcataattactctatacaattcaggcaacaaaaaacaaaaccatgatcatgtatgcaaaacatttttatttatttttcttatattcattgctgaaaaaaaaattatagaaccaaactttattgaaaagaaaggaaacactagggacagtccagaatcttgttcatatcatagatagggatgagcctctcaaaaagacaaaacaccaaaaacgttagatttgttagccctatcagcaagacaatgagccccataacgcattgatacacttttaatccattttcccgccacattcaacccttcccacgaaacacattcataagagacagtcaaatgaatgtcgtgcaagttagatttggaagagtaaatacattcctgtctaattctgttcaattttattaaggaacaaacaatccgattgtggaagagtaaataaattggacaattgaactggcagcaagttgtttatctaaatcgcaatagattatttcactttttatctcattatttttatttgtgggatattcttaaagtagttatatttattagtagttatatttattagtagttatatttatttattttttgaataaaaaaattagtagttatatcattcgattcataattttttatttatatataataataataataataaaaagtttcattgatgtgaatgaagttttttttttttttctaaattaaataaaagatcatggtcgctaaagttatggatgttaaagttccaacattatattgctaaaaaaatctaatattatatgctgtgtcattttatgtactatttaattgaaacttaattttaaattgcaaggagggaatattcgaattagagaactcatcttacaaagaggtgtatatccaatatcaataagttaaaacttataactacattaatatcacctgtttaagcgacttagtatcatcaatctaaataaaattatacattaaaaatctttgtttagatcttaggaaaagttctaaaagataaaatagtatttttctaaatttataagagatctttttttggaaatattatagttttaatttatttttcgtttgaaattgaataacggaagatgatgaaattaatttgttggaatattttaagctcaaccaataacatgtaatttgtcatcacccgtatatgcattgtaacaaagacaagctcgaccaataagagtcgcgcattcattgcattttgagtgaagttaaagtcagcaatactacaggtcagagatacatacatatacgcactcaaacccaagaagaattaaataataataataataacaacaaatgaagttgatatccaatagaaactagaaacggcgtacgtacccataggcgatacgaaacggtttcggcatcagaagtttcgggcccagacacttgcattagcaatggctcactcgcaaggcaagcttgagaagtaagccttttggccagactcagctgcagatagtaactctctttcgacctctgcgccaagctactaatattttcccccgatgatgaatccacctgatctctactctcatcactactaccgccgccgccgccaccagccccaccttgctccaccactacatgatcatcatgcctagtcgaacaagaaaccttcgagaggcagtccttaacagacaagttcccatcaaatgttgtgatcccagagaacaagctccccgcatagctactcccactagaaaccctcggcaacgaaacctgccgatcgaaattcctgtccaaactccgatccttcacaaccgacgacctcgtcgccggagccggagccggaaccaccgcagaaggtggaatctgctccggcgggagaagaagctcacgctcctcatcacaggagtatcgagatgatactaacttattactattagtagtagtattggaacggcgttcggctttcttctctgctaaccaatcgcaaaaggcagcgaaatgctcttcctgttgctgctgttgctgccgtcgttggtggtgttggtggtggtggtggtggctgtggttgttgtggtgatgatgatgattattattatttttcttggtttgggatgatgacttgtactcgtggctcgtgaaaaggtcggatacagctgaagctttggctgtgttaacggtgaagtactgattcttcgttgtagaagtcgttgtcgttgatctcgtagtcgtagcagacgacaacgacttattagtgtcgttttcgatactagttgataatacggtgggagaagaagaagaagaagaagaagtagatgcggtggtggttgatgatgagtttattattacctttttcccgtgatcttgatcaggtgatgatgattgtttcgaagatacatcgaatctgcgatccggaaattgccttgggaagaagtaagttgttctgtgaggcatattttccttttcttttttttttctttttaaataaaattcacgggcctcctgagcactgcttctttcttcgccacgaaaccttttcacgcgctcacacgtgcggaatagcttactctcgcacgtacggcctgctcggctgatcaacctccgtcaccgtaattcctctctgatcagattccgcctcccaacatctcacgttcctggccatatgaaataacaataattaaaataagagaaagaaataaaaccagtgatcatcaatattaaaaacatcgattcgattaagatttttctcttctttcttcttcttctgtaaatacatatatatatatatatataattttctctccttcgaaacacagatcatttacagagaaacagatatatacagaaatatatatatatttatgtatattacctgagattattgtaggcttagaaataagaacctcgatcgaatcgttggtgaaggtacggcaatgcacgatgaatattagaataatccaaaattaaaggacaatcacgatcagagcaaggcaactatataattcaattaaatggcgaatatatttgaagagaaaagtattataattaactagagtactatagtctatctatatatagagtgagaagaaaaatgaggttgcttgttgtggatagagtagagagaaaaggcaatggcattagagagagagagagagagagagagagagagagagatctaatatgtgttaacagaagtagtatattttattagagaggagagaaatagaagagaagagaagagaagaaatgagtgggaagagttttgcctggaaaaacgaaaaatattataataaaaaactacaaaatagtacgaaagcagccaatgctaaaaagcgctggctgttcaatgcacaccccctttttattaagtacacgtaaaattgatttaccaatgccgttttgacacgtcacctctcaggtctgtaggacatggggtgcgcatggctgatggcagcgcacgatagtgcttccttttaaagtaaataaataaaagaaattgaaaaatattatccattaatcaaaaatatttttatattgtttttttattagaatatgcctactttttttgagtggattgcctaatatattctcattttgtacttaagtctagcatataatttacataatttaaggggtctaatggggacatcatccataaaagtaggtatatnnnnnnnnntatgaaaatagaggtaaaaattaaaacaagtaaagtaaagtgggtatacaatgtaatttcctcataaataaatgaattgagaagctcaataaataaataaatttgtttaatggactaaaataaatactacaaaaaatgacacattttatcctagtttttatgcttgaaaaaaatagaaaataatttatttcatttttgtataaggtacatatggtattattctttaaactcccaaccaagattcagtttattagttagtctttaactaacttaattatcaattatgagcttgtatattggtcattttggcctatataatgtaaactactcctctcatttcataaaaagtcaaacacaagggagaacaacaagaagaaagagagagacacaatacagtagaaagagaagttagagtgagaaatggagagagagagagagagagagagaatacagtagaaagagaagttagagtgagaaatggagagagatatttgagagagagagagagagagagagagctgggattgggaaattgtattgagcaatattattgattatgttggctcgtgttaatgagttaatgagtgttgagggattacaccatggatgacttgttgtgattattttcttgtagctcctgagattgatatctctaattctcattat
